United States Patent Application Publication US 2026/0240958 A1 - sequence listing, part 13

SEQ ID NO: 12331 - RNA, 5785 nt, synthetic construct
  source 1..5785: mol_type = other RNA
aggaaataagagagaaaagaagagtaagaagaaatataagagccaccatggcccctaagaagaagcgtaaagtgagccggatggaacgcctcgtctacgaggtgcggcagaagtgcagaaacatcgaggacatctgcatctcctgcggatctctgaacgtgaccctggagcacccactgttcatcggcggcatgtgccagaactgtaaaaactgttttctggagtgtgcctatcaatacgacgatgacggctaccagagctactgcaccatctgttgcggcggaagagaggtgctgatgtgtggaaataacaactgctgccggtgcttctgcgtggaatgcgtggacctgctggtgggccccggcgccgcccaggccgctattaaggaagatccttggaactgctacatgtgcggccacaagggcacatacggcctgctgagacggagagaggactggcctagcagactgcagatgttcttcgccaataaccacgaccaggagttcgacccccctaaggtgtaccctcccgtccccgccgagaagagaaagcccatccgggtcctgagcctgttcgatggcatcgccaccggtctgctggtgctgaaggacctgggcatccaggtggataggtacattgcctccgaggtgtgcgaggactccatcaccgtgggaatggtgcgtcatcagggcaagatcatgtacgtgggcgacgtgcggagcgtgacacagaagcatatccaggagtggggccctttcgacctggtgatcggcggcagcccttgcaatgacctgagcatcgtgaacccagcccggaagggcctgtacgagggaaccggcagactgttcttcgagttttacagactgctgcacgacgcccggcctaaggaaggcgacgaccggcccttcttttggctgttcgagaatgtggtggccatgggagtcagcgacaagcgggatattagccggttcctggagagcaaccccgtgatgatcgatgccaaggaagtgagcgccgcccaccgggccagatacttctggggcaatctgcctggcatgaacagacccctggccagcaccgtgaacgacaagctggagctgcaggagtgcctggagcacggccggatcgccaagttcagcaaggtgagaaccatcaccacccgaagcaacagcatcaaacaaggcaaggaccagcactttcctgtgttcatgaacgagaaggaggacatcctgtggtgtaccgagatggagagagtgttcgggttcccagtccactacacagatgtcagcaacatgtctagactggccagacagagactgctgggaagaagctggtccgtccctgtgatcagacacctgttcgcccctctgaaggagtacttcgcctgcgtgagcagcggcaacagcaacgccaacagccggggccccagcttctctagcggcctggtgccactgtccctgagagggagccacatgggccccatggagatctacaaaaccgtgagcgcctggaagcggcagcctgtgcgcgtgctgagcctgtttcggaatatcgataaagtcctgaaaagcctgggattcctggagagcggctctggctccggcggtggcaccctgaagtacgtggaggatgtgacaaacgtggtcagacgggatgtggagaagtggggccccttcgatctggtgtacggcagcacccaacccctgggcagctcttgtgaccggtgccctggctggtacatgtttcagttccaccggatcctgcagtacgccctgccgagacaggagtcccagcggccattcttttggattttcatggacaacttgctgctgaccgaggatgaccaggaaactaccactcggttcctgcagaccgaagccgtgaccctgcaggacgtgagaggccgggactaccagaacgccatgcgggtgtggtccaacatccctggactgaaaagcaagcacgcacctctgacccctaaagaagaggagtacctgcaggcccaggtgcggagcagaagcaagctggacgcccctaaggtggatctgctggtgaagaattgcctcctgcccctgagagagtacttcaagtatttcagccagaatagtctgcccctgggaggcagcggcggcggcagcgtgaccttcagggacgtgatcgtggacttcacccaggaggagtggcagcagctgaagcccgcccagaaggacctgtacagggacgtgatgatggaggtgtactggaacctggtgagcctggacgtggagaccaggcccgacgccaaggagagcgacccccaggaggacgactgggaggacaggcccagcgtggtggtgatcgccgagggccccaccaggaacggcgccaggagctacaccggcggcccaagcagcggcgcccctcctcccagcggcggcagcccagccggctccccaacctctaccgaggagggcacctctgagtccgccacccccgagagcggccctggcacctccaccgagcccagcgagggcagcgcacccggcagccctgccggcagccccacctccacagaggagggaaccagcaccgagcccagcgaaggcagcgccccaggcaccagcaccgagcctagtgagcaggagattaaacggatcaacaagatcagaagaagacttgtgaaagacagcaacaccaagaaggccggcaagacaggccccatgaaaaccctgctggttagagtgatgacacccgatctgagagagcggctggaaaacctgagaaagaagcctgaaaatatcccccagcccatcagcaatacatctagagccaacctgaataagctgctgaccgattacaccgaaatgaagaaggcgatcctgcatgtgtactgggaagagttccagaaggaccctgtgggcctgatgagccgggtggcccagcctgccagcaagaagatcgatcagaacaagctgaaacctgagatggacgagaagggcaacctgaccaccgccggctttgcctgctctcagtgtggccagcccctgttcgtgtacaagctggagcaggtgtctgagaagggcaaggcttacaccaactacttcggacggtgcaatgtggccgagcacgaaaagctgatcctgctggcccagctgaagcccgagaaggatagcgacgaagccgtgacatatagcctgggaaagtttgggcagagggccctggatttctacagcattcatgtgaccaaggagtccacccaccccgtgaagcccctggcccagatcgccggaaacagatacgcctccggacctgtgggaaaggccctgagcgacgcatgtatgggcacaatcgcctccttcctgtctaagtaccaggacatcatcatcgaacaccagaaggtggtgaagggcaaccagaagagactggagagcctgcgggagctggccggcaaggaaaacctggaataccctagcgtgaccctgccacctcagcctcacaccaaggagggcgttgatgcctacaacgaagtgatcgcccgggtgcgaatgtgggtgaacctgaacctgtggcagaagctgaagctaagcagagatgatgccaagcctctgctgagactgaagggattcccttcctttcctctggtcgagagacaggccaacgaagtggactggtgggacatggtgtgtaacgtgaagaagctgatcaacgagaaaaaggaggatggcaaggtgttttggcagaatctggctggctacaagagacaggaagccctgagaccatacctgagcagcgaggaagatcggaagaagggaaagaaattcgctcggtaccagctgggcgacctgctgctgcacctggaaaagaagcacggcgaggactggggaaaggtgtacgacgaggcctgggagcggattgacaagaaagtggaaggcctgagcaagcacatcaagctggaagaggaacggagaagcgaggacgcccagagcaaggccgccctgaccgactggctgcgggctaaggccagcttcgtgatcgagggcctgaaggaggccgacaaggacgagttctgcagatgcgagctgaagctgcagaagtggtacggggacctgcggggaaagcccttcgccatcgaagccgagaacagcatcctggacatcagcggcttcagcaagcagtacaactgtgccttcatctggcagaaggacggcgtgaagaagctgaacctgtacctgatcatcaactacttcaagggcggcaagctgcggttcaagaagatcaaacctgaagccttcgaagccaacagattctacaccgtgatcaacaaaaagagcggcgagatcgtgcccatggaggtgaacttcaacttcgacgaccccaacctgatcatcctgcctctggcctttggcaagagacagggcagagaattcatctggaacgacctgctgtccctggaaaccggcagcctgaagctggccaacggaagagtgatcgagaagacactgtacaacagaagaacccggcaggatgagcctgccctgttcgtggccctgaccttcgagcggcgggaggtcctggactcctccaatatcaaaccaatgaacctgatcggcgtggcaagaggcgaaaacatccccgccgtgatcgccctgaccgaccccgagggctgcccactgagccggtttaaggatagcctgggaaacccaacccacatcctgagaatcggcgagagctataaggagaagcagcggaccatccaggccaagaaggaggtggagcagcggagagccggcggctacagccggaagtacgccagcaaagccaagaatctggcagacgatatggtgagaaacaccgctagagatctgctgtactacgccgtgacccaggatgccatgctgatcttcgccaacctgagccggggcttcggccggcagggcaagcggaccttcatggccgagagacagtacacacggatggaggactggctgaccgccaagctggcctacgagggcctgagcaagacctacctgtccaagacactggcccagtacacctccaagacatgcagcaactgtgggtttaccatcaccagcgccgactacgacagggtgctggagaagctgaagaagacagcaacaggctggatgaccacaattaacggcaaggagctgaaggtggagggccagattacctactacaacagatacaagagacagaacgtagtcaaggacctgtccgtcgagctggatagactgagcgaagaatctgtgaacaacgacatctcctcctggacaaagggcagaagcggagaagctctgagcctcctgaagaaaagattctcccatagacccgtgcaggagaagttcgtgtgcctgaactgcggcttcgagacacacgcagccgagcaagccgccctgaacatcgccagatcctggctgttcctgcggagccaggagtacaagaaataccagacaaacaagacaaccggcaacaccgataagagagccttcgtcgagacctggcagtccttttaccggaagaagcttaaggaggtgtggaaacctgccgtgcggtctggcggatctggcggaggctccaccagccccaagaaaaagagaaaagtctaagctgccttctgcggggcttgccttctggccatgcccttcttctctcccttgcacctgtacctcttggtctttgaataaagcctgagtaggaaggctagcaaaaaaaaaaaaaaaaaaaaaaaaaaaaaaaaaaaaaaaaaaaaaaaaaaaaaaaaaaaaaaaaaaaaaaaaaaaaaaaa

SEQ ID NO: 12332 - RNA, 5785 nt, synthetic construct
  source 1..5785: mol_type = other RNA
aggaaataagagagaaaagaagagtaagaagaaatataagagccaccatggcccctaagaagaagcgtaaagtgagccggatggaacgcctcgtctacgaggtgcggcagaagtgcagaaacatcgaggacatctgcatctcctgcggatctctgaacgtgaccctggagcacccactgttcatcggcggcatgtgccagaactgtaaaaactgttttctggagtgtgcctatcaatacgacgatgacggctaccagagctactgcaccatctgttgcggcggaagagaggtgctgatgtgtggaaataacaactgctgccggtgcttctgcgtggaatgcgtggacctgctggtgggccccggcgccgcccaggccgctattaaggaagatccttggaactgctacatgtgcggccacaagggcacatacggcctgctgagacggagagaggactggcctagcagactgcagatgttcttcgccaataaccacgaccaggagttcgacccccctaaggtgtaccctcccgtccccgccgagaagagaaagcccatccgggtcctgagcctgttcgatggcatcgccaccggtctgctggtgctgaaggacctgggcatccaggtggataggtacattgcctccgaggtgtgcgaggactccatcaccgtgggaatggtgcgtcatcagggcaagatcatgtacgtgggcgacgtgcggagcgtgacacagaagcatatccaggagtggggccctttcgacctggtgatcggcggcagcccttgcaatgacctgagcatcgtgaacccagcccggaagggcctgtacgagggaaccggcagactgttcttcgagttttacagactgctgcacgacgcccggcctaaggaaggcgacgaccggcccttcttttggctgttcgagaatgtggtggccatgggagtcagcgacaagcgggatattagccggttcctggagagcaaccccgtgatgatcgatgccaaggaagtgagcgccgcccaccgggccagatacttctggggcaatctgcctggcatgaacagacccctggccagcaccgtgaacgacaagctggagctgcaggagtgcctggagcacggccggatcgccaagttcagcaaggtgagaaccatcaccacccgaagcaacagcatcaaacaaggcaaggaccagcactttcctgtgttcatgaacgagaaggaggacatcctgtggtgtaccgagatggagagagtgttcgggttcccagtccactacacagatgtcagcaacatgtctagactggccagacagagactgctgggaagaagctggtccgtccctgtgatcagacacctgttcgcccctctgaaggagtacttcgcctgcgtgagcagcggcaacagcaacgccaacagccggggccccagcttctctagcggcctggtgccactgtccctgagagggagccacatgggccccatggagatctacaaaaccgtgagcgcctggaagcggcagcctgtgcgcgtgctgagcctgtttcggaatatcgataaagtcctgaaaagcctgggattcctggagagcggctctggctccggcggtggcaccctgaagtacgtggaggatgtgacaaacgtggtcagacgggatgtggagaagtggggccccttcgatctggtgtacggcagcacccaacccctgggcagctcttgtgaccggtgccctggctggtacatgtttcagttccaccggatcctgcagtacgccctgccgagacaggagtcccagcggccattcttttggattttcatggacaacttgctgctgaccgaggatgaccaggaaactaccactcggttcctgcagaccgaagccgtgaccctgcaggacgtgagaggccgggactaccagaacgccatgcgggtgtggtccaacatccctggactgaaaagcaagcacgcacctctgacccctaaagaagaggagtacctgcaggcccaggtgcggagcagaagcaagctggacgcccctaaggtggatctgctggtgaagaattgcctcctgcccctgagagagtacttcaagtatttcagccagaatagtctgcccctgggaggcagcggcggcggcagccacgagctgctgaccttcaaggacatcagcgtggacttcacccaggaggagtggggccagctggcccccgcctaccagaacctgtacagggaggtgatgctggagaactacagcaacctggtgagcgtggccggctaccagctgagcaagcccagcgtgatcagccagctggagaagggcgaggagccctggatggccgagaaggagggccccggcgaccccagcagcgacctgaagagcggcggcccaagcagcggcgcccctcctcccagcggcggcagcccagccggctccccaacctctaccgaggagggcacctctgagtccgccacccccgagagcggccctggcacctccaccgagcccagcgagggcagcgcacccggcagccctgccggcagccccacctccacagaggagggaaccagcaccgagcccagcgaaggcagcgccccaggcaccagcaccgagcctagtgagcaggagattaaacggatcaacaagatcagaagaagacttgtgaaagacagcaacaccaagaaggccggcaagacaggccccatgaaaaccctgctggttagagtgatgacacccgatctgagagagcggctggaaaacctgagaaagaagcctgaaaatatcccccagcccatcagcaatacatctagagccaacctgaataagctgctgaccgattacaccgaaatgaagaaggcgatcctgcatgtgtactgggaagagttccagaaggaccctgtgggcctgatgagccgggtggcccagcctgccagcaagaagatcgatcagaacaagctgaaacctgagatggacgagaagggcaacctgaccaccgccggctttgcctgctctcagtgtggccagcccctgttcgtgtacaagctggagcaggtgtctgagaagggcaaggcttacaccaactacttcggacggtgcaatgtggccgagcacgaaaagctgatcctgctggcccagctgaagcccgagaaggatagcgacgaagccgtgacatatagcctgggaaagtttgggcagagggccctggatttctacagcattcatgtgaccaaggagtccacccaccccgtgaagcccctggcccagatcgccggaaacagatacgcctccggacctgtgggaaaggccctgagcgacgcatgtatgggcacaatcgcctccttcctgtctaagtaccaggacatcatcatcgaacaccagaaggtggtgaagggcaaccagaagagactggagagcctgcgggagctggccggcaaggaaaacctggaataccctagcgtgaccctgccacctcagcctcacaccaaggagggcgttgatgcctacaacgaagtgatcgcccgggtgcgaatgtgggtgaacctgaacctgtggcagaagctgaagctaagcagagatgatgccaagcctctgctgagactgaagggattcccttcctttcctctggtcgagagacaggccaacgaagtggactggtgggacatggtgtgtaacgtgaagaagctgatcaacgagaaaaaggaggatggcaaggtgttttggcagaatctggctggctacaagagacaggaagccctgagaccatacctgagcagcgaggaagatcggaagaagggaaagaaattcgctcggtaccagctgggcgacctgctgctgcacctggaaaagaagcacggcgaggactggggaaaggtgtacgacgaggcctgggagcggattgacaagaaagtggaaggcctgagcaagcacatcaagctggaagaggaacggagaagcgaggacgcccagagcaaggccgccctgaccgactggctgcgggctaaggccagcttcgtgatcgagggcctgaaggaggccgacaaggacgagttctgcagatgcgagctgaagctgcagaagtggtacggggacctgcggggaaagcccttcgccatcgaagccgagaacagcatcctggacatcagcggcttcagcaagcagtacaactgtgccttcatctggcagaaggacggcgtgaagaagctgaacctgtacctgatcatcaactacttcaagggcggcaagctgcggttcaagaagatcaaacctgaagccttcgaagccaacagattctacaccgtgatcaacaaaaagagcggcgagatcgtgcccatggaggtgaacttcaacttcgacgaccccaacctgatcatcctgcctctggcctttggcaagagacagggcagagaattcatctggaacgacctgctgtccctggaaaccggcagcctgaagctggccaacggaagagtgatcgagaagacactgtacaacagaagaacccggcaggatgagcctgccctgttcgtggccctgaccttcgagcggcgggaggtcctggactcctccaatatcaaaccaatgaacctgatcggcgtggcaagaggcgaaaacatccccgccgtgatcgccctgaccgaccccgagggctgcccactgagccggtttaaggatagcctgggaaacccaacccacatcctgagaatcggcgagagctataaggagaagcagcggaccatccaggccaagaaggaggtggagcagcggagagccggcggctacagccggaagtacgccagcaaagccaagaatctggcagacgatatggtgagaaacaccgctagagatctgctgtactacgccgtgacccaggatgccatgctgatcttcgccaacctgagccggggcttcggccggcagggcaagcggaccttcatggccgagagacagtacacacggatggaggactggctgaccgccaagctggcctacgagggcctgagcaagacctacctgtccaagacactggcccagtacacctccaagacatgcagcaactgtgggtttaccatcaccagcgccgactacgacagggtgctggagaagctgaagaagacagcaacaggctggatgaccacaattaacggcaaggagctgaaggtggagggccagattacctactacaacagatacaagagacagaacgtagtcaaggacctgtccgtcgagctggatagactgagcgaagaatctgtgaacaacgacatctcctcctggacaaagggcagaagcggagaagctctgagcctcctgaagaaaagattctcccatagacccgtgcaggagaagttcgtgtgcctgaactgcggcttcgagacacacgcagccgagcaagccgccctgaacatcgccagatcctggctgttcctgcggagccaggagtacaagaaataccagacaaacaagacaaccggcaacaccgataagagagccttcgtcgagacctggcagtccttttaccggaagaagcttaaggaggtgtggaaacctgccgtgcggtctggcggatctggcggaggctccaccagccccaagaaaaagagaaaagtctaagctgccttctgcggggcttgccttctggccatgcccttcttctctcccttgcacctgtacctcttggtctttgaataaagcctgagtaggaaggctagcaaaaaaaaaaaaaaaaaaaaaaaaaaaaaaaaaaaaaaaaaaaaaaaaaaaaaaaaaaaaaaaaaaaaaaaaaaaaaaaa

SEQ ID NO: 12333 - RNA, 5785 nt, synthetic construct
  source 1..5785: mol_type = other RNA
aggaaataagagagaaaagaagagtaagaagaaatataagagccaccatggcccctaagaagaagcgtaaagtgagccggatggaacgcctcgtctacgaggtgcggcagaagtgcagaaacatcgaggacatctgcatctcctgcggatctctgaacgtgaccctggagcacccactgttcatcggcggcatgtgccagaactgtaaaaactgttttctggagtgtgcctatcaatacgacgatgacggctaccagagctactgcaccatctgttgcggcggaagagaggtgctgatgtgtggaaataacaactgctgccggtgcttctgcgtggaatgcgtggacctgctggtgggccccggcgccgcccaggccgctattaaggaagatccttggaactgctacatgtgcggccacaagggcacatacggcctgctgagacggagagaggactggcctagcagactgcagatgttcttcgccaataaccacgaccaggagttcgacccccctaaggtgtaccctcccgtccccgccgagaagagaaagcccatccgggtcctgagcctgttcgatggcatcgccaccggtctgctggtgctgaaggacctgggcatccaggtggataggtacattgcctccgaggtgtgcgaggactccatcaccgtgggaatggtgcgtcatcagggcaagatcatgtacgtgggcgacgtgcggagcgtgacacagaagcatatccaggagtggggccctttcgacctggtgatcggcggcagcccttgcaatgacctgagcatcgtgaacccagcccggaagggcctgtacgagggaaccggcagactgttcttcgagttttacagactgctgcacgacgcccggcctaaggaaggcgacgaccggcccttcttttggctgttcgagaatgtggtggccatgggagtcagcgacaagcgggatattagccggttcctggagagcaaccccgtgatgatcgatgccaaggaagtgagcgccgcccaccgggccagatacttctggggcaatctgcctggcatgaacagacccctggccagcaccgtgaacgacaagctggagctgcaggagtgcctggagcacggccggatcgccaagttcagcaaggtgagaaccatcaccacccgaagcaacagcatcaaacaaggcaaggaccagcactttcctgtgttcatgaacgagaaggaggacatcctgtggtgtaccgagatggagagagtgttcgggttcccagtccactacacagatgtcagcaacatgtctagactggccagacagagactgctgggaagaagctggtccgtccctgtgatcagacacctgttcgcccctctgaaggagtacttcgcctgcgtgagcagcggcaacagcaacgccaacagccggggccccagcttctctagcggcctggtgccactgtccctgagagggagccacatgggccccatggagatctacaaaaccgtgagcgcctggaagcggcagcctgtgcgcgtgctgagcctgtttcggaatatcgataaagtcctgaaaagcctgggattcctggagagcggctctggctccggcggtggcaccctgaagtacgtggaggatgtgacaaacgtggtcagacgggatgtggagaagtggggccccttcgatctggtgtacggcagcacccaacccctgggcagctcttgtgaccggtgccctggctggtacatgtttcagttccaccggatcctgcagtacgccctgccgagacaggagtcccagcggccattcttttggattttcatggacaacttgctgctgaccgaggatgaccaggaaactaccactcggttcctgcagaccgaagccgtgaccctgcaggacgtgagaggccgggactaccagaacgccatgcgggtgtggtccaacatccctggactgaaaagcaagcacgcacctctgacccctaaagaagaggagtacctgcaggcccaggtgcggagcagaagcaagctggacgcccctaaggtggatctgctggtgaagaattgcctcctgcccctgagagagtacttcaagtatttcagccagaatagtctgcccctgggaggcagcggcggcggcatggagctggtgaccttcgaggacgtggccgtgtacttcaccaggaaggagtggggctggctggaccccgcccagagggacctgtacagggacgtgatgctggagaactacggcaacttcgtgagcatgggcctgcccttcagcaagcccgacgtgatcagccagctggagcagggcgaggagagctgggtggaggacctgcaggagtgcgaggagggcgagttcagccccgtggtgcacagcggcggcccaagcagcggcgcccctcctcccagcggcggcagcccagccggctccccaacctctaccgaggagggcacctctgagtccgccacccccgagagcggccctggcacctccaccgagcccagcgagggcagcgcacccggcagccctgccggcagccccacctccacagaggagggaaccagcaccgagcccagcgaaggcagcgccccaggcaccagcaccgagcctagtgagcaggagattaaacggatcaacaagatcagaagaagacttgtgaaagacagcaacaccaagaaggccggcaagacaggccccatgaaaaccctgctggttagagtgatgacacccgatctgagagagcggctggaaaacctgagaaagaagcctgaaaatatcccccagcccatcagcaatacatctagagccaacctgaataagctgctgaccgattacaccgaaatgaagaaggcgatcctgcatgtgtactgggaagagttccagaaggaccctgtgggcctgatgagccgggtggcccagcctgccagcaagaagatcgatcagaacaagctgaaacctgagatggacgagaagggcaacctgaccaccgccggctttgcctgctctcagtgtggccagcccctgttcgtgtacaagctggagcaggtgtctgagaagggcaaggcttacaccaactacttcggacggtgcaatgtggccgagcacgaaaagctgatcctgctggcccagctgaagcccgagaaggatagcgacgaagccgtgacatatagcctgggaaagtttgggcagagggccctggatttctacagcattcatgtgaccaaggagtccacccaccccgtgaagcccctggcccagatcgccggaaacagatacgcctccggacctgtgggaaaggccctgagcgacgcatgtatgggcacaatcgcctccttcctgtctaagtaccaggacatcatcatcgaacaccagaaggtggtgaagggcaaccagaagagactggagagcctgcgggagctggccggcaaggaaaacctggaataccctagcgtgaccctgccacctcagcctcacaccaaggagggcgttgatgcctacaacgaagtgatcgcccgggtgcgaatgtgggtgaacctgaacctgtggcagaagctgaagctaagcagagatgatgccaagcctctgctgagactgaagggattcccttcctttcctctggtcgagagacaggccaacgaagtggactggtgggacatggtgtgtaacgtgaagaagctgatcaacgagaaaaaggaggatggcaaggtgttttggcagaatctggctggctacaagagacaggaagccctgagaccatacctgagcagcgaggaagatcggaagaagggaaagaaattcgctcggtaccagctgggcgacctgctgctgcacctggaaaagaagcacggcgaggactggggaaaggtgtacgacgaggcctgggagcggattgacaagaaagtggaaggcctgagcaagcacatcaagctggaagaggaacggagaagcgaggacgcccagagcaaggccgccctgaccgactggctgcgggctaaggccagcttcgtgatcgagggcctgaaggaggccgacaaggacgagttctgcagatgcgagctgaagctgcagaagtggtacggggacctgcggggaaagcccttcgccatcgaagccgagaacagcatcctggacatcagcggcttcagcaagcagtacaactgtgccttcatctggcagaaggacggcgtgaagaagctgaacctgtacctgatcatcaactacttcaagggcggcaagctgcggttcaagaagatcaaacctgaagccttcgaagccaacagattctacaccgtgatcaacaaaaagagcggcgagatcgtgcccatggaggtgaacttcaacttcgacgaccccaacctgatcatcctgcctctggcctttggcaagagacagggcagagaattcatctggaacgacctgctgtccctggaaaccggcagcctgaagctggccaacggaagagtgatcgagaagacactgtacaacagaagaacccggcaggatgagcctgccctgttcgtggccctgaccttcgagcggcgggaggtcctggactcctccaatatcaaaccaatgaacctgatcggcgtggcaagaggcgaaaacatccccgccgtgatcgccctgaccgaccccgagggctgcccactgagccggtttaaggatagcctgggaaacccaacccacatcctgagaatcggcgagagctataaggagaagcagcggaccatccaggccaagaaggaggtggagcagcggagagccggcggctacagccggaagtacgccagcaaagccaagaatctggcagacgatatggtgagaaacaccgctagagatctgctgtactacgccgtgacccaggatgccatgctgatcttcgccaacctgagccggggcttcggccggcagggcaagcggaccttcatggccgagagacagtacacacggatggaggactggctgaccgccaagctggcctacgagggcctgagcaagacctacctgtccaagacactggcccagtacacctccaagacatgcagcaactgtgggtttaccatcaccagcgccgactacgacagggtgctggagaagctgaagaagacagcaacaggctggatgaccacaattaacggcaaggagctgaaggtggagggccagattacctactacaacagatacaagagacagaacgtagtcaaggacctgtccgtcgagctggatagactgagcgaagaatctgtgaacaacgacatctcctcctggacaaagggcagaagcggagaagctctgagcctcctgaagaaaagattctcccatagacccgtgcaggagaagttcgtgtgcctgaactgcggcttcgagacacacgcagccgagcaagccgccctgaacatcgccagatcctggctgttcctgcggagccaggagtacaagaaataccagacaaacaagacaaccggcaacaccgataagagagccttcgtcgagacctggcagtccttttaccggaagaagcttaaggaggtgtggaaacctgccgtgcggtctggcggatctggcggaggctccaccagccccaagaaaaagagaaaagtctaagctgccttctgcggggcttgccttctggccatgcccttcttctctcccttgcacctgtacctcttggtctttgaataaagcctgagtaggaaggctagcaaaaaaaaaaaaaaaaaaaaaaaaaaaaaaaaaaaaaaaaaaaaaaaaaaaaaaaaaaaaaaaaaaaaaaaaaaaaaaaa

SEQ ID NO: 12334 - RNA, 5785 nt, synthetic construct
  source 1..5785: mol_type = other RNA
aggaaataagagagaaaagaagagtaagaagaaatataagagccaccatggcccctaagaagaagcgtaaagtgagccggatggaacgcctcgtctacgaggtgcggcagaagtgcagaaacatcgaggacatctgcatctcctgcggatctctgaacgtgaccctggagcacccactgttcatcggcggcatgtgccagaactgtaaaaactgttttctggagtgtgcctatcaatacgacgatgacggctaccagagctactgcaccatctgttgcggcggaagagaggtgctgatgtgtggaaataacaactgctgccggtgcttctgcgtggaatgcgtggacctgctggtgggccccggcgccgcccaggccgctattaaggaagatccttggaactgctacatgtgcggccacaagggcacatacggcctgctgagacggagagaggactggcctagcagactgcagatgttcttcgccaataaccacgaccaggagttcgacccccctaaggtgtaccctcccgtccccgccgagaagagaaagcccatccgggtcctgagcctgttcgatggcatcgccaccggtctgctggtgctgaaggacctgggcatccaggtggataggtacattgcctccgaggtgtgcgaggactccatcaccgtgggaatggtgcgtcatcagggcaagatcatgtacgtgggcgacgtgcggagcgtgacacagaagcatatccaggagtggggccctttcgacctggtgatcggcggcagcccttgcaatgacctgagcatcgtgaacccagcccggaagggcctgtacgagggaaccggcagactgttcttcgagttttacagactgctgcacgacgcccggcctaaggaaggcgacgaccggcccttcttttggctgttcgagaatgtggtggccatgggagtcagcgacaagcgggatattagccggttcctggagagcaaccccgtgatgatcgatgccaaggaagtgagcgccgcccaccgggccagatacttctggggcaatctgcctggcatgaacagacccctggccagcaccgtgaacgacaagctggagctgcaggagtgcctggagcacggccggatcgccaagttcagcaaggtgagaaccatcaccacccgaagcaacagcatcaaacaaggcaaggaccagcactttcctgtgttcatgaacgagaaggaggacatcctgtggtgtaccgagatggagagagtgttcgggttcccagtccactacacagatgtcagcaacatgtctagactggccagacagagactgctgggaagaagctggtccgtccctgtgatcagacacctgttcgcccctctgaaggagtacttcgcctgcgtgagcagcggcaacagcaacgccaacagccggggccccagcttctctagcggcctggtgccactgtccctgagagggagccacatgggccccatggagatctacaaaaccgtgagcgcctggaagcggcagcctgtgcgcgtgctgagcctgtttcggaatatcgataaagtcctgaaaagcctgggattcctggagagcggctctggctccggcggtggcaccctgaagtacgtggaggatgtgacaaacgtggtcagacgggatgtggagaagtggggccccttcgatctggtgtacggcagcacccaacccctgggcagctcttgtgaccggtgccctggctggtacatgtttcagttccaccggatcctgcagtacgccctgccgagacaggagtcccagcggccattcttttggattttcatggacaacttgctgctgaccgaggatgaccaggaaactaccactcggttcctgcagaccgaagccgtgaccctgcaggacgtgagaggccgggactaccagaacgccatgcgggtgtggtccaacatccctggactgaaaagcaagcacgcacctctgacccctaaagaagaggagtacctgcaggcccaggtgcggagcagaagcaagctggacgcccctaaggtggatctgctggtgaagaattgcctcctgcccctgagagagtacttcaagtatttcagccagaatagtctgcccctgggaggcagcggcggcggcatggccgccatgcccctgaaggccaggtaccaggagatggtgaccttcgaggacgtggccgtgcacttcaccaagaccgagtggaccggcctgagccccgcccagagggccctgtacaggagcgtgatgctggagaacttcggcaacctgaccgccctgggctaccccgtgcccaagcccgccctgatcagcctgctggagggcggcgacatggcctggggcctggaggcccaggacgaccccggcggcccaagcagcggcgcccctcctcccagcggcggcagcccagccggctccccaacctctaccgaggagggcacctctgagtccgccacccccgagagcggccctggcacctccaccgagcccagcgagggcagcgcacccggcagccctgccggcagccccacctccacagaggagggaaccagcaccgagcccagcgaaggcagcgccccaggcaccagcaccgagcctagtgagcaggagattaaacggatcaacaagatcagaagaagacttgtgaaagacagcaacaccaagaaggccggcaagacaggccccatgaaaaccctgctggttagagtgatgacacccgatctgagagagcggctggaaaacctgagaaagaagcctgaaaatatcccccagcccatcagcaatacatctagagccaacctgaataagctgctgaccgattacaccgaaatgaagaaggcgatcctgcatgtgtactgggaagagttccagaaggaccctgtgggcctgatgagccgggtggcccagcctgccagcaagaagatcgatcagaacaagctgaaacctgagatggacgagaagggcaacctgaccaccgccggctttgcctgctctcagtgtggccagcccctgttcgtgtacaagctggagcaggtgtctgagaagggcaaggcttacaccaactacttcggacggtgcaatgtggccgagcacgaaaagctgatcctgctggcccagctgaagcccgagaaggatagcgacgaagccgtgacatatagcctgggaaagtttgggcagagggccctggatttctacagcattcatgtgaccaaggagtccacccaccccgtgaagcccctggcccagatcgccggaaacagatacgcctccggacctgtgggaaaggccctgagcgacgcatgtatgggcacaatcgcctccttcctgtctaagtaccaggacatcatcatcgaacaccagaaggtggtgaagggcaaccagaagagactggagagcctgcgggagctggccggcaaggaaaacctggaataccctagcgtgaccctgccacctcagcctcacaccaaggagggcgttgatgcctacaacgaagtgatcgcccgggtgcgaatgtgggtgaacctgaacctgtggcagaagctgaagctaagcagagatgatgccaagcctctgctgagactgaagggattcccttcctttcctctggtcgagagacaggccaacgaagtggactggtgggacatggtgtgtaacgtgaagaagctgatcaacgagaaaaaggaggatggcaaggtgttttggcagaatctggctggctacaagagacaggaagccctgagaccatacctgagcagcgaggaagatcggaagaagggaaagaaattcgctcggtaccagctgggcgacctgctgctgcacctggaaaagaagcacggcgaggactggggaaaggtgtacgacgaggcctgggagcggattgacaagaaagtggaaggcctgagcaagcacatcaagctggaagaggaacggagaagcgaggacgcccagagcaaggccgccctgaccgactggctgcgggctaaggccagcttcgtgatcgagggcctgaaggaggccgacaaggacgagttctgcagatgcgagctgaagctgcagaagtggtacggggacctgcggggaaagcccttcgccatcgaagccgagaacagcatcctggacatcagcggcttcagcaagcagtacaactgtgccttcatctggcagaaggacggcgtgaagaagctgaacctgtacctgatcatcaactacttcaagggcggcaagctgcggttcaagaagatcaaacctgaagccttcgaagccaacagattctacaccgtgatcaacaaaaagagcggcgagatcgtgcccatggaggtgaacttcaacttcgacgaccccaacctgatcatcctgcctctggcctttggcaagagacagggcagagaattcatctggaacgacctgctgtccctggaaaccggcagcctgaagctggccaacggaagagtgatcgagaagacactgtacaacagaagaacccggcaggatgagcctgccctgttcgtggccctgaccttcgagcggcgggaggtcctggactcctccaatatcaaaccaatgaacctgatcggcgtggcaagaggcgaaaacatccccgccgtgatcgccctgaccgaccccgagggctgcccactgagccggtttaaggatagcctgggaaacccaacccacatcctgagaatcggcgagagctataaggagaagcagcggaccatccaggccaagaaggaggtggagcagcggagagccggcggctacagccggaagtacgccagcaaagccaagaatctggcagacgatatggtgagaaacaccgctagagatctgctgtactacgccgtgacccaggatgccatgctgatcttcgccaacctgagccggggcttcggccggcagggcaagcggaccttcatggccgagagacagtacacacggatggaggactggctgaccgccaagctggcctacgagggcctgagcaagacctacctgtccaagacactggcccagtacacctccaagacatgcagcaactgtgggtttaccatcaccagcgccgactacgacagggtgctggagaagctgaagaagacagcaacaggctggatgaccacaattaacggcaaggagctgaaggtggagggccagattacctactacaacagatacaagagacagaacgtagtcaaggacctgtccgtcgagctggatagactgagcgaagaatctgtgaacaacgacatctcctcctggacaaagggcagaagcggagaagctctgagcctcctgaagaaaagattctcccatagacccgtgcaggagaagttcgtgtgcctgaactgcggcttcgagacacacgcagccgagcaagccgccctgaacatcgccagatcctggctgttcctgcggagccaggagtacaagaaataccagacaaacaagacaaccggcaacaccgataagagagccttcgtcgagacctggcagtccttttaccggaagaagcttaaggaggtgtggaaacctgccgtgcggtctggcggatctggcggaggctccaccagccccaagaaaaagagaaaagtctaagctgccttctgcggggcttgccttctggccatgcccttcttctctcccttgcacctgtacctcttggtctttgaataaagcctgagtaggaaggctagcaaaaaaaaaaaaaaaaaaaaaaaaaaaaaaaaaaaaaaaaaaaaaaaaaaaaaaaaaaaaaaaaaaaaaaaaaaaaaaaa

SEQ ID NO: 12335 - RNA, 5785 nt, synthetic construct
  source 1..5785: mol_type = other RNA
aggaaataagagagaaaagaagagtaagaagaaatataagagccaccatggcccctaagaagaagcgtaaagtgagccggatggaacgcctcgtctacgaggtgcggcagaagtgcagaaacatcgaggacatctgcatctcctgcggatctctgaacgtgaccctggagcacccactgttcatcggcggcatgtgccagaactgtaaaaactgttttctggagtgtgcctatcaatacgacgatgacggctaccagagctactgcaccatctgttgcggcggaagagaggtgctgatgtgtggaaataacaactgctgccggtgcttctgcgtggaatgcgtggacctgctggtgggccccggcgccgcccaggccgctattaaggaagatccttggaactgctacatgtgcggccacaagggcacatacggcctgctgagacggagagaggactggcctagcagactgcagatgttcttcgccaataaccacgaccaggagttcgacccccctaaggtgtaccctcccgtccccgccgagaagagaaagcccatccgggtcctgagcctgttcgatggcatcgccaccggtctgctggtgctgaaggacctgggcatccaggtggataggtacattgcctccgaggtgtgcgaggactccatcaccgtgggaatggtgcgtcatcagggcaagatcatgtacgtgggcgacgtgcggagcgtgacacagaagcatatccaggagtggggccctttcgacctggtgatcggcggcagcccttgcaatgacctgagcatcgtgaacccagcccggaagggcctgtacgagggaaccggcagactgttcttcgagttttacagactgctgcacgacgcccggcctaaggaaggcgacgaccggcccttcttttggctgttcgagaatgtggtggccatgggagtcagcgacaagcgggatattagccggttcctggagagcaaccccgtgatgatcgatgccaaggaagtgagcgccgcccaccgggccagatacttctggggcaatctgcctggcatgaacagacccctggccagcaccgtgaacgacaagctggagctgcaggagtgcctggagcacggccggatcgccaagttcagcaaggtgagaaccatcaccacccgaagcaacagcatcaaacaaggcaaggaccagcactttcctgtgttcatgaacgagaaggaggacatcctgtggtgtaccgagatggagagagtgttcgggttcccagtccactacacagatgtcagcaacatgtctagactggccagacagagactgctgggaagaagctggtccgtccctgtgatcagacacctgttcgcccctctgaaggagtacttcgcctgcgtgagcagcggcaacagcaacgccaacagccggggccccagcttctctagcggcctggtgccactgtccctgagagggagccacatgggccccatggagatctacaaaaccgtgagcgcctggaagcggcagcctgtgcgcgtgctgagcctgtttcggaatatcgataaagtcctgaaaagcctgggattcctggagagcggctctggctccggcggtggcaccctgaagtacgtggaggatgtgacaaacgtggtcagacgggatgtggagaagtggggccccttcgatctggtgtacggcagcacccaacccctgggcagctcttgtgaccggtgccctggctggtacatgtttcagttccaccggatcctgcagtacgccctgccgagacaggagtcccagcggccattcttttggattttcatggacaacttgctgctgaccgaggatgaccaggaaactaccactcggttcctgcagaccgaagccgtgaccctgcaggacgtgagaggccgggactaccagaacgccatgcgggtgtggtccaacatccctggactgaaaagcaagcacgcacctctgacccctaaagaagaggagtacctgcaggcccaggtgcggagcagaagcaagctggacgcccctaaggtggatctgctggtgaagaattgcctcctgcccctgagagagtacttcaagtatttcagccagaatagtctgcccctgggaggcagcggcggcggcgcccaggagagcgtggtgttcagcgacgtgagcatcgacttcagccaggaggagtgggagtgcctgaacgacgaccagagggacctgtacagggacgtgatgctggagaactacagccacctggtgagcatggccggccacagcgtgagcaagcccgacgtgatcagcgtgctggagcagggcaaggagccctggctggtggacagggagctgaccagggagcagtggcccgtgctggagagcggcggcccaagcagcggcgcccctcctcccagcggcggcagcccagccggctccccaacctctaccgaggagggcacctctgagtccgccacccccgagagcggccctggcacctccaccgagcccagcgagggcagcgcacccggcagccctgccggcagccccacctccacagaggagggaaccagcaccgagcccagcgaaggcagcgccccaggcaccagcaccgagcctagtgagcaggagattaaacggatcaacaagatcagaagaagacttgtgaaagacagcaacaccaagaaggccggcaagacaggccccatgaaaaccctgctggttagagtgatgacacccgatctgagagagcggctggaaaacctgagaaagaagcctgaaaatatcccccagcccatcagcaatacatctagagccaacctgaataagctgctgaccgattacaccgaaatgaagaaggcgatcctgcatgtgtactgggaagagttccagaaggaccctgtgggcctgatgagccgggtggcccagcctgccagcaagaagatcgatcagaacaagctgaaacctgagatggacgagaagggcaacctgaccaccgccggctttgcctgctctcagtgtggccagcccctgttcgtgtacaagctggagcaggtgtctgagaagggcaaggcttacaccaactacttcggacggtgcaatgtggccgagcacgaaaagctgatcctgctggcccagctgaagcccgagaaggatagcgacgaagccgtgacatatagcctgggaaagtttgggcagagggccctggatttctacagcattcatgtgaccaaggagtccacccaccccgtgaagcccctggcccagatcgccggaaacagatacgcctccggacctgtgggaaaggccctgagcgacgcatgtatgggcacaatcgcctccttcctgtctaagtaccaggacatcatcatcgaacaccagaaggtggtgaagggcaaccagaagagactggagagcctgcgggagctggccggcaaggaaaacctggaataccctagcgtgaccctgccacctcagcctcacaccaaggagggcgttgatgcctacaacgaagtgatcgcccgggtgcgaatgtgggtgaacctgaacctgtggcagaagctgaagctaagcagagatgatgccaagcctctgctgagactgaagggattcccttcctttcctctggtcgagagacaggccaacgaagtggactggtgggacatggtgtgtaacgtgaagaagctgatcaacgagaaaaaggaggatggcaaggtgttttggcagaatctggctggctacaagagacaggaagccctgagaccatacctgagcagcgaggaagatcggaagaagggaaagaaattcgctcggtaccagctgggcgacctgctgctgcacctggaaaagaagcacggcgaggactggggaaaggtgtacgacgaggcctgggagcggattgacaagaaagtggaaggcctgagcaagcacatcaagctggaagaggaacggagaagcgaggacgcccagagcaaggccgccctgaccgactggctgcgggctaaggccagcttcgtgatcgagggcctgaaggaggccgacaaggacgagttctgcagatgcgagctgaagctgcagaagtggtacggggacctgcggggaaagcccttcgccatcgaagccgagaacagcatcctggacatcagcggcttcagcaagcagtacaactgtgccttcatctggcagaaggacggcgtgaagaagctgaacctgtacctgatcatcaactacttcaagggcggcaagctgcggttcaagaagatcaaacctgaagccttcgaagccaacagattctacaccgtgatcaacaaaaagagcggcgagatcgtgcccatggaggtgaacttcaacttcgacgaccccaacctgatcatcctgcctctggcctttggcaagagacagggcagagaattcatctggaacgacctgctgtccctggaaaccggcagcctgaagctggccaacggaagagtgatcgagaagacactgtacaacagaagaacccggcaggatgagcctgccctgttcgtggccctgaccttcgagcggcgggaggtcctggactcctccaatatcaaaccaatgaacctgatcggcgtggcaagaggcgaaaacatccccgccgtgatcgccctgaccgaccccgagggctgcccactgagccggtttaaggatagcctgggaaacccaacccacatcctgagaatcggcgagagctataaggagaagcagcggaccatccaggccaagaaggaggtggagcagcggagagccggcggctacagccggaagtacgccagcaaagccaagaatctggcagacgatatggtgagaaacaccgctagagatctgctgtactacgccgtgacccaggatgccatgctgatcttcgccaacctgagccggggcttcggccggcagggcaagcggaccttcatggccgagagacagtacacacggatggaggactggctgaccgccaagctggcctacgagggcctgagcaagacctacctgtccaagacactggcccagtacacctccaagacatgcagcaactgtgggtttaccatcaccagcgccgactacgacagggtgctggagaagctgaagaagacagcaacaggctggatgaccacaattaacggcaaggagctgaaggtggagggccagattacctactacaacagatacaagagacagaacgtagtcaaggacctgtccgtcgagctggatagactgagcgaagaatctgtgaacaacgacatctcctcctggacaaagggcagaagcggagaagctctgagcctcctgaagaaaagattctcccatagacccgtgcaggagaagttcgtgtgcctgaactgcggcttcgagacacacgcagccgagcaagccgccctgaacatcgccagatcctggctgttcctgcggagccaggagtacaagaaataccagacaaacaagacaaccggcaacaccgataagagagccttcgtcgagacctggcagtccttttaccggaagaagcttaaggaggtgtggaaacctgccgtgcggtctggcggatctggcggaggctccaccagccccaagaaaaagagaaaagtctaagctgccttctgcggggcttgccttctggccatgcccttcttctctcccttgcacctgtacctcttggtctttgaataaagcctgagtaggaaggctagcaaaaaaaaaaaaaaaaaaaaaaaaaaaaaaaaaaaaaaaaaaaaaaaaaaaaaaaaaaaaaaaaaaaaaaaaaaaaaaaa

SEQ ID NO: 12336 - RNA, 5785 nt, synthetic construct
  source 1..5785: mol_type = other RNA
aggaaataagagagaaaagaagagtaagaagaaatataagagccaccatggcccctaagaagaagcgtaaagtgagccggatggaacgcctcgtctacgaggtgcggcagaagtgcagaaacatcgaggacatctgcatctcctgcggatctctgaacgtgaccctggagcacccactgttcatcggcggcatgtgccagaactgtaaaaactgttttctggagtgtgcctatcaatacgacgatgacggctaccagagctactgcaccatctgttgcggcggaagagaggtgctgatgtgtggaaataacaactgctgccggtgcttctgcgtggaatgcgtggacctgctggtgggccccggcgccgcccaggccgctattaaggaagatccttggaactgctacatgtgcggccacaagggcacatacggcctgctgagacggagagaggactggcctagcagactgcagatgttcttcgccaataaccacgaccaggagttcgacccccctaaggtgtaccctcccgtccccgccgagaagagaaagcccatccgggtcctgagcctgttcgatggcatcgccaccggtctgctggtgctgaaggacctgggcatccaggtggataggtacattgcctccgaggtgtgcgaggactccatcaccgtgggaatggtgcgtcatcagggcaagatcatgtacgtgggcgacgtgcggagcgtgacacagaagcatatccaggagtggggccctttcgacctggtgatcggcggcagcccttgcaatgacctgagcatcgtgaacccagcccggaagggcctgtacgagggaaccggcagactgttcttcgagttttacagactgctgcacgacgcccggcctaaggaaggcgacgaccggcccttcttttggctgttcgagaatgtggtggccatgggagtcagcgacaagcgggatattagccggttcctggagagcaaccccgtgatgatcgatgccaaggaagtgagcgccgcccaccgggccagatacttctggggcaatctgcctggcatgaacagacccctggccagcaccgtgaacgacaagctggagctgcaggagtgcctggagcacggccggatcgccaagttcagcaaggtgagaaccatcaccacccgaagcaacagcatcaaacaaggcaaggaccagcactttcctgtgttcatgaacgagaaggaggacatcctgtggtgtaccgagatggagagagtgttcgggttcccagtccactacacagatgtcagcaacatgtctagactggccagacagagactgctgggaagaagctggtccgtccctgtgatcagacacctgttcgcccctctgaaggagtacttcgcctgcgtgagcagcggcaacagcaacgccaacagccggggccccagcttctctagcggcctggtgccactgtccctgagagggagccacatgggccccatggagatctacaaaaccgtgagcgcctggaagcggcagcctgtgcgcgtgctgagcctgtttcggaatatcgataaagtcctgaaaagcctgggattcctggagagcggctctggctccggcggtggcaccctgaagtacgtggaggatgtgacaaacgtggtcagacgggatgtggagaagtggggccccttcgatctggtgtacggcagcacccaacccctgggcagctcttgtgaccggtgccctggctggtacatgtttcagttccaccggatcctgcagtacgccctgccgagacaggagtcccagcggccattcttttggattttcatggacaacttgctgctgaccgaggatgaccaggaaactaccactcggttcctgcagaccgaagccgtgaccctgcaggacgtgagaggccgggactaccagaacgccatgcgggtgtggtccaacatccctggactgaaaagcaagcacgcacctctgacccctaaagaagaggagtacctgcaggcccaggtgcggagcagaagcaagctggacgcccctaaggtggatctgctggtgaagaattgcctcctgcccctgagagagtacttcaagtatttcagccagaatagtctgcccctgggaggcagcggcggcggcatggagggcctggtgatgttccaggacctgttcatcgacttcagccaggaggagtgggagtgcctggacaccgcccagaaggacctgtacagggacgtgatgatggagaactacagcagcctggtgagcctgggcctgtgcatccccaagcccgacgtgatcagcctgctggagcagggcaaggagccctggatggtgagcagggacgtgctgggcggctggtgccccgacagcgagttcaggggcggcccaagcagcggcgcccctcctcccagcggcggcagcccagccggctccccaacctctaccgaggagggcacctctgagtccgccacccccgagagcggccctggcacctccaccgagcccagcgagggcagcgcacccggcagccctgccggcagccccacctccacagaggagggaaccagcaccgagcccagcgaaggcagcgccccaggcaccagcaccgagcctagtgagcaggagattaaacggatcaacaagatcagaagaagacttgtgaaagacagcaacaccaagaaggccggcaagacaggccccatgaaaaccctgctggttagagtgatgacacccgatctgagagagcggctggaaaacctgagaaagaagcctgaaaatatcccccagcccatcagcaatacatctagagccaacctgaataagctgctgaccgattacaccgaaatgaagaaggcgatcctgcatgtgtactgggaagagttccagaaggaccctgtgggcctgatgagccgggtggcccagcctgccagcaagaagatcgatcagaacaagctgaaacctgagatggacgagaagggcaacctgaccaccgccggctttgcctgctctcagtgtggccagcccctgttcgtgtacaagctggagcaggtgtctgagaagggcaaggcttacaccaactacttcggacggtgcaatgtggccgagcacgaaaagctgatcctgctggcccagctgaagcccgagaaggatagcgacgaagccgtgacatatagcctgggaaagtttgggcagagggccctggatttctacagcattcatgtgaccaaggagtccacccaccccgtgaagcccctggcccagatcgccggaaacagatacgcctccggacctgtgggaaaggccctgagcgacgcatgtatgggcacaatcgcctccttcctgtctaagtaccaggacatcatcatcgaacaccagaaggtggtgaagggcaaccagaagagactggagagcctgcgggagctggccggcaaggaaaacctggaataccctagcgtgaccctgccacctcagcctcacaccaaggagggcgttgatgcctacaacgaagtgatcgcccgggtgcgaatgtgggtgaacctgaacctgtggcagaagctgaagctaagcagagatgatgccaagcctctgctgagactgaagggattcccttcctttcctctggtcgagagacaggccaacgaagtggactggtgggacatggtgtgtaacgtgaagaagctgatcaacgagaaaaaggaggatggcaaggtgttttggcagaatctggctggctacaagagacaggaagccctgagaccatacctgagcagcgaggaagatcggaagaagggaaagaaattcgctcggtaccagctgggcgacctgctgctgcacctggaaaagaagcacggcgaggactggggaaaggtgtacgacgaggcctgggagcggattgacaagaaagtggaaggcctgagcaagcacatcaagctggaagaggaacggagaagcgaggacgcccagagcaaggccgccctgaccgactggctgcgggctaaggccagcttcgtgatcgagggcctgaaggaggccgacaaggacgagttctgcagatgcgagctgaagctgcagaagtggtacggggacctgcggggaaagcccttcgccatcgaagccgagaacagcatcctggacatcagcggcttcagcaagcagtacaactgtgccttcatctggcagaaggacggcgtgaagaagctgaacctgtacctgatcatcaactacttcaagggcggcaagctgcggttcaagaagatcaaacctgaagccttcgaagccaacagattctacaccgtgatcaacaaaaagagcggcgagatcgtgcccatggaggtgaacttcaacttcgacgaccccaacctgatcatcctgcctctggcctttggcaagagacagggcagagaattcatctggaacgacctgctgtccctggaaaccggcagcctgaagctggccaacggaagagtgatcgagaagacactgtacaacagaagaacccggcaggatgagcctgccctgttcgtggccctgaccttcgagcggcgggaggtcctggactcctccaatatcaaaccaatgaacctgatcggcgtggcaagaggcgaaaacatccccgccgtgatcgccctgaccgaccccgagggctgcccactgagccggtttaaggatagcctgggaaacccaacccacatcctgagaatcggcgagagctataaggagaagcagcggaccatccaggccaagaaggaggtggagcagcggagagccggcggctacagccggaagtacgccagcaaagccaagaatctggcagacgatatggtgagaaacaccgctagagatctgctgtactacgccgtgacccaggatgccatgctgatcttcgccaacctgagccggggcttcggccggcagggcaagcggaccttcatggccgagagacagtacacacggatggaggactggctgaccgccaagctggcctacgagggcctgagcaagacctacctgtccaagacactggcccagtacacctccaagacatgcagcaactgtgggtttaccatcaccagcgccgactacgacagggtgctggagaagctgaagaagacagcaacaggctggatgaccacaattaacggcaaggagctgaaggtggagggccagattacctactacaacagatacaagagacagaacgtagtcaaggacctgtccgtcgagctggatagactgagcgaagaatctgtgaacaacgacatctcctcctggacaaagggcagaagcggagaagctctgagcctcctgaagaaaagattctcccatagacccgtgcaggagaagttcgtgtgcctgaactgcggcttcgagacacacgcagccgagcaagccgccctgaacatcgccagatcctggctgttcctgcggagccaggagtacaagaaataccagacaaacaagacaaccggcaacaccgataagagagccttcgtcgagacctggcagtccttttaccggaagaagcttaaggaggtgtggaaacctgccgtgcggtctggcggatctggcggaggctccaccagccccaagaaaaagagaaaagtctaagctgccttctgcggggcttgccttctggccatgcccttcttctctcccttgcacctgtacctcttggtctttgaataaagcctgagtaggaaggctagcaaaaaaaaaaaaaaaaaaaaaaaaaaaaaaaaaaaaaaaaaaaaaaaaaaaaaaaaaaaaaaaaaaaaaaaaaaaaaaaa

SEQ ID NO: 12337 - RNA, 5785 nt, synthetic construct
  source 1..5785: mol_type = other RNA
aggaaataagagagaaaagaagagtaagaagaaatataagagccaccatggcccctaagaagaagcgtaaagtgagccggatggaacgcctcgtctacgaggtgcggcagaagtgcagaaacatcgaggacatctgcatctcctgcggatctctgaacgtgaccctggagcacccactgttcatcggcggcatgtgccagaactgtaaaaactgttttctggagtgtgcctatcaatacgacgatgacggctaccagagctactgcaccatctgttgcggcggaagagaggtgctgatgtgtggaaataacaactgctgccggtgcttctgcgtggaatgcgtggacctgctggtgggccccggcgccgcccaggccgctattaaggaagatccttggaactgctacatgtgcggccacaagggcacatacggcctgctgagacggagagaggactggcctagcagactgcagatgttcttcgccaataaccacgaccaggagttcgacccccctaaggtgtaccctcccgtccccgccgagaagagaaagcccatccgggtcctgagcctgttcgatggcatcgccaccggtctgctggtgctgaaggacctgggcatccaggtggataggtacattgcctccgaggtgtgcgaggactccatcaccgtgggaatggtgcgtcatcagggcaagatcatgtacgtgggcgacgtgcggagcgtgacacagaagcatatccaggagtggggccctttcgacctggtgatcggcggcagcccttgcaatgacctgagcatcgtgaacccagcccggaagggcctgtacgagggaaccggcagactgttcttcgagttttacagactgctgcacgacgcccggcctaaggaaggcgacgaccggcccttcttttggctgttcgagaatgtggtggccatgggagtcagcgacaagcgggatattagccggttcctggagagcaaccccgtgatgatcgatgccaaggaagtgagcgccgcccaccgggccagatacttctggggcaatctgcctggcatgaacagacccctggccagcaccgtgaacgacaagctggagctgcaggagtgcctggagcacggccggatcgccaagttcagcaaggtgagaaccatcaccacccgaagcaacagcatcaaacaaggcaaggaccagcactttcctgtgttcatgaacgagaaggaggacatcctgtggtgtaccgagatggagagagtgttcgggttcccagtccactacacagatgtcagcaacatgtctagactggccagacagagactgctgggaagaagctggtccgtccctgtgatcagacacctgttcgcccctctgaaggagtacttcgcctgcgtgagcagcggcaacagcaacgccaacagccggggccccagcttctctagcggcctggtgccactgtccctgagagggagccacatgggccccatggagatctacaaaaccgtgagcgcctggaagcggcagcctgtgcgcgtgctgagcctgtttcggaatatcgataaagtcctgaaaagcctgggattcctggagagcggctctggctccggcggtggcaccctgaagtacgtggaggatgtgacaaacgtggtcagacgggatgtggagaagtggggccccttcgatctggtgtacggcagcacccaacccctgggcagctcttgtgaccggtgccctggctggtacatgtttcagttccaccggatcctgcagtacgccctgccgagacaggagtcccagcggccattcttttggattttcatggacaacttgctgctgaccgaggatgaccaggaaactaccactcggttcctgcagaccgaagccgtgaccctgcaggacgtgagaggccgggactaccagaacgccatgcgggtgtggtccaacatccctggactgaaaagcaagcacgcacctctgacccctaaagaagaggagtacctgcaggcccaggtgcggagcagaagcaagctggacgcccctaaggtggatctgctggtgaagaattgcctcctgcccctgagagagtacttcaagtatttcagccagaatagtctgcccctgggaggcagcggcggcggcaggaccagcgccttccccttccaggcccccgtgaccttcggcgacctggccatctacttcagccaggaggagtgggagtggctgagccccatccagaaggacctgtacgaggacgtgatgctggagaactaccagaacctggtgagcctgggcctgtgcttcaggaggcccaacgtgatcaccctgctggagaagggcaaggccccctggatggtggaccccgtgaagaggaggaggggcctgggcggcccaagcagcggcgcccctcctcccagcggcggcagcccagccggctccccaacctctaccgaggagggcacctctgagtccgccacccccgagagcggccctggcacctccaccgagcccagcgagggcagcgcacccggcagccctgccggcagccccacctccacagaggagggaaccagcaccgagcccagcgaaggcagcgccccaggcaccagcaccgagcctagtgagcaggagattaaacggatcaacaagatcagaagaagacttgtgaaagacagcaacaccaagaaggccggcaagacaggccccatgaaaaccctgctggttagagtgatgacacccgatctgagagagcggctggaaaacctgagaaagaagcctgaaaatatcccccagcccatcagcaatacatctagagccaacctgaataagctgctgaccgattacaccgaaatgaagaaggcgatcctgcatgtgtactgggaagagttccagaaggaccctgtgggcctgatgagccgggtggcccagcctgccagcaagaagatcgatcagaacaagctgaaacctgagatggacgagaagggcaacctgaccaccgccggctttgcctgctctcagtgtggccagcccctgttcgtgtacaagctggagcaggtgtctgagaagggcaaggcttacaccaactacttcggacggtgcaatgtggccgagcacgaaaagctgatcctgctggcccagctgaagcccgagaaggatagcgacgaagccgtgacatatagcctgggaaagtttgggcagagggccctggatttctacagcattcatgtgaccaaggagtccacccaccccgtgaagcccctggcccagatcgccggaaacagatacgcctccggacctgtgggaaaggccctgagcgacgcatgtatgggcacaatcgcctccttcctgtctaagtaccaggacatcatcatcgaacaccagaaggtggtgaagggcaaccagaagagactggagagcctgcgggagctggccggcaaggaaaacctggaataccctagcgtgaccctgccacctcagcctcacaccaaggagggcgttgatgcctacaacgaagtgatcgcccgggtgcgaatgtgggtgaacctgaacctgtggcagaagctgaagctaagcagagatgatgccaagcctctgctgagactgaagggattcccttcctttcctctggtcgagagacaggccaacgaagtggactggtgggacatggtgtgtaacgtgaagaagctgatcaacgagaaaaaggaggatggcaaggtgttttggcagaatctggctggctacaagagacaggaagccctgagaccatacctgagcagcgaggaagatcggaagaagggaaagaaattcgctcggtaccagctgggcgacctgctgctgcacctggaaaagaagcacggcgaggactggggaaaggtgtacgacgaggcctgggagcggattgacaagaaagtggaaggcctgagcaagcacatcaagctggaagaggaacggagaagcgaggacgcccagagcaaggccgccctgaccgactggctgcgggctaaggccagcttcgtgatcgagggcctgaaggaggccgacaaggacgagttctgcagatgcgagctgaagctgcagaagtggtacggggacctgcggggaaagcccttcgccatcgaagccgagaacagcatcctggacatcagcggcttcagcaagcagtacaactgtgccttcatctggcagaaggacggcgtgaagaagctgaacctgtacctgatcatcaactacttcaagggcggcaagctgcggttcaagaagatcaaacctgaagccttcgaagccaacagattctacaccgtgatcaacaaaaagagcggcgagatcgtgcccatggaggtgaacttcaacttcgacgaccccaacctgatcatcctgcctctggcctttggcaagagacagggcagagaattcatctggaacgacctgctgtccctggaaaccggcagcctgaagctggccaacggaagagtgatcgagaagacactgtacaacagaagaacccggcaggatgagcctgccctgttcgtggccctgaccttcgagcggcgggaggtcctggactcctccaatatcaaaccaatgaacctgatcggcgtggcaagaggcgaaaacatccccgccgtgatcgccctgaccgaccccgagggctgcccactgagccggtttaaggatagcctgggaaacccaacccacatcctgagaatcggcgagagctataaggagaagcagcggaccatccaggccaagaaggaggtggagcagcggagagccggcggctacagccggaagtacgccagcaaagccaagaatctggcagacgatatggtgagaaacaccgctagagatctgctgtactacgccgtgacccaggatgccatgctgatcttcgccaacctgagccggggcttcggccggcagggcaagcggaccttcatggccgagagacagtacacacggatggaggactggctgaccgccaagctggcctacgagggcctgagcaagacctacctgtccaagacactggcccagtacacctccaagacatgcagcaactgtgggtttaccatcaccagcgccgactacgacagggtgctggagaagctgaagaagacagcaacaggctggatgaccacaattaacggcaaggagctgaaggtggagggccagattacctactacaacagatacaagagacagaacgtagtcaaggacctgtccgtcgagctggatagactgagcgaagaatctgtgaacaacgacatctcctcctggacaaagggcagaagcggagaagctctgagcctcctgaagaaaagattctcccatagacccgtgcaggagaagttcgtgtgcctgaactgcggcttcgagacacacgcagccgagcaagccgccctgaacatcgccagatcctggctgttcctgcggagccaggagtacaagaaataccagacaaacaagacaaccggcaacaccgataagagagccttcgtcgagacctggcagtccttttaccggaagaagcttaaggaggtgtggaaacctgccgtgcggtctggcggatctggcggaggctccaccagccccaagaaaaagagaaaagtctaagctgccttctgcggggcttgccttctggccatgcccttcttctctcccttgcacctgtacctcttggtctttgaataaagcctgagtaggaaggctagcaaaaaaaaaaaaaaaaaaaaaaaaaaaaaaaaaaaaaaaaaaaaaaaaaaaaaaaaaaaaaaaaaaaaaaaaaaaaaaaa

SEQ ID NO: 12338 - RNA, 5785 nt, synthetic construct
  source 1..5785: mol_type = other RNA
aggaaataagagagaaaagaagagtaagaagaaatataagagccaccatggcccctaagaagaagcgtaaagtgagccggatggaacgcctcgtctacgaggtgcggcagaagtgcagaaacatcgaggacatctgcatctcctgcggatctctgaacgtgaccctggagcacccactgttcatcggcggcatgtgccagaactgtaaaaactgttttctggagtgtgcctatcaatacgacgatgacggctaccagagctactgcaccatctgttgcggcggaagagaggtgctgatgtgtggaaataacaactgctgccggtgcttctgcgtggaatgcgtggacctgctggtgggccccggcgccgcccaggccgctattaaggaagatccttggaactgctacatgtgcggccacaagggcacatacggcctgctgagacggagagaggactggcctagcagactgcagatgttcttcgccaataaccacgaccaggagttcgacccccctaaggtgtaccctcccgtccccgccgagaagagaaagcccatccgggtcctgagcctgttcgatggcatcgccaccggtctgctggtgctgaaggacctgggcatccaggtggataggtacattgcctccgaggtgtgcgaggactccatcaccgtgggaatggtgcgtcatcagggcaagatcatgtacgtgggcgacgtgcggagcgtgacacagaagcatatccaggagtggggccctttcgacctggtgatcggcggcagcccttgcaatgacctgagcatcgtgaacccagcccggaagggcctgtacgagggaaccggcagactgttcttcgagttttacagactgctgcacgacgcccggcctaaggaaggcgacgaccggcccttcttttggctgttcgagaatgtggtggccatgggagtcagcgacaagcgggatattagccggttcctggagagcaaccccgtgatgatcgatgccaaggaagtgagcgccgcccaccgggccagatacttctggggcaatctgcctggcatgaacagacccctggccagcaccgtgaacgacaagctggagctgcaggagtgcctggagcacggccggatcgccaagttcagcaaggtgagaaccatcaccacccgaagcaacagcatcaaacaaggcaaggaccagcactttcctgtgttcatgaacgagaaggaggacatcctgtggtgtaccgagatggagagagtgttcgggttcccagtccactacacagatgtcagcaacatgtctagactggccagacagagactgctgggaagaagctggtccgtccctgtgatcagacacctgttcgcccctctgaaggagtacttcgcctgcgtgagcagcggcaacagcaacgccaacagccggggccccagcttctctagcggcctggtgccactgtccctgagagggagccacatgggccccatggagatctacaaaaccgtgagcgcctggaagcggcagcctgtgcgcgtgctgagcctgtttcggaatatcgataaagtcctgaaaagcctgggattcctggagagcggctctggctccggcggtggcaccctgaagtacgtggaggatgtgacaaacgtggtcagacgggatgtggagaagtggggccccttcgatctggtgtacggcagcacccaacccctgggcagctcttgtgaccggtgccctggctggtacatgtttcagttccaccggatcctgcagtacgccctgccgagacaggagtcccagcggccattcttttggattttcatggacaacttgctgctgaccgaggatgaccaggaaactaccactcggttcctgcagaccgaagccgtgaccctgcaggacgtgagaggccgggactaccagaacgccatgcgggtgtggtccaacatccctggactgaaaagcaagcacgcacctctgacccctaaagaagaggagtacctgcaggcccaggtgcggagcagaagcaagctggacgcccctaaggtggatctgctggtgaagaattgcctcctgcccctgagagagtacttcaagtatttcagccagaatagtctgcccctgggaggcagcggcggcggcgcccaggtgctggtgaccttccaggacgtggccgtggacttcacccaggaggagtggaggctgctggaccccggccagaaggagctgtacaaggaggtgatgctggagaacgtgcagaacgtgctgagcctgggcctgcccgtgcccagggaggactggatcagccacttcgaccagggcagggccccctggatgctggagggcgagggccccagcaacagctgcctgggcagggagaggaggggcggcccaagcagcggcgcccctcctcccagcggcggcagcccagccggctccccaacctctaccgaggagggcacctctgagtccgccacccccgagagcggccctggcacctccaccgagcccagcgagggcagcgcacccggcagccctgccggcagccccacctccacagaggagggaaccagcaccgagcccagcgaaggcagcgccccaggcaccagcaccgagcctagtgagcaggagattaaacggatcaacaagatcagaagaagacttgtgaaagacagcaacaccaagaaggccggcaagacaggccccatgaaaaccctgctggttagagtgatgacacccgatctgagagagcggctggaaaacctgagaaagaagcctgaaaatatcccccagcccatcagcaatacatctagagccaacctgaataagctgctgaccgattacaccgaaatgaagaaggcgatcctgcatgtgtactgggaagagttccagaaggaccctgtgggcctgatgagccgggtggcccagcctgccagcaagaagatcgatcagaacaagctgaaacctgagatggacgagaagggcaacctgaccaccgccggctttgcctgctctcagtgtggccagcccctgttcgtgtacaagctggagcaggtgtctgagaagggcaaggcttacaccaactacttcggacggtgcaatgtggccgagcacgaaaagctgatcctgctggcccagctgaagcccgagaaggatagcgacgaagccgtgacatatagcctgggaaagtttgggcagagggccctggatttctacagcattcatgtgaccaaggagtccacccaccccgtgaagcccctggcccagatcgccggaaacagatacgcctccggacctgtgggaaaggccctgagcgacgcatgtatgggcacaatcgcctccttcctgtctaagtaccaggacatcatcatcgaacaccagaaggtggtgaagggcaaccagaagagactggagagcctgcgggagctggccggcaaggaaaacctggaataccctagcgtgaccctgccacctcagcctcacaccaaggagggcgttgatgcctacaacgaagtgatcgcccgggtgcgaatgtgggtgaacctgaacctgtggcagaagctgaagctaagcagagatgatgccaagcctctgctgagactgaagggattcccttcctttcctctggtcgagagacaggccaacgaagtggactggtgggacatggtgtgtaacgtgaagaagctgatcaacgagaaaaaggaggatggcaaggtgttttggcagaatctggctggctacaagagacaggaagccctgagaccatacctgagcagcgaggaagatcggaagaagggaaagaaattcgctcggtaccagctgggcgacctgctgctgcacctggaaaagaagcacggcgaggactggggaaaggtgtacgacgaggcctgggagcggattgacaagaaagtggaaggcctgagcaagcacatcaagctggaagaggaacggagaagcgaggacgcccagagcaaggccgccctgaccgactggctgcgggctaaggccagcttcgtgatcgagggcctgaaggaggccgacaaggacgagttctgcagatgcgagctgaagctgcagaagtggtacggggacctgcggggaaagcccttcgccatcgaagccgagaacagcatcctggacatcagcggcttcagcaagcagtacaactgtgccttcatctggcagaaggacggcgtgaagaagctgaacctgtacctgatcatcaactacttcaagggcggcaagctgcggttcaagaagatcaaacctgaagccttcgaagccaacagattctacaccgtgatcaacaaaaagagcggcgagatcgtgcccatggaggtgaacttcaacttcgacgaccccaacctgatcatcctgcctctggcctttggcaagagacagggcagagaattcatctggaacgacctgctgtccctggaaaccggcagcctgaagctggccaacggaagagtgatcgagaagacactgtacaacagaagaacccggcaggatgagcctgccctgttcgtggccctgaccttcgagcggcgggaggtcctggactcctccaatatcaaaccaatgaacctgatcggcgtggcaagaggcgaaaacatccccgccgtgatcgccctgaccgaccccgagggctgcccactgagccggtttaaggatagcctgggaaacccaacccacatcctgagaatcggcgagagctataaggagaagcagcggaccatccaggccaagaaggaggtggagcagcggagagccggcggctacagccggaagtacgccagcaaagccaagaatctggcagacgatatggtgagaaacaccgctagagatctgctgtactacgccgtgacccaggatgccatgctgatcttcgccaacctgagccggggcttcggccggcagggcaagcggaccttcatggccgagagacagtacacacggatggaggactggctgaccgccaagctggcctacgagggcctgagcaagacctacctgtccaagacactggcccagtacacctccaagacatgcagcaactgtgggtttaccatcaccagcgccgactacgacagggtgctggagaagctgaagaagacagcaacaggctggatgaccacaattaacggcaaggagctgaaggtggagggccagattacctactacaacagatacaagagacagaacgtagtcaaggacctgtccgtcgagctggatagactgagcgaagaatctgtgaacaacgacatctcctcctggacaaagggcagaagcggagaagctctgagcctcctgaagaaaagattctcccatagacccgtgcaggagaagttcgtgtgcctgaactgcggcttcgagacacacgcagccgagcaagccgccctgaacatcgccagatcctggctgttcctgcggagccaggagtacaagaaataccagacaaacaagacaaccggcaacaccgataagagagccttcgtcgagacctggcagtccttttaccggaagaagcttaaggaggtgtggaaacctgccgtgcggtctggcggatctggcggaggctccaccagccccaagaaaaagagaaaagtctaagctgccttctgcggggcttgccttctggccatgcccttcttctctcccttgcacctgtacctcttggtctttgaataaagcctgagtaggaaggctagcaaaaaaaaaaaaaaaaaaaaaaaaaaaaaaaaaaaaaaaaaaaaaaaaaaaaaaaaaaaaaaaaaaaaaaaaaaaaaaaa

SEQ ID NO: 12339 - RNA, 5785 nt, synthetic construct
  source 1..5785: mol_type = other RNA
aggaaataagagagaaaagaagagtaagaagaaatataagagccaccatggcccctaagaagaagcgtaaagtgagccggatggaacgcctcgtctacgaggtgcggcagaagtgcagaaacatcgaggacatctgcatctcctgcggatctctgaacgtgaccctggagcacccactgttcatcggcggcatgtgccagaactgtaaaaactgttttctggagtgtgcctatcaatacgacgatgacggctaccagagctactgcaccatctgttgcggcggaagagaggtgctgatgtgtggaaataacaactgctgccggtgcttctgcgtggaatgcgtggacctgctggtgggccccggcgccgcccaggccgctattaaggaagatccttggaactgctacatgtgcggccacaagggcacatacggcctgctgagacggagagaggactggcctagcagactgcagatgttcttcgccaataaccacgaccaggagttcgacccccctaaggtgtaccctcccgtccccgccgagaagagaaagcccatccgggtcctgagcctgttcgatggcatcgccaccggtctgctggtgctgaaggacctgggcatccaggtggataggtacattgcctccgaggtgtgcgaggactccatcaccgtgggaatggtgcgtcatcagggcaagatcatgtacgtgggcgacgtgcggagcgtgacacagaagcatatccaggagtggggccctttcgacctggtgatcggcggcagcccttgcaatgacctgagcatcgtgaacccagcccggaagggcctgtacgagggaaccggcagactgttcttcgagttttacagactgctgcacgacgcccggcctaaggaaggcgacgaccggcccttcttttggctgttcgagaatgtggtggccatgggagtcagcgacaagcgggatattagccggttcctggagagcaaccccgtgatgatcgatgccaaggaagtgagcgccgcccaccgggccagatacttctggggcaatctgcctggcatgaacagacccctggccagcaccgtgaacgacaagctggagctgcaggagtgcctggagcacggccggatcgccaagttcagcaaggtgagaaccatcaccacccgaagcaacagcatcaaacaaggcaaggaccagcactttcctgtgttcatgaacgagaaggaggacatcctgtggtgtaccgagatggagagagtgttcgggttcccagtccactacacagatgtcagcaacatgtctagactggccagacagagactgctgggaagaagctggtccgtccctgtgatcagacacctgttcgcccctctgaaggagtacttcgcctgcgtgagcagcggcaacagcaacgccaacagccggggccccagcttctctagcggcctggtgccactgtccctgagagggagccacatgggccccatggagatctacaaaaccgtgagcgcctggaagcggcagcctgtgcgcgtgctgagcctgtttcggaatatcgataaagtcctgaaaagcctgggattcctggagagcggctctggctccggcggtggcaccctgaagtacgtggaggatgtgacaaacgtggtcagacgggatgtggagaagtggggccccttcgatctggtgtacggcagcacccaacccctgggcagctcttgtgaccggtgccctggctggtacatgtttcagttccaccggatcctgcagtacgccctgccgagacaggagtcccagcggccattcttttggattttcatggacaacttgctgctgaccgaggatgaccaggaaactaccactcggttcctgcagaccgaagccgtgaccctgcaggacgtgagaggccgggactaccagaacgccatgcgggtgtggtccaacatccctggactgaaaagcaagcacgcacctctgacccctaaagaagaggagtacctgcaggcccaggtgcggagcagaagcaagctggacgcccctaaggtggatctgctggtgaagaattgcctcctgcccctgagagagtacttcaagtatttcagccagaatagtctgcccctgggaggcagcggcggcggcaggagggagcccgtgaccttcgaggacgtggccgtgtacttcagcgagaacgagtggagcagcctggcccccgcccagagggccctgtacagggacgtgatgctggagaactacggcgccgtggccagcctggccttcagcttccccaagcccgccctgatcagccagctggagaggggcgaggccccctggagcctggccccccagggcgccctggacggcgagggcagcaggggcatcagcggcggcccaagcagcggcgcccctcctcccagcggcggcagcccagccggctccccaacctctaccgaggagggcacctctgagtccgccacccccgagagcggccctggcacctccaccgagcccagcgagggcagcgcacccggcagccctgccggcagccccacctccacagaggagggaaccagcaccgagcccagcgaaggcagcgccccaggcaccagcaccgagcctagtgagcaggagattaaacggatcaacaagatcagaagaagacttgtgaaagacagcaacaccaagaaggccggcaagacaggccccatgaaaaccctgctggttagagtgatgacacccgatctgagagagcggctggaaaacctgagaaagaagcctgaaaatatcccccagcccatcagcaatacatctagagccaacctgaataagctgctgaccgattacaccgaaatgaagaaggcgatcctgcatgtgtactgggaagagttccagaaggaccctgtgggcctgatgagccgggtggcccagcctgccagcaagaagatcgatcagaacaagctgaaacctgagatggacgagaagggcaacctgaccaccgccggctttgcctgctctcagtgtggccagcccctgttcgtgtacaagctggagcaggtgtctgagaagggcaaggcttacaccaactacttcggacggtgcaatgtggccgagcacgaaaagctgatcctgctggcccagctgaagcccgagaaggatagcgacgaagccgtgacatatagcctgggaaagtttgggcagagggccctggatttctacagcattcatgtgaccaaggagtccacccaccccgtgaagcccctggcccagatcgccggaaacagatacgcctccggacctgtgggaaaggccctgagcgacgcatgtatgggcacaatcgcctccttcctgtctaagtaccaggacatcatcatcgaacaccagaaggtggtgaagggcaaccagaagagactggagagcctgcgggagctggccggcaaggaaaacctggaataccctagcgtgaccctgccacctcagcctcacaccaaggagggcgttgatgcctacaacgaagtgatcgcccgggtgcgaatgtgggtgaacctgaacctgtggcagaagctgaagctaagcagagatgatgccaagcctctgctgagactgaagggattcccttcctttcctctggtcgagagacaggccaacgaagtggactggtgggacatggtgtgtaacgtgaagaagctgatcaacgagaaaaaggaggatggcaaggtgttttggcagaatctggctggctacaagagacaggaagccctgagaccatacctgagcagcgaggaagatcggaagaagggaaagaaattcgctcggtaccagctgggcgacctgctgctgcacctggaaaagaagcacggcgaggactggggaaaggtgtacgacgaggcctgggagcggattgacaagaaagtggaaggcctgagcaagcacatcaagctggaagaggaacggagaagcgaggacgcccagagcaaggccgccctgaccgactggctgcgggctaaggccagcttcgtgatcgagggcctgaaggaggccgacaaggacgagttctgcagatgcgagctgaagctgcagaagtggtacggggacctgcggggaaagcccttcgccatcgaagccgagaacagcatcctggacatcagcggcttcagcaagcagtacaactgtgccttcatctggcagaaggacggcgtgaagaagctgaacctgtacctgatcatcaactacttcaagggcggcaagctgcggttcaagaagatcaaacctgaagccttcgaagccaacagattctacaccgtgatcaacaaaaagagcggcgagatcgtgcccatggaggtgaacttcaacttcgacgaccccaacctgatcatcctgcctctggcctttggcaagagacagggcagagaattcatctggaacgacctgctgtccctggaaaccggcagcctgaagctggccaacggaagagtgatcgagaagacactgtacaacagaagaacccggcaggatgagcctgccctgttcgtggccctgaccttcgagcggcgggaggtcctggactcctccaatatcaaaccaatgaacctgatcggcgtggcaagaggcgaaaacatccccgccgtgatcgccctgaccgaccccgagggctgcccactgagccggtttaaggatagcctgggaaacccaacccacatcctgagaatcggcgagagctataaggagaagcagcggaccatccaggccaagaaggaggtggagcagcggagagccggcggctacagccggaagtacgccagcaaagccaagaatctggcagacgatatggtgagaaacaccgctagagatctgctgtactacgccgtgacccaggatgccatgctgatcttcgccaacctgagccggggcttcggccggcagggcaagcggaccttcatggccgagagacagtacacacggatggaggactggctgaccgccaagctggcctacgagggcctgagcaagacctacctgtccaagacactggcccagtacacctccaagacatgcagcaactgtgggtttaccatcaccagcgccgactacgacagggtgctggagaagctgaagaagacagcaacaggctggatgaccacaattaacggcaaggagctgaaggtggagggccagattacctactacaacagatacaagagacagaacgtagtcaaggacctgtccgtcgagctggatagactgagcgaagaatctgtgaacaacgacatctcctcctggacaaagggcagaagcggagaagctctgagcctcctgaagaaaagattctcccatagacccgtgcaggagaagttcgtgtgcctgaactgcggcttcgagacacacgcagccgagcaagccgccctgaacatcgccagatcctggctgttcctgcggagccaggagtacaagaaataccagacaaacaagacaaccggcaacaccgataagagagccttcgtcgagacctggcagtccttttaccggaagaagcttaaggaggtgtggaaacctgccgtgcggtctggcggatctggcggaggctccaccagccccaagaaaaagagaaaagtctaagctgccttctgcggggcttgccttctggccatgcccttcttctctcccttgcacctgtacctcttggtctttgaataaagcctgagtaggaaggctagcaaaaaaaaaaaaaaaaaaaaaaaaaaaaaaaaaaaaaaaaaaaaaaaaaaaaaaaaaaaaaaaaaaaaaaaaaaaaaaaa

SEQ ID NO: 12340 - RNA, 5785 nt, synthetic construct
  source 1..5785: mol_type = other RNA
aggaaataagagagaaaagaagagtaagaagaaatataagagccaccatggcccctaagaagaagcgtaaagtgagccggatggaacgcctcgtctacgaggtgcggcagaagtgcagaaacatcgaggacatctgcatctcctgcggatctctgaacgtgaccctggagcacccactgttcatcggcggcatgtgccagaactgtaaaaactgttttctggagtgtgcctatcaatacgacgatgacggctaccagagctactgcaccatctgttgcggcggaagagaggtgctgatgtgtggaaataacaactgctgccggtgcttctgcgtggaatgcgtggacctgctggtgggccccggcgccgcccaggccgctattaaggaagatccttggaactgctacatgtgcggccacaagggcacatacggcctgctgagacggagagaggactggcctagcagactgcagatgttcttcgccaataaccacgaccaggagttcgacccccctaaggtgtaccctcccgtccccgccgagaagagaaagcccatccgggtcctgagcctgttcgatggcatcgccaccggtctgctggtgctgaaggacctgggcatccaggtggataggtacattgcctccgaggtgtgcgaggactccatcaccgtgggaatggtgcgtcatcagggcaagatcatgtacgtgggcgacgtgcggagcgtgacacagaagcatatccaggagtggggccctttcgacctggtgatcggcggcagcccttgcaatgacctgagcatcgtgaacccagcccggaagggcctgtacgagggaaccggcagactgttcttcgagttttacagactgctgcacgacgcccggcctaaggaaggcgacgaccggcccttcttttggctgttcgagaatgtggtggccatgggagtcagcgacaagcgggatattagccggttcctggagagcaaccccgtgatgatcgatgccaaggaagtgagcgccgcccaccgggccagatacttctggggcaatctgcctggcatgaacagacccctggccagcaccgtgaacgacaagctggagctgcaggagtgcctggagcacggccggatcgccaagttcagcaaggtgagaaccatcaccacccgaagcaacagcatcaaacaaggcaaggaccagcactttcctgtgttcatgaacgagaaggaggacatcctgtggtgtaccgagatggagagagtgttcgggttcccagtccactacacagatgtcagcaacatgtctagactggccagacagagactgctgggaagaagctggtccgtccctgtgatcagacacctgttcgcccctctgaaggagtacttcgcctgcgtgagcagcggcaacagcaacgccaacagccggggccccagcttctctagcggcctggtgccactgtccctgagagggagccacatgggccccatggagatctacaaaaccgtgagcgcctggaagcggcagcctgtgcgcgtgctgagcctgtttcggaatatcgataaagtcctgaaaagcctgggattcctggagagcggctctggctccggcggtggcaccctgaagtacgtggaggatgtgacaaacgtggtcagacgggatgtggagaagtggggccccttcgatctggtgtacggcagcacccaacccctgggcagctcttgtgaccggtgccctggctggtacatgtttcagttccaccggatcctgcagtacgccctgccgagacaggagtcccagcggccattcttttggattttcatggacaacttgctgctgaccgaggatgaccaggaaactaccactcggttcctgcagaccgaagccgtgaccctgcaggacgtgagaggccgggactaccagaacgccatgcgggtgtggtccaacatccctggactgaaaagcaagcacgcacctctgacccctaaagaagaggagtacctgcaggcccaggtgcggagcagaagcaagctggacgcccctaaggtggatctgctggtgaagaattgcctcctgcccctgagagagtacttcaagtatttcagccagaatagtctgcccctgggaggcagcggcggcggcatgggcgccgtgacctacgacgacgtgcacatcaacttcacccaggaggagtgggccctgctgaaccccagccagaagaggctgtacaaggacgtgatgcacgacacctacagcaacctgaccgccaccggctacagcctggaggaccactacatcgaggagcactgccagagcagcaggaggtgcaggaggcacctgcagaggcacaagaaggtgcacatcggcgagaagccctacgagagcggcggcccaagcagcggcgcccctcctcccagcggcggcagcccagccggctccccaacctctaccgaggagggcacctctgagtccgccacccccgagagcggccctggcacctccaccgagcccagcgagggcagcgcacccggcagccctgccggcagccccacctccacagaggagggaaccagcaccgagcccagcgaaggcagcgccccaggcaccagcaccgagcctagtgagcaggagattaaacggatcaacaagatcagaagaagacttgtgaaagacagcaacaccaagaaggccggcaagacaggccccatgaaaaccctgctggttagagtgatgacacccgatctgagagagcggctggaaaacctgagaaagaagcctgaaaatatcccccagcccatcagcaatacatctagagccaacctgaataagctgctgaccgattacaccgaaatgaagaaggcgatcctgcatgtgtactgggaagagttccagaaggaccctgtgggcctgatgagccgggtggcccagcctgccagcaagaagatcgatcagaacaagctgaaacctgagatggacgagaagggcaacctgaccaccgccggctttgcctgctctcagtgtggccagcccctgttcgtgtacaagctggagcaggtgtctgagaagggcaaggcttacaccaactacttcggacggtgcaatgtggccgagcacgaaaagctgatcctgctggcccagctgaagcccgagaaggatagcgacgaagccgtgacatatagcctgggaaagtttgggcagagggccctggatttctacagcattcatgtgaccaaggagtccacccaccccgtgaagcccctggcccagatcgccggaaacagatacgcctccggacctgtgggaaaggccctgagcgacgcatgtatgggcacaatcgcctccttcctgtctaagtaccaggacatcatcatcgaacaccagaaggtggtgaagggcaaccagaagagactggagagcctgcgggagctggccggcaaggaaaacctggaataccctagcgtgaccctgccacctcagcctcacaccaaggagggcgttgatgcctacaacgaagtgatcgcccgggtgcgaatgtgggtgaacctgaacctgtggcagaagctgaagctaagcagagatgatgccaagcctctgctgagactgaagggattcccttcctttcctctggtcgagagacaggccaacgaagtggactggtgggacatggtgtgtaacgtgaagaagctgatcaacgagaaaaaggaggatggcaaggtgttttggcagaatctggctggctacaagagacaggaagccctgagaccatacctgagcagcgaggaagatcggaagaagggaaagaaattcgctcggtaccagctgggcgacctgctgctgcacctggaaaagaagcacggcgaggactggggaaaggtgtacgacgaggcctgggagcggattgacaagaaagtggaaggcctgagcaagcacatcaagctggaagaggaacggagaagcgaggacgcccagagcaaggccgccctgaccgactggctgcgggctaaggccagcttcgtgatcgagggcctgaaggaggccgacaaggacgagttctgcagatgcgagctgaagctgcagaagtggtacggggacctgcggggaaagcccttcgccatcgaagccgagaacagcatcctggacatcagcggcttcagcaagcagtacaactgtgccttcatctggcagaaggacggcgtgaagaagctgaacctgtacctgatcatcaactacttcaagggcggcaagctgcggttcaagaagatcaaacctgaagccttcgaagccaacagattctacaccgtgatcaacaaaaagagcggcgagatcgtgcccatggaggtgaacttcaacttcgacgaccccaacctgatcatcctgcctctggcctttggcaagagacagggcagagaattcatctggaacgacctgctgtccctggaaaccggcagcctgaagctggccaacggaagagtgatcgagaagacactgtacaacagaagaacccggcaggatgagcctgccctgttcgtggccctgaccttcgagcggcgggaggtcctggactcctccaatatcaaaccaatgaacctgatcggcgtggcaagaggcgaaaacatccccgccgtgatcgccctgaccgaccccgagggctgcccactgagccggtttaaggatagcctgggaaacccaacccacatcctgagaatcggcgagagctataaggagaagcagcggaccatccaggccaagaaggaggtggagcagcggagagccggcggctacagccggaagtacgccagcaaagccaagaatctggcagacgatatggtgagaaacaccgctagagatctgctgtactacgccgtgacccaggatgccatgctgatcttcgccaacctgagccggggcttcggccggcagggcaagcggaccttcatggccgagagacagtacacacggatggaggactggctgaccgccaagctggcctacgagggcctgagcaagacctacctgtccaagacactggcccagtacacctccaagacatgcagcaactgtgggtttaccatcaccagcgccgactacgacagggtgctggagaagctgaagaagacagcaacaggctggatgaccacaattaacggcaaggagctgaaggtggagggccagattacctactacaacagatacaagagacagaacgtagtcaaggacctgtccgtcgagctggatagactgagcgaagaatctgtgaacaacgacatctcctcctggacaaagggcagaagcggagaagctctgagcctcctgaagaaaagattctcccatagacccgtgcaggagaagttcgtgtgcctgaactgcggcttcgagacacacgcagccgagcaagccgccctgaacatcgccagatcctggctgttcctgcggagccaggagtacaagaaataccagacaaacaagacaaccggcaacaccgataagagagccttcgtcgagacctggcagtccttttaccggaagaagcttaaggaggtgtggaaacctgccgtgcggtctggcggatctggcggaggctccaccagccccaagaaaaagagaaaagtctaagctgccttctgcggggcttgccttctggccatgcccttcttctctcccttgcacctgtacctcttggtctttgaataaagcctgagtaggaaggctagcaaaaaaaaaaaaaaaaaaaaaaaaaaaaaaaaaaaaaaaaaaaaaaaaaaaaaaaaaaaaaaaaaaaaaaaaaaaaaaaa

SEQ ID NO: 12341 - RNA, 5785 nt, synthetic construct
  source 1..5785: mol_type = other RNA
aggaaataagagagaaaagaagagtaagaagaaatataagagccaccatggcccctaagaagaagcgtaaagtgagccggatggaacgcctcgtctacgaggtgcggcagaagtgcagaaacatcgaggacatctgcatctcctgcggatctctgaacgtgaccctggagcacccactgttcatcggcggcatgtgccagaactgtaaaaactgttttctggagtgtgcctatcaatacgacgatgacggctaccagagctactgcaccatctgttgcggcggaagagaggtgctgatgtgtggaaataacaactgctgccggtgcttctgcgtggaatgcgtggacctgctggtgggccccggcgccgcccaggccgctattaaggaagatccttggaactgctacatgtgcggccacaagggcacatacggcctgctgagacggagagaggactggcctagcagactgcagatgttcttcgccaataaccacgaccaggagttcgacccccctaaggtgtaccctcccgtccccgccgagaagagaaagcccatccgggtcctgagcctgttcgatggcatcgccaccggtctgctggtgctgaaggacctgggcatccaggtggataggtacattgcctccgaggtgtgcgaggactccatcaccgtgggaatggtgcgtcatcagggcaagatcatgtacgtgggcgacgtgcggagcgtgacacagaagcatatccaggagtggggccctttcgacctggtgatcggcggcagcccttgcaatgacctgagcatcgtgaacccagcccggaagggcctgtacgagggaaccggcagactgttcttcgagttttacagactgctgcacgacgcccggcctaaggaaggcgacgaccggcccttcttttggctgttcgagaatgtggtggccatgggagtcagcgacaagcgggatattagccggttcctggagagcaaccccgtgatgatcgatgccaaggaagtgagcgccgcccaccgggccagatacttctggggcaatctgcctggcatgaacagacccctggccagcaccgtgaacgacaagctggagctgcaggagtgcctggagcacggccggatcgccaagttcagcaaggtgagaaccatcaccacccgaagcaacagcatcaaacaaggcaaggaccagcactttcctgtgttcatgaacgagaaggaggacatcctgtggtgtaccgagatggagagagtgttcgggttcccagtccactacacagatgtcagcaacatgtctagactggccagacagagactgctgggaagaagctggtccgtccctgtgatcagacacctgttcgcccctctgaaggagtacttcgcctgcgtgagcagcggcaacagcaacgccaacagccggggccccagcttctctagcggcctggtgccactgtccctgagagggagccacatgggccccatggagatctacaaaaccgtgagcgcctggaagcggcagcctgtgcgcgtgctgagcctgtttcggaatatcgataaagtcctgaaaagcctgggattcctggagagcggctctggctccggcggtggcaccctgaagtacgtggaggatgtgacaaacgtggtcagacgggatgtggagaagtggggccccttcgatctggtgtacggcagcacccaacccctgggcagctcttgtgaccggtgccctggctggtacatgtttcagttccaccggatcctgcagtacgccctgccgagacaggagtcccagcggccattcttttggattttcatggacaacttgctgctgaccgaggatgaccaggaaactaccactcggttcctgcagaccgaagccgtgaccctgcaggacgtgagaggccgggactaccagaacgccatgcgggtgtggtccaacatccctggactgaaaagcaagcacgcacctctgacccctaaagaagaggagtacctgcaggcccaggtgcggagcagaagcaagctggacgcccctaaggtggatctgctggtgaagaattgcctcctgcccctgagagagtacttcaagtatttcagccagaatagtctgcccctgggaggcagcggcggcggcagccaggagcccgtgaccttcgaggacgtggccgtgtacttcacccagaaccagtgggccagcctggaccccatgcagagggccctgtacctggaggtgatgctggagaactacgccaacatcaccagcctggccctgcccttccccaagcccgacctgatcctgcagctggagcagggcggcgccccctggggcctggacccctggacccccctggagggcgaggccctgggcggcgtgcacggcggcccaagcagcggcgcccctcctcccagcggcggcagcccagccggctccccaacctctaccgaggagggcacctctgagtccgccacccccgagagcggccctggcacctccaccgagcccagcgagggcagcgcacccggcagccctgccggcagccccacctccacagaggagggaaccagcaccgagcccagcgaaggcagcgccccaggcaccagcaccgagcctagtgagcaggagattaaacggatcaacaagatcagaagaagacttgtgaaagacagcaacaccaagaaggccggcaagacaggccccatgaaaaccctgctggttagagtgatgacacccgatctgagagagcggctggaaaacctgagaaagaagcctgaaaatatcccccagcccatcagcaatacatctagagccaacctgaataagctgctgaccgattacaccgaaatgaagaaggcgatcctgcatgtgtactgggaagagttccagaaggaccctgtgggcctgatgagccgggtggcccagcctgccagcaagaagatcgatcagaacaagctgaaacctgagatggacgagaagggcaacctgaccaccgccggctttgcctgctctcagtgtggccagcccctgttcgtgtacaagctggagcaggtgtctgagaagggcaaggcttacaccaactacttcggacggtgcaatgtggccgagcacgaaaagctgatcctgctggcccagctgaagcccgagaaggatagcgacgaagccgtgacatatagcctgggaaagtttgggcagagggccctggatttctacagcattcatgtgaccaaggagtccacccaccccgtgaagcccctggcccagatcgccggaaacagatacgcctccggacctgtgggaaaggccctgagcgacgcatgtatgggcacaatcgcctccttcctgtctaagtaccaggacatcatcatcgaacaccagaaggtggtgaagggcaaccagaagagactggagagcctgcgggagctggccggcaaggaaaacctggaataccctagcgtgaccctgccacctcagcctcacaccaaggagggcgttgatgcctacaacgaagtgatcgcccgggtgcgaatgtgggtgaacctgaacctgtggcagaagctgaagctaagcagagatgatgccaagcctctgctgagactgaagggattcccttcctttcctctggtcgagagacaggccaacgaagtggactggtgggacatggtgtgtaacgtgaagaagctgatcaacgagaaaaaggaggatggcaaggtgttttggcagaatctggctggctacaagagacaggaagccctgagaccatacctgagcagcgaggaagatcggaagaagggaaagaaattcgctcggtaccagctgggcgacctgctgctgcacctggaaaagaagcacggcgaggactggggaaaggtgtacgacgaggcctgggagcggattgacaagaaagtggaaggcctgagcaagcacatcaagctggaagaggaacggagaagcgaggacgcccagagcaaggccgccctgaccgactggctgcgggctaaggccagcttcgtgatcgagggcctgaaggaggccgacaaggacgagttctgcagatgcgagctgaagctgcagaagtggtacggggacctgcggggaaagcccttcgccatcgaagccgagaacagcatcctggacatcagcggcttcagcaagcagtacaactgtgccttcatctggcagaaggacggcgtgaagaagctgaacctgtacctgatcatcaactacttcaagggcggcaagctgcggttcaagaagatcaaacctgaagccttcgaagccaacagattctacaccgtgatcaacaaaaagagcggcgagatcgtgcccatggaggtgaacttcaacttcgacgaccccaacctgatcatcctgcctctggcctttggcaagagacagggcagagaattcatctggaacgacctgctgtccctggaaaccggcagcctgaagctggccaacggaagagtgatcgagaagacactgtacaacagaagaacccggcaggatgagcctgccctgttcgtggccctgaccttcgagcggcgggaggtcctggactcctccaatatcaaaccaatgaacctgatcggcgtggcaagaggcgaaaacatccccgccgtgatcgccctgaccgaccccgagggctgcccactgagccggtttaaggatagcctgggaaacccaacccacatcctgagaatcggcgagagctataaggagaagcagcggaccatccaggccaagaaggaggtggagcagcggagagccggcggctacagccggaagtacgccagcaaagccaagaatctggcagacgatatggtgagaaacaccgctagagatctgctgtactacgccgtgacccaggatgccatgctgatcttcgccaacctgagccggggcttcggccggcagggcaagcggaccttcatggccgagagacagtacacacggatggaggactggctgaccgccaagctggcctacgagggcctgagcaagacctacctgtccaagacactggcccagtacacctccaagacatgcagcaactgtgggtttaccatcaccagcgccgactacgacagggtgctggagaagctgaagaagacagcaacaggctggatgaccacaattaacggcaaggagctgaaggtggagggccagattacctactacaacagatacaagagacagaacgtagtcaaggacctgtccgtcgagctggatagactgagcgaagaatctgtgaacaacgacatctcctcctggacaaagggcagaagcggagaagctctgagcctcctgaagaaaagattctcccatagacccgtgcaggagaagttcgtgtgcctgaactgcggcttcgagacacacgcagccgagcaagccgccctgaacatcgccagatcctggctgttcctgcggagccaggagtacaagaaataccagacaaacaagacaaccggcaacaccgataagagagccttcgtcgagacctggcagtccttttaccggaagaagcttaaggaggtgtggaaacctgccgtgcggtctggcggatctggcggaggctccaccagccccaagaaaaagagaaaagtctaagctgccttctgcggggcttgccttctggccatgcccttcttctctcccttgcacctgtacctcttggtctttgaataaagcctgagtaggaaggctagcaaaaaaaaaaaaaaaaaaaaaaaaaaaaaaaaaaaaaaaaaaaaaaaaaaaaaaaaaaaaaaaaaaaaaaaaaaaaaaaa

SEQ ID NO: 12342 - RNA, 5785 nt, synthetic construct
  source 1..5785: mol_type = other RNA
aggaaataagagagaaaagaagagtaagaagaaatataagagccaccatggcccctaagaagaagcgtaaagtgagccggatggaacgcctcgtctacgaggtgcggcagaagtgcagaaacatcgaggacatctgcatctcctgcggatctctgaacgtgaccctggagcacccactgttcatcggcggcatgtgccagaactgtaaaaactgttttctggagtgtgcctatcaatacgacgatgacggctaccagagctactgcaccatctgttgcggcggaagagaggtgctgatgtgtggaaataacaactgctgccggtgcttctgcgtggaatgcgtggacctgctggtgggccccggcgccgcccaggccgctattaaggaagatccttggaactgctacatgtgcggccacaagggcacatacggcctgctgagacggagagaggactggcctagcagactgcagatgttcttcgccaataaccacgaccaggagttcgacccccctaaggtgtaccctcccgtccccgccgagaagagaaagcccatccgggtcctgagcctgttcgatggcatcgccaccggtctgctggtgctgaaggacctgggcatccaggtggataggtacattgcctccgaggtgtgcgaggactccatcaccgtgggaatggtgcgtcatcagggcaagatcatgtacgtgggcgacgtgcggagcgtgacacagaagcatatccaggagtggggccctttcgacctggtgatcggcggcagcccttgcaatgacctgagcatcgtgaacccagcccggaagggcctgtacgagggaaccggcagactgttcttcgagttttacagactgctgcacgacgcccggcctaaggaaggcgacgaccggcccttcttttggctgttcgagaatgtggtggccatgggagtcagcgacaagcgggatattagccggttcctggagagcaaccccgtgatgatcgatgccaaggaagtgagcgccgcccaccgggccagatacttctggggcaatctgcctggcatgaacagacccctggccagcaccgtgaacgacaagctggagctgcaggagtgcctggagcacggccggatcgccaagttcagcaaggtgagaaccatcaccacccgaagcaacagcatcaaacaaggcaaggaccagcactttcctgtgttcatgaacgagaaggaggacatcctgtggtgtaccgagatggagagagtgttcgggttcccagtccactacacagatgtcagcaacatgtctagactggccagacagagactgctgggaagaagctggtccgtccctgtgatcagacacctgttcgcccctctgaaggagtacttcgcctgcgtgagcagcggcaacagcaacgccaacagccggggccccagcttctctagcggcctggtgccactgtccctgagagggagccacatgggccccatggagatctacaaaaccgtgagcgcctggaagcggcagcctgtgcgcgtgctgagcctgtttcggaatatcgataaagtcctgaaaagcctgggattcctggagagcggctctggctccggcggtggcaccctgaagtacgtggaggatgtgacaaacgtggtcagacgggatgtggagaagtggggccccttcgatctggtgtacggcagcacccaacccctgggcagctcttgtgaccggtgccctggctggtacatgtttcagttccaccggatcctgcagtacgccctgccgagacaggagtcccagcggccattcttttggattttcatggacaacttgctgctgaccgaggatgaccaggaaactaccactcggttcctgcagaccgaagccgtgaccctgcaggacgtgagaggccgggactaccagaacgccatgcgggtgtggtccaacatccctggactgaaaagcaagcacgcacctctgacccctaaagaagaggagtacctgcaggcccaggtgcggagcagaagcaagctggacgcccctaaggtggatctgctggtgaagaattgcctcctgcccctgagagagtacttcaagtatttcagccagaatagtctgcccctgggaggcagcggcggcggctaccaggagatggtgaccttcgaggacgtggccgtgcacttcaccaagaccgagtggaccggcctgagccccgcccagagggccctgtacaggagcgtgatgctggagaacttcggcaacctgaccgccctgggctaccccgtgcccaagcccgccctgatcagcctgctggagaggggcgacatggcctggggcctggaggcccaggacgacccccccgccgagaggaccaagaacgtgtgcggcggcccaagcagcggcgcccctcctcccagcggcggcagcccagccggctccccaacctctaccgaggagggcacctctgagtccgccacccccgagagcggccctggcacctccaccgagcccagcgagggcagcgcacccggcagccctgccggcagccccacctccacagaggagggaaccagcaccgagcccagcgaaggcagcgccccaggcaccagcaccgagcctagtgagcaggagattaaacggatcaacaagatcagaagaagacttgtgaaagacagcaacaccaagaaggccggcaagacaggccccatgaaaaccctgctggttagagtgatgacacccgatctgagagagcggctggaaaacctgagaaagaagcctgaaaatatcccccagcccatcagcaatacatctagagccaacctgaataagctgctgaccgattacaccgaaatgaagaaggcgatcctgcatgtgtactgggaagagttccagaaggaccctgtgggcctgatgagccgggtggcccagcctgccagcaagaagatcgatcagaacaagctgaaacctgagatggacgagaagggcaacctgaccaccgccggctttgcctgctctcagtgtggccagcccctgttcgtgtacaagctggagcaggtgtctgagaagggcaaggcttacaccaactacttcggacggtgcaatgtggccgagcacgaaaagctgatcctgctggcccagctgaagcccgagaaggatagcgacgaagccgtgacatatagcctgggaaagtttgggcagagggccctggatttctacagcattcatgtgaccaaggagtccacccaccccgtgaagcccctggcccagatcgccggaaacagatacgcctccggacctgtgggaaaggccctgagcgacgcatgtatgggcacaatcgcctccttcctgtctaagtaccaggacatcatcatcgaacaccagaaggtggtgaagggcaaccagaagagactggagagcctgcgggagctggccggcaaggaaaacctggaataccctagcgtgaccctgccacctcagcctcacaccaaggagggcgttgatgcctacaacgaagtgatcgcccgggtgcgaatgtgggtgaacctgaacctgtggcagaagctgaagctaagcagagatgatgccaagcctctgctgagactgaagggattcccttcctttcctctggtcgagagacaggccaacgaagtggactggtgggacatggtgtgtaacgtgaagaagctgatcaacgagaaaaaggaggatggcaaggtgttttggcagaatctggctggctacaagagacaggaagccctgagaccatacctgagcagcgaggaagatcggaagaagggaaagaaattcgctcggtaccagctgggcgacctgctgctgcacctggaaaagaagcacggcgaggactggggaaaggtgtacgacgaggcctgggagcggattgacaagaaagtggaaggcctgagcaagcacatcaagctggaagaggaacggagaagcgaggacgcccagagcaaggccgccctgaccgactggctgcgggctaaggccagcttcgtgatcgagggcctgaaggaggccgacaaggacgagttctgcagatgcgagctgaagctgcagaagtggtacggggacctgcggggaaagcccttcgccatcgaagccgagaacagcatcctggacatcagcggcttcagcaagcagtacaactgtgccttcatctggcagaaggacggcgtgaagaagctgaacctgtacctgatcatcaactacttcaagggcggcaagctgcggttcaagaagatcaaacctgaagccttcgaagccaacagattctacaccgtgatcaacaaaaagagcggcgagatcgtgcccatggaggtgaacttcaacttcgacgaccccaacctgatcatcctgcctctggcctttggcaagagacagggcagagaattcatctggaacgacctgctgtccctggaaaccggcagcctgaagctggccaacggaagagtgatcgagaagacactgtacaacagaagaacccggcaggatgagcctgccctgttcgtggccctgaccttcgagcggcgggaggtcctggactcctccaatatcaaaccaatgaacctgatcggcgtggcaagaggcgaaaacatccccgccgtgatcgccctgaccgaccccgagggctgcccactgagccggtttaaggatagcctgggaaacccaacccacatcctgagaatcggcgagagctataaggagaagcagcggaccatccaggccaagaaggaggtggagcagcggagagccggcggctacagccggaagtacgccagcaaagccaagaatctggcagacgatatggtgagaaacaccgctagagatctgctgtactacgccgtgacccaggatgccatgctgatcttcgccaacctgagccggggcttcggccggcagggcaagcggaccttcatggccgagagacagtacacacggatggaggactggctgaccgccaagctggcctacgagggcctgagcaagacctacctgtccaagacactggcccagtacacctccaagacatgcagcaactgtgggtttaccatcaccagcgccgactacgacagggtgctggagaagctgaagaagacagcaacaggctggatgaccacaattaacggcaaggagctgaaggtggagggccagattacctactacaacagatacaagagacagaacgtagtcaaggacctgtccgtcgagctggatagactgagcgaagaatctgtgaacaacgacatctcctcctggacaaagggcagaagcggagaagctctgagcctcctgaagaaaagattctcccatagacccgtgcaggagaagttcgtgtgcctgaactgcggcttcgagacacacgcagccgagcaagccgccctgaacatcgccagatcctggctgttcctgcggagccaggagtacaagaaataccagacaaacaagacaaccggcaacaccgataagagagccttcgtcgagacctggcagtccttttaccggaagaagcttaaggaggtgtggaaacctgccgtgcggtctggcggatctggcggaggctccaccagccccaagaaaaagagaaaagtctaagctgccttctgcggggcttgccttctggccatgcccttcttctctcccttgcacctgtacctcttggtctttgaataaagcctgagtaggaaggctagcaaaaaaaaaaaaaaaaaaaaaaaaaaaaaaaaaaaaaaaaaaaaaaaaaaaaaaaaaaaaaaaaaaaaaaaaaaaaaaaa

SEQ ID NO: 12343 - RNA, 5785 nt, synthetic construct
  source 1..5785: mol_type = other RNA
aggaaataagagagaaaagaagagtaagaagaaatataagagccaccatggcccctaagaagaagcgtaaagtgagccggatggaacgcctcgtctacgaggtgcggcagaagtgcagaaacatcgaggacatctgcatctcctgcggatctctgaacgtgaccctggagcacccactgttcatcggcggcatgtgccagaactgtaaaaactgttttctggagtgtgcctatcaatacgacgatgacggctaccagagctactgcaccatctgttgcggcggaagagaggtgctgatgtgtggaaataacaactgctgccggtgcttctgcgtggaatgcgtggacctgctggtgggccccggcgccgcccaggccgctattaaggaagatccttggaactgctacatgtgcggccacaagggcacatacggcctgctgagacggagagaggactggcctagcagactgcagatgttcttcgccaataaccacgaccaggagttcgacccccctaaggtgtaccctcccgtccccgccgagaagagaaagcccatccgggtcctgagcctgttcgatggcatcgccaccggtctgctggtgctgaaggacctgggcatccaggtggataggtacattgcctccgaggtgtgcgaggactccatcaccgtgggaatggtgcgtcatcagggcaagatcatgtacgtgggcgacgtgcggagcgtgacacagaagcatatccaggagtggggccctttcgacctggtgatcggcggcagcccttgcaatgacctgagcatcgtgaacccagcccggaagggcctgtacgagggaaccggcagactgttcttcgagttttacagactgctgcacgacgcccggcctaaggaaggcgacgaccggcccttcttttggctgttcgagaatgtggtggccatgggagtcagcgacaagcgggatattagccggttcctggagagcaaccccgtgatgatcgatgccaaggaagtgagcgccgcccaccgggccagatacttctggggcaatctgcctggcatgaacagacccctggccagcaccgtgaacgacaagctggagctgcaggagtgcctggagcacggccggatcgccaagttcagcaaggtgagaaccatcaccacccgaagcaacagcatcaaacaaggcaaggaccagcactttcctgtgttcatgaacgagaaggaggacatcctgtggtgtaccgagatggagagagtgttcgggttcccagtccactacacagatgtcagcaacatgtctagactggccagacagagactgctgggaagaagctggtccgtccctgtgatcagacacctgttcgcccctctgaaggagtacttcgcctgcgtgagcagcggcaacagcaacgccaacagccggggccccagcttctctagcggcctggtgccactgtccctgagagggagccacatgggccccatggagatctacaaaaccgtgagcgcctggaagcggcagcctgtgcgcgtgctgagcctgtttcggaatatcgataaagtcctgaaaagcctgggattcctggagagcggctctggctccggcggtggcaccctgaagtacgtggaggatgtgacaaacgtggtcagacgggatgtggagaagtggggccccttcgatctggtgtacggcagcacccaacccctgggcagctcttgtgaccggtgccctggctggtacatgtttcagttccaccggatcctgcagtacgccctgccgagacaggagtcccagcggccattcttttggattttcatggacaacttgctgctgaccgaggatgaccaggaaactaccactcggttcctgcagaccgaagccgtgaccctgcaggacgtgagaggccgggactaccagaacgccatgcgggtgtggtccaacatccctggactgaaaagcaagcacgcacctctgacccctaaagaagaggagtacctgcaggcccaggtgcggagcagaagcaagctggacgcccctaaggtggatctgctggtgaagaattgcctcctgcccctgagagagtacttcaagtatttcagccagaatagtctgcccctgggaggcagcggcggcggcagccagagcctggtgaccttcggcgacgtggccgtggacttcagccaggaggagtgggagaggctgaacagcgcccagaggggcctgtacagggacgtgatgctggagaactacaggagcctggtgagcctgggcctgtgcttcagcaagcccgacatgatcagcagcctggagcagaggaaggagccctggatgcccaagaggaagctgatgaggggccagtgccccggctggaaggccgtgggcggcccaagcagcggcgcccctcctcccagcggcggcagcccagccggctccccaacctctaccgaggagggcacctctgagtccgccacccccgagagcggccctggcacctccaccgagcccagcgagggcagcgcacccggcagccctgccggcagccccacctccacagaggagggaaccagcaccgagcccagcgaaggcagcgccccaggcaccagcaccgagcctagtgagcaggagattaaacggatcaacaagatcagaagaagacttgtgaaagacagcaacaccaagaaggccggcaagacaggccccatgaaaaccctgctggttagagtgatgacacccgatctgagagagcggctggaaaacctgagaaagaagcctgaaaatatcccccagcccatcagcaatacatctagagccaacctgaataagctgctgaccgattacaccgaaatgaagaaggcgatcctgcatgtgtactgggaagagttccagaaggaccctgtgggcctgatgagccgggtggcccagcctgccagcaagaagatcgatcagaacaagctgaaacctgagatggacgagaagggcaacctgaccaccgccggctttgcctgctctcagtgtggccagcccctgttcgtgtacaagctggagcaggtgtctgagaagggcaaggcttacaccaactacttcggacggtgcaatgtggccgagcacgaaaagctgatcctgctggcccagctgaagcccgagaaggatagcgacgaagccgtgacatatagcctgggaaagtttgggcagagggccctggatttctacagcattcatgtgaccaaggagtccacccaccccgtgaagcccctggcccagatcgccggaaacagatacgcctccggacctgtgggaaaggccctgagcgacgcatgtatgggcacaatcgcctccttcctgtctaagtaccaggacatcatcatcgaacaccagaaggtggtgaagggcaaccagaagagactggagagcctgcgggagctggccggcaaggaaaacctggaataccctagcgtgaccctgccacctcagcctcacaccaaggagggcgttgatgcctacaacgaagtgatcgcccgggtgcgaatgtgggtgaacctgaacctgtggcagaagctgaagctaagcagagatgatgccaagcctctgctgagactgaagggattcccttcctttcctctggtcgagagacaggccaacgaagtggactggtgggacatggtgtgtaacgtgaagaagctgatcaacgagaaaaaggaggatggcaaggtgttttggcagaatctggctggctacaagagacaggaagccctgagaccatacctgagcagcgaggaagatcggaagaagggaaagaaattcgctcggtaccagctgggcgacctgctgctgcacctggaaaagaagcacggcgaggactggggaaaggtgtacgacgaggcctgggagcggattgacaagaaagtggaaggcctgagcaagcacatcaagctggaagaggaacggagaagcgaggacgcccagagcaaggccgccctgaccgactggctgcgggctaaggccagcttcgtgatcgagggcctgaaggaggccgacaaggacgagttctgcagatgcgagctgaagctgcagaagtggtacggggacctgcggggaaagcccttcgccatcgaagccgagaacagcatcctggacatcagcggcttcagcaagcagtacaactgtgccttcatctggcagaaggacggcgtgaagaagctgaacctgtacctgatcatcaactacttcaagggcggcaagctgcggttcaagaagatcaaacctgaagccttcgaagccaacagattctacaccgtgatcaacaaaaagagcggcgagatcgtgcccatggaggtgaacttcaacttcgacgaccccaacctgatcatcctgcctctggcctttggcaagagacagggcagagaattcatctggaacgacctgctgtccctggaaaccggcagcctgaagctggccaacggaagagtgatcgagaagacactgtacaacagaagaacccggcaggatgagcctgccctgttcgtggccctgaccttcgagcggcgggaggtcctggactcctccaatatcaaaccaatgaacctgatcggcgtggcaagaggcgaaaacatccccgccgtgatcgccctgaccgaccccgagggctgcccactgagccggtttaaggatagcctgggaaacccaacccacatcctgagaatcggcgagagctataaggagaagcagcggaccatccaggccaagaaggaggtggagcagcggagagccggcggctacagccggaagtacgccagcaaagccaagaatctggcagacgatatggtgagaaacaccgctagagatctgctgtactacgccgtgacccaggatgccatgctgatcttcgccaacctgagccggggcttcggccggcagggcaagcggaccttcatggccgagagacagtacacacggatggaggactggctgaccgccaagctggcctacgagggcctgagcaagacctacctgtccaagacactggcccagtacacctccaagacatgcagcaactgtgggtttaccatcaccagcgccgactacgacagggtgctggagaagctgaagaagacagcaacaggctggatgaccacaattaacggcaaggagctgaaggtggagggccagattacctactacaacagatacaagagacagaacgtagtcaaggacctgtccgtcgagctggatagactgagcgaagaatctgtgaacaacgacatctcctcctggacaaagggcagaagcggagaagctctgagcctcctgaagaaaagattctcccatagacccgtgcaggagaagttcgtgtgcctgaactgcggcttcgagacacacgcagccgagcaagccgccctgaacatcgccagatcctggctgttcctgcggagccaggagtacaagaaataccagacaaacaagacaaccggcaacaccgataagagagccttcgtcgagacctggcagtccttttaccggaagaagcttaaggaggtgtggaaacctgccgtgcggtctggcggatctggcggaggctccaccagccccaagaaaaagagaaaagtctaagctgccttctgcggggcttgccttctggccatgcccttcttctctcccttgcacctgtacctcttggtctttgaataaagcctgagtaggaaggctagcaaaaaaaaaaaaaaaaaaaaaaaaaaaaaaaaaaaaaaaaaaaaaaaaaaaaaaaaaaaaaaaaaaaaaaaaaaaaaaaa

SEQ ID NO: 12344 - RNA, 5785 nt, synthetic construct
  source 1..5785: mol_type = other RNA
aggaaataagagagaaaagaagagtaagaagaaatataagagccaccatggcccctaagaagaagcgtaaagtgagccggatggaacgcctcgtctacgaggtgcggcagaagtgcagaaacatcgaggacatctgcatctcctgcggatctctgaacgtgaccctggagcacccactgttcatcggcggcatgtgccagaactgtaaaaactgttttctggagtgtgcctatcaatacgacgatgacggctaccagagctactgcaccatctgttgcggcggaagagaggtgctgatgtgtggaaataacaactgctgccggtgcttctgcgtggaatgcgtggacctgctggtgggccccggcgccgcccaggccgctattaaggaagatccttggaactgctacatgtgcggccacaagggcacatacggcctgctgagacggagagaggactggcctagcagactgcagatgttcttcgccaataaccacgaccaggagttcgacccccctaaggtgtaccctcccgtccccgccgagaagagaaagcccatccgggtcctgagcctgttcgatggcatcgccaccggtctgctggtgctgaaggacctgggcatccaggtggataggtacattgcctccgaggtgtgcgaggactccatcaccgtgggaatggtgcgtcatcagggcaagatcatgtacgtgggcgacgtgcggagcgtgacacagaagcatatccaggagtggggccctttcgacctggtgatcggcggcagcccttgcaatgacctgagcatcgtgaacccagcccggaagggcctgtacgagggaaccggcagactgttcttcgagttttacagactgctgcacgacgcccggcctaaggaaggcgacgaccggcccttcttttggctgttcgagaatgtggtggccatgggagtcagcgacaagcgggatattagccggttcctggagagcaaccccgtgatgatcgatgccaaggaagtgagcgccgcccaccgggccagatacttctggggcaatctgcctggcatgaacagacccctggccagcaccgtgaacgacaagctggagctgcaggagtgcctggagcacggccggatcgccaagttcagcaaggtgagaaccatcaccacccgaagcaacagcatcaaacaaggcaaggaccagcactttcctgtgttcatgaacgagaaggaggacatcctgtggtgtaccgagatggagagagtgttcgggttcccagtccactacacagatgtcagcaacatgtctagactggccagacagagactgctgggaagaagctggtccgtccctgtgatcagacacctgttcgcccctctgaaggagtacttcgcctgcgtgagcagcggcaacagcaacgccaacagccggggccccagcttctctagcggcctggtgccactgtccctgagagggagccacatgggccccatggagatctacaaaaccgtgagcgcctggaagcggcagcctgtgcgcgtgctgagcctgtttcggaatatcgataaagtcctgaaaagcctgggattcctggagagcggctctggctccggcggtggcaccctgaagtacgtggaggatgtgacaaacgtggtcagacgggatgtggagaagtggggccccttcgatctggtgtacggcagcacccaacccctgggcagctcttgtgaccggtgccctggctggtacatgtttcagttccaccggatcctgcagtacgccctgccgagacaggagtcccagcggccattcttttggattttcatggacaacttgctgctgaccgaggatgaccaggaaactaccactcggttcctgcagaccgaagccgtgaccctgcaggacgtgagaggccgggactaccagaacgccatgcgggtgtggtccaacatccctggactgaaaagcaagcacgcacctctgacccctaaagaagaggagtacctgcaggcccaggtgcggagcagaagcaagctggacgcccctaaggtggatctgctggtgaagaattgcctcctgcccctgagagagtacttcaagtatttcagccagaatagtctgcccctgggaggcagcggcggcggcggctgctgcagcctggagacccacagcatcagggacaagaacgccgtgacctacggcgacgtgcacgtgaacttcacccaggaggagtgggccctgctggaccccagccagaagaagctgtacaaggacgtgatgctggagacctacaggaacctgaacgccatcggcttcaactgggacgacaagaacaccgaggagcactgccccagcaccaggaggtggaggaggttctacaggatgcagggcggcccaagcagcggcgcccctcctcccagcggcggcagcccagccggctccccaacctctaccgaggagggcacctctgagtccgccacccccgagagcggccctggcacctccaccgagcccagcgagggcagcgcacccggcagccctgccggcagccccacctccacagaggagggaaccagcaccgagcccagcgaaggcagcgccccaggcaccagcaccgagcctagtgagcaggagattaaacggatcaacaagatcagaagaagacttgtgaaagacagcaacaccaagaaggccggcaagacaggccccatgaaaaccctgctggttagagtgatgacacccgatctgagagagcggctggaaaacctgagaaagaagcctgaaaatatcccccagcccatcagcaatacatctagagccaacctgaataagctgctgaccgattacaccgaaatgaagaaggcgatcctgcatgtgtactgggaagagttccagaaggaccctgtgggcctgatgagccgggtggcccagcctgccagcaagaagatcgatcagaacaagctgaaacctgagatggacgagaagggcaacctgaccaccgccggctttgcctgctctcagtgtggccagcccctgttcgtgtacaagctggagcaggtgtctgagaagggcaaggcttacaccaactacttcggacggtgcaatgtggccgagcacgaaaagctgatcctgctggcccagctgaagcccgagaaggatagcgacgaagccgtgacatatagcctgggaaagtttgggcagagggccctggatttctacagcattcatgtgaccaaggagtccacccaccccgtgaagcccctggcccagatcgccggaaacagatacgcctccggacctgtgggaaaggccctgagcgacgcatgtatgggcacaatcgcctccttcctgtctaagtaccaggacatcatcatcgaacaccagaaggtggtgaagggcaaccagaagagactggagagcctgcgggagctggccggcaaggaaaacctggaataccctagcgtgaccctgccacctcagcctcacaccaaggagggcgttgatgcctacaacgaagtgatcgcccgggtgcgaatgtgggtgaacctgaacctgtggcagaagctgaagctaagcagagatgatgccaagcctctgctgagactgaagggattcccttcctttcctctggtcgagagacaggccaacgaagtggactggtgggacatggtgtgtaacgtgaagaagctgatcaacgagaaaaaggaggatggcaaggtgttttggcagaatctggctggctacaagagacaggaagccctgagaccatacctgagcagcgaggaagatcggaagaagggaaagaaattcgctcggtaccagctgggcgacctgctgctgcacctggaaaagaagcacggcgaggactggggaaaggtgtacgacgaggcctgggagcggattgacaagaaagtggaaggcctgagcaagcacatcaagctggaagaggaacggagaagcgaggacgcccagagcaaggccgccctgaccgactggctgcgggctaaggccagcttcgtgatcgagggcctgaaggaggccgacaaggacgagttctgcagatgcgagctgaagctgcagaagtggtacggggacctgcggggaaagcccttcgccatcgaagccgagaacagcatcctggacatcagcggcttcagcaagcagtacaactgtgccttcatctggcagaaggacggcgtgaagaagctgaacctgtacctgatcatcaactacttcaagggcggcaagctgcggttcaagaagatcaaacctgaagccttcgaagccaacagattctacaccgtgatcaacaaaaagagcggcgagatcgtgcccatggaggtgaacttcaacttcgacgaccccaacctgatcatcctgcctctggcctttggcaagagacagggcagagaattcatctggaacgacctgctgtccctggaaaccggcagcctgaagctggccaacggaagagtgatcgagaagacactgtacaacagaagaacccggcaggatgagcctgccctgttcgtggccctgaccttcgagcggcgggaggtcctggactcctccaatatcaaaccaatgaacctgatcggcgtggcaagaggcgaaaacatccccgccgtgatcgccctgaccgaccccgagggctgcccactgagccggtttaaggatagcctgggaaacccaacccacatcctgagaatcggcgagagctataaggagaagcagcggaccatccaggccaagaaggaggtggagcagcggagagccggcggctacagccggaagtacgccagcaaagccaagaatctggcagacgatatggtgagaaacaccgctagagatctgctgtactacgccgtgacccaggatgccatgctgatcttcgccaacctgagccggggcttcggccggcagggcaagcggaccttcatggccgagagacagtacacacggatggaggactggctgaccgccaagctggcctacgagggcctgagcaagacctacctgtccaagacactggcccagtacacctccaagacatgcagcaactgtgggtttaccatcaccagcgccgactacgacagggtgctggagaagctgaagaagacagcaacaggctggatgaccacaattaacggcaaggagctgaaggtggagggccagattacctactacaacagatacaagagacagaacgtagtcaaggacctgtccgtcgagctggatagactgagcgaagaatctgtgaacaacgacatctcctcctggacaaagggcagaagcggagaagctctgagcctcctgaagaaaagattctcccatagacccgtgcaggagaagttcgtgtgcctgaactgcggcttcgagacacacgcagccgagcaagccgccctgaacatcgccagatcctggctgttcctgcggagccaggagtacaagaaataccagacaaacaagacaaccggcaacaccgataagagagccttcgtcgagacctggcagtccttttaccggaagaagcttaaggaggtgtggaaacctgccgtgcggtctggcggatctggcggaggctccaccagccccaagaaaaagagaaaagtctaagctgccttctgcggggcttgccttctggccatgcccttcttctctcccttgcacctgtacctcttggtctttgaataaagcctgagtaggaaggctagcaaaaaaaaaaaaaaaaaaaaaaaaaaaaaaaaaaaaaaaaaaaaaaaaaaaaaaaaaaaaaaaaaaaaaaaaaaaaaaaa

SEQ ID NO: 12345 - RNA, 5785 nt, synthetic construct
  source 1..5785: mol_type = other RNA
aggaaataagagagaaaagaagagtaagaagaaatataagagccaccatggcccctaagaagaagcgtaaagtgagccggatggaacgcctcgtctacgaggtgcggcagaagtgcagaaacatcgaggacatctgcatctcctgcggatctctgaacgtgaccctggagcacccactgttcatcggcggcatgtgccagaactgtaaaaactgttttctggagtgtgcctatcaatacgacgatgacggctaccagagctactgcaccatctgttgcggcggaagagaggtgctgatgtgtggaaataacaactgctgccggtgcttctgcgtggaatgcgtggacctgctggtgggccccggcgccgcccaggccgctattaaggaagatccttggaactgctacatgtgcggccacaagggcacatacggcctgctgagacggagagaggactggcctagcagactgcagatgttcttcgccaataaccacgaccaggagttcgacccccctaaggtgtaccctcccgtccccgccgagaagagaaagcccatccgggtcctgagcctgttcgatggcatcgccaccggtctgctggtgctgaaggacctgggcatccaggtggataggtacattgcctccgaggtgtgcgaggactccatcaccgtgggaatggtgcgtcatcagggcaagatcatgtacgtgggcgacgtgcggagcgtgacacagaagcatatccaggagtggggccctttcgacctggtgatcggcggcagcccttgcaatgacctgagcatcgtgaacccagcccggaagggcctgtacgagggaaccggcagactgttcttcgagttttacagactgctgcacgacgcccggcctaaggaaggcgacgaccggcccttcttttggctgttcgagaatgtggtggccatgggagtcagcgacaagcgggatattagccggttcctggagagcaaccccgtgatgatcgatgccaaggaagtgagcgccgcccaccgggccagatacttctggggcaatctgcctggcatgaacagacccctggccagcaccgtgaacgacaagctggagctgcaggagtgcctggagcacggccggatcgccaagttcagcaaggtgagaaccatcaccacccgaagcaacagcatcaaacaaggcaaggaccagcactttcctgtgttcatgaacgagaaggaggacatcctgtggtgtaccgagatggagagagtgttcgggttcccagtccactacacagatgtcagcaacatgtctagactggccagacagagactgctgggaagaagctggtccgtccctgtgatcagacacctgttcgcccctctgaaggagtacttcgcctgcgtgagcagcggcaacagcaacgccaacagccggggccccagcttctctagcggcctggtgccactgtccctgagagggagccacatgggccccatggagatctacaaaaccgtgagcgcctggaagcggcagcctgtgcgcgtgctgagcctgtttcggaatatcgataaagtcctgaaaagcctgggattcctggagagcggctctggctccggcggtggcaccctgaagtacgtggaggatgtgacaaacgtggtcagacgggatgtggagaagtggggccccttcgatctggtgtacggcagcacccaacccctgggcagctcttgtgaccggtgccctggctggtacatgtttcagttccaccggatcctgcagtacgccctgccgagacaggagtcccagcggccattcttttggattttcatggacaacttgctgctgaccgaggatgaccaggaaactaccactcggttcctgcagaccgaagccgtgaccctgcaggacgtgagaggccgggactaccagaacgccatgcgggtgtggtccaacatccctggactgaaaagcaagcacgcacctctgacccctaaagaagaggagtacctgcaggcccaggtgcggagcagaagcaagctggacgcccctaaggtggatctgctggtgaagaattgcctcctgcccctgagagagtacttcaagtatttcagccagaatagtctgcccctgggaggcagcggcggcggcacctgcatggtgcacaggcagaccatgagctgcagcggcgccggcggcatcaccgccttcgtggccttcagggacgtggccgtggacttcacccaggaggagtggaggctgctgagccccgcccagaggaccctgcacagggaggtgatgctggagacctacaaccacctggtgagcctggagatccccagcagcaagcccaagctgatcgcccagctggagcagggcgaggagccctggaggggcggcccaagcagcggcgcccctcctcccagcggcggcagcccagccggctccccaacctctaccgaggagggcacctctgagtccgccacccccgagagcggccctggcacctccaccgagcccagcgagggcagcgcacccggcagccctgccggcagccccacctccacagaggagggaaccagcaccgagcccagcgaaggcagcgccccaggcaccagcaccgagcctagtgagcaggagattaaacggatcaacaagatcagaagaagacttgtgaaagacagcaacaccaagaaggccggcaagacaggccccatgaaaaccctgctggttagagtgatgacacccgatctgagagagcggctggaaaacctgagaaagaagcctgaaaatatcccccagcccatcagcaatacatctagagccaacctgaataagctgctgaccgattacaccgaaatgaagaaggcgatcctgcatgtgtactgggaagagttccagaaggaccctgtgggcctgatgagccgggtggcccagcctgccagcaagaagatcgatcagaacaagctgaaacctgagatggacgagaagggcaacctgaccaccgccggctttgcctgctctcagtgtggccagcccctgttcgtgtacaagctggagcaggtgtctgagaagggcaaggcttacaccaactacttcggacggtgcaatgtggccgagcacgaaaagctgatcctgctggcccagctgaagcccgagaaggatagcgacgaagccgtgacatatagcctgggaaagtttgggcagagggccctggatttctacagcattcatgtgaccaaggagtccacccaccccgtgaagcccctggcccagatcgccggaaacagatacgcctccggacctgtgggaaaggccctgagcgacgcatgtatgggcacaatcgcctccttcctgtctaagtaccaggacatcatcatcgaacaccagaaggtggtgaagggcaaccagaagagactggagagcctgcgggagctggccggcaaggaaaacctggaataccctagcgtgaccctgccacctcagcctcacaccaaggagggcgttgatgcctacaacgaagtgatcgcccgggtgcgaatgtgggtgaacctgaacctgtggcagaagctgaagctaagcagagatgatgccaagcctctgctgagactgaagggattcccttcctttcctctggtcgagagacaggccaacgaagtggactggtgggacatggtgtgtaacgtgaagaagctgatcaacgagaaaaaggaggatggcaaggtgttttggcagaatctggctggctacaagagacaggaagccctgagaccatacctgagcagcgaggaagatcggaagaagggaaagaaattcgctcggtaccagctgggcgacctgctgctgcacctggaaaagaagcacggcgaggactggggaaaggtgtacgacgaggcctgggagcggattgacaagaaagtggaaggcctgagcaagcacatcaagctggaagaggaacggagaagcgaggacgcccagagcaaggccgccctgaccgactggctgcgggctaaggccagcttcgtgatcgagggcctgaaggaggccgacaaggacgagttctgcagatgcgagctgaagctgcagaagtggtacggggacctgcggggaaagcccttcgccatcgaagccgagaacagcatcctggacatcagcggcttcagcaagcagtacaactgtgccttcatctggcagaaggacggcgtgaagaagctgaacctgtacctgatcatcaactacttcaagggcggcaagctgcggttcaagaagatcaaacctgaagccttcgaagccaacagattctacaccgtgatcaacaaaaagagcggcgagatcgtgcccatggaggtgaacttcaacttcgacgaccccaacctgatcatcctgcctctggcctttggcaagagacagggcagagaattcatctggaacgacctgctgtccctggaaaccggcagcctgaagctggccaacggaagagtgatcgagaagacactgtacaacagaagaacccggcaggatgagcctgccctgttcgtggccctgaccttcgagcggcgggaggtcctggactcctccaatatcaaaccaatgaacctgatcggcgtggcaagaggcgaaaacatccccgccgtgatcgccctgaccgaccccgagggctgcccactgagccggtttaaggatagcctgggaaacccaacccacatcctgagaatcggcgagagctataaggagaagcagcggaccatccaggccaagaaggaggtggagcagcggagagccggcggctacagccggaagtacgccagcaaagccaagaatctggcagacgatatggtgagaaacaccgctagagatctgctgtactacgccgtgacccaggatgccatgctgatcttcgccaacctgagccggggcttcggccggcagggcaagcggaccttcatggccgagagacagtacacacggatggaggactggctgaccgccaagctggcctacgagggcctgagcaagacctacctgtccaagacactggcccagtacacctccaagacatgcagcaactgtgggtttaccatcaccagcgccgactacgacagggtgctggagaagctgaagaagacagcaacaggctggatgaccacaattaacggcaaggagctgaaggtggagggccagattacctactacaacagatacaagagacagaacgtagtcaaggacctgtccgtcgagctggatagactgagcgaagaatctgtgaacaacgacatctcctcctggacaaagggcagaagcggagaagctctgagcctcctgaagaaaagattctcccatagacccgtgcaggagaagttcgtgtgcctgaactgcggcttcgagacacacgcagccgagcaagccgccctgaacatcgccagatcctggctgttcctgcggagccaggagtacaagaaataccagacaaacaagacaaccggcaacaccgataagagagccttcgtcgagacctggcagtccttttaccggaagaagcttaaggaggtgtggaaacctgccgtgcggtctggcggatctggcggaggctccaccagccccaagaaaaagagaaaagtctaagctgccttctgcggggcttgccttctggccatgcccttcttctctcccttgcacctgtacctcttggtctttgaataaagcctgagtaggaaggctagcaaaaaaaaaaaaaaaaaaaaaaaaaaaaaaaaaaaaaaaaaaaaaaaaaaaaaaaaaaaaaaaaaaaaaaaaaaaaaaaa

SEQ ID NO: 12346 - RNA, 5785 nt, synthetic construct
  source 1..5785: mol_type = other RNA
aggaaataagagagaaaagaagagtaagaagaaatataagagccaccatggcccctaagaagaagcgtaaagtgagccggatggaacgcctcgtctacgaggtgcggcagaagtgcagaaacatcgaggacatctgcatctcctgcggatctctgaacgtgaccctggagcacccactgttcatcggcggcatgtgccagaactgtaaaaactgttttctggagtgtgcctatcaatacgacgatgacggctaccagagctactgcaccatctgttgcggcggaagagaggtgctgatgtgtggaaataacaactgctgccggtgcttctgcgtggaatgcgtggacctgctggtgggccccggcgccgcccaggccgctattaaggaagatccttggaactgctacatgtgcggccacaagggcacatacggcctgctgagacggagagaggactggcctagcagactgcagatgttcttcgccaataaccacgaccaggagttcgacccccctaaggtgtaccctcccgtccccgccgagaagagaaagcccatccgggtcctgagcctgttcgatggcatcgccaccggtctgctggtgctgaaggacctgggcatccaggtggataggtacattgcctccgaggtgtgcgaggactccatcaccgtgggaatggtgcgtcatcagggcaagatcatgtacgtgggcgacgtgcggagcgtgacacagaagcatatccaggagtggggccctttcgacctggtgatcggcggcagcccttgcaatgacctgagcatcgtgaacccagcccggaagggcctgtacgagggaaccggcagactgttcttcgagttttacagactgctgcacgacgcccggcctaaggaaggcgacgaccggcccttcttttggctgttcgagaatgtggtggccatgggagtcagcgacaagcgggatattagccggttcctggagagcaaccccgtgatgatcgatgccaaggaagtgagcgccgcccaccgggccagatacttctggggcaatctgcctggcatgaacagacccctggccagcaccgtgaacgacaagctggagctgcaggagtgcctggagcacggccggatcgccaagttcagcaaggtgagaaccatcaccacccgaagcaacagcatcaaacaaggcaaggaccagcactttcctgtgttcatgaacgagaaggaggacatcctgtggtgtaccgagatggagagagtgttcgggttcccagtccactacacagatgtcagcaacatgtctagactggccagacagagactgctgggaagaagctggtccgtccctgtgatcagacacctgttcgcccctctgaaggagtacttcgcctgcgtgagcagcggcaacagcaacgccaacagccggggccccagcttctctagcggcctggtgccactgtccctgagagggagccacatgggccccatggagatctacaaaaccgtgagcgcctggaagcggcagcctgtgcgcgtgctgagcctgtttcggaatatcgataaagtcctgaaaagcctgggattcctggagagcggctctggctccggcggtggcaccctgaagtacgtggaggatgtgacaaacgtggtcagacgggatgtggagaagtggggccccttcgatctggtgtacggcagcacccaacccctgggcagctcttgtgaccggtgccctggctggtacatgtttcagttccaccggatcctgcagtacgccctgccgagacaggagtcccagcggccattcttttggattttcatggacaacttgctgctgaccgaggatgaccaggaaactaccactcggttcctgcagaccgaagccgtgaccctgcaggacgtgagaggccgggactaccagaacgccatgcgggtgtggtccaacatccctggactgaaaagcaagcacgcacctctgacccctaaagaagaggagtacctgcaggcccaggtgcggagcagaagcaagctggacgcccctaaggtggatctgctggtgaagaattgcctcctgcccctgagagagtacttcaagtatttcagccagaatagtctgcccctgggaggcagcggcggcggcatggtgagcttcgaggacgtggccgtgctgctgagccaggaggagtgggactgcctgatccccgcccagaggggcctgtacagggacgtgatgctggagacctacggcaacctggtgagcctgggcctgcaggccagcaagcccgacgtgatcagcaggctggagcagggcgacaagccctggaccccccacatcctgaggacccagatcagctggagctggaggcacaagagggagtgctacggcggcccaagcagcggcgcccctcctcccagcggcggcagcccagccggctccccaacctctaccgaggagggcacctctgagtccgccacccccgagagcggccctggcacctccaccgagcccagcgagggcagcgcacccggcagccctgccggcagccccacctccacagaggagggaaccagcaccgagcccagcgaaggcagcgccccaggcaccagcaccgagcctagtgagcaggagattaaacggatcaacaagatcagaagaagacttgtgaaagacagcaacaccaagaaggccggcaagacaggccccatgaaaaccctgctggttagagtgatgacacccgatctgagagagcggctggaaaacctgagaaagaagcctgaaaatatcccccagcccatcagcaatacatctagagccaacctgaataagctgctgaccgattacaccgaaatgaagaaggcgatcctgcatgtgtactgggaagagttccagaaggaccctgtgggcctgatgagccgggtggcccagcctgccagcaagaagatcgatcagaacaagctgaaacctgagatggacgagaagggcaacctgaccaccgccggctttgcctgctctcagtgtggccagcccctgttcgtgtacaagctggagcaggtgtctgagaagggcaaggcttacaccaactacttcggacggtgcaatgtggccgagcacgaaaagctgatcctgctggcccagctgaagcccgagaaggatagcgacgaagccgtgacatatagcctgggaaagtttgggcagagggccctggatttctacagcattcatgtgaccaaggagtccacccaccccgtgaagcccctggcccagatcgccggaaacagatacgcctccggacctgtgggaaaggccctgagcgacgcatgtatgggcacaatcgcctccttcctgtctaagtaccaggacatcatcatcgaacaccagaaggtggtgaagggcaaccagaagagactggagagcctgcgggagctggccggcaaggaaaacctggaataccctagcgtgaccctgccacctcagcctcacaccaaggagggcgttgatgcctacaacgaagtgatcgcccgggtgcgaatgtgggtgaacctgaacctgtggcagaagctgaagctaagcagagatgatgccaagcctctgctgagactgaagggattcccttcctttcctctggtcgagagacaggccaacgaagtggactggtgggacatggtgtgtaacgtgaagaagctgatcaacgagaaaaaggaggatggcaaggtgttttggcagaatctggctggctacaagagacaggaagccctgagaccatacctgagcagcgaggaagatcggaagaagggaaagaaattcgctcggtaccagctgggcgacctgctgctgcacctggaaaagaagcacggcgaggactggggaaaggtgtacgacgaggcctgggagcggattgacaagaaagtggaaggcctgagcaagcacatcaagctggaagaggaacggagaagcgaggacgcccagagcaaggccgccctgaccgactggctgcgggctaaggccagcttcgtgatcgagggcctgaaggaggccgacaaggacgagttctgcagatgcgagctgaagctgcagaagtggtacggggacctgcggggaaagcccttcgccatcgaagccgagaacagcatcctggacatcagcggcttcagcaagcagtacaactgtgccttcatctggcagaaggacggcgtgaagaagctgaacctgtacctgatcatcaactacttcaagggcggcaagctgcggttcaagaagatcaaacctgaagccttcgaagccaacagattctacaccgtgatcaacaaaaagagcggcgagatcgtgcccatggaggtgaacttcaacttcgacgaccccaacctgatcatcctgcctctggcctttggcaagagacagggcagagaattcatctggaacgacctgctgtccctggaaaccggcagcctgaagctggccaacggaagagtgatcgagaagacactgtacaacagaagaacccggcaggatgagcctgccctgttcgtggccctgaccttcgagcggcgggaggtcctggactcctccaatatcaaaccaatgaacctgatcggcgtggcaagaggcgaaaacatccccgccgtgatcgccctgaccgaccccgagggctgcccactgagccggtttaaggatagcctgggaaacccaacccacatcctgagaatcggcgagagctataaggagaagcagcggaccatccaggccaagaaggaggtggagcagcggagagccggcggctacagccggaagtacgccagcaaagccaagaatctggcagacgatatggtgagaaacaccgctagagatctgctgtactacgccgtgacccaggatgccatgctgatcttcgccaacctgagccggggcttcggccggcagggcaagcggaccttcatggccgagagacagtacacacggatggaggactggctgaccgccaagctggcctacgagggcctgagcaagacctacctgtccaagacactggcccagtacacctccaagacatgcagcaactgtgggtttaccatcaccagcgccgactacgacagggtgctggagaagctgaagaagacagcaacaggctggatgaccacaattaacggcaaggagctgaaggtggagggccagattacctactacaacagatacaagagacagaacgtagtcaaggacctgtccgtcgagctggatagactgagcgaagaatctgtgaacaacgacatctcctcctggacaaagggcagaagcggagaagctctgagcctcctgaagaaaagattctcccatagacccgtgcaggagaagttcgtgtgcctgaactgcggcttcgagacacacgcagccgagcaagccgccctgaacatcgccagatcctggctgttcctgcggagccaggagtacaagaaataccagacaaacaagacaaccggcaacaccgataagagagccttcgtcgagacctggcagtccttttaccggaagaagcttaaggaggtgtggaaacctgccgtgcggtctggcggatctggcggaggctccaccagccccaagaaaaagagaaaagtctaagctgccttctgcggggcttgccttctggccatgcccttcttctctcccttgcacctgtacctcttggtctttgaataaagcctgagtaggaaggctagcaaaaaaaaaaaaaaaaaaaaaaaaaaaaaaaaaaaaaaaaaaaaaaaaaaaaaaaaaaaaaaaaaaaaaaaaaaaaaaaa

SEQ ID NO: 12347 - RNA, 5785 nt, synthetic construct
  source 1..5785: mol_type = other RNA
aggaaataagagagaaaagaagagtaagaagaaatataagagccaccatggcccctaagaagaagcgtaaagtgagccggatggaacgcctcgtctacgaggtgcggcagaagtgcagaaacatcgaggacatctgcatctcctgcggatctctgaacgtgaccctggagcacccactgttcatcggcggcatgtgccagaactgtaaaaactgttttctggagtgtgcctatcaatacgacgatgacggctaccagagctactgcaccatctgttgcggcggaagagaggtgctgatgtgtggaaataacaactgctgccggtgcttctgcgtggaatgcgtggacctgctggtgggccccggcgccgcccaggccgctattaaggaagatccttggaactgctacatgtgcggccacaagggcacatacggcctgctgagacggagagaggactggcctagcagactgcagatgttcttcgccaataaccacgaccaggagttcgacccccctaaggtgtaccctcccgtccccgccgagaagagaaagcccatccgggtcctgagcctgttcgatggcatcgccaccggtctgctggtgctgaaggacctgggcatccaggtggataggtacattgcctccgaggtgtgcgaggactccatcaccgtgggaatggtgcgtcatcagggcaagatcatgtacgtgggcgacgtgcggagcgtgacacagaagcatatccaggagtggggccctttcgacctggtgatcggcggcagcccttgcaatgacctgagcatcgtgaacccagcccggaagggcctgtacgagggaaccggcagactgttcttcgagttttacagactgctgcacgacgcccggcctaaggaaggcgacgaccggcccttcttttggctgttcgagaatgtggtggccatgggagtcagcgacaagcgggatattagccggttcctggagagcaaccccgtgatgatcgatgccaaggaagtgagcgccgcccaccgggccagatacttctggggcaatctgcctggcatgaacagacccctggccagcaccgtgaacgacaagctggagctgcaggagtgcctggagcacggccggatcgccaagttcagcaaggtgagaaccatcaccacccgaagcaacagcatcaaacaaggcaaggaccagcactttcctgtgttcatgaacgagaaggaggacatcctgtggtgtaccgagatggagagagtgttcgggttcccagtccactacacagatgtcagcaacatgtctagactggccagacagagactgctgggaagaagctggtccgtccctgtgatcagacacctgttcgcccctctgaaggagtacttcgcctgcgtgagcagcggcaacagcaacgccaacagccggggccccagcttctctagcggcctggtgccactgtccctgagagggagccacatgggccccatggagatctacaaaaccgtgagcgcctggaagcggcagcctgtgcgcgtgctgagcctgtttcggaatatcgataaagtcctgaaaagcctgggattcctggagagcggctctggctccggcggtggcaccctgaagtacgtggaggatgtgacaaacgtggtcagacgggatgtggagaagtggggccccttcgatctggtgtacggcagcacccaacccctgggcagctcttgtgaccggtgccctggctggtacatgtttcagttccaccggatcctgcagtacgccctgccgagacaggagtcccagcggccattcttttggattttcatggacaacttgctgctgaccgaggatgaccaggaaactaccactcggttcctgcagaccgaagccgtgaccctgcaggacgtgagaggccgggactaccagaacgccatgcgggtgtggtccaacatccctggactgaaaagcaagcacgcacctctgacccctaaagaagaggagtacctgcaggcccaggtgcggagcagaagcaagctggacgcccctaaggtggatctgctggtgaagaattgcctcctgcccctgagagagtacttcaagtatttcagccagaatagtctgcccctgggaggcagcggcggcggcgcccagggcagcgtggtgttcagcgacgtgagcgtggacttcagccaggaggagtgggagtgcctggacagcggccagagggacctgtacagggacgtgatgctggagaactacagcaacctgctgagcatgggcttctacatccccaagccccccgtgatcagcctgctggagcagggcaaggagccctggatggtgggcagggagctgaccaagggcctgtgcagcgacctggagagcatgggcggcccaagcagcggcgcccctcctcccagcggcggcagcccagccggctccccaacctctaccgaggagggcacctctgagtccgccacccccgagagcggccctggcacctccaccgagcccagcgagggcagcgcacccggcagccctgccggcagccccacctccacagaggagggaaccagcaccgagcccagcgaaggcagcgccccaggcaccagcaccgagcctagtgagcaggagattaaacggatcaacaagatcagaagaagacttgtgaaagacagcaacaccaagaaggccggcaagacaggccccatgaaaaccctgctggttagagtgatgacacccgatctgagagagcggctggaaaacctgagaaagaagcctgaaaatatcccccagcccatcagcaatacatctagagccaacctgaataagctgctgaccgattacaccgaaatgaagaaggcgatcctgcatgtgtactgggaagagttccagaaggaccctgtgggcctgatgagccgggtggcccagcctgccagcaagaagatcgatcagaacaagctgaaacctgagatggacgagaagggcaacctgaccaccgccggctttgcctgctctcagtgtggccagcccctgttcgtgtacaagctggagcaggtgtctgagaagggcaaggcttacaccaactacttcggacggtgcaatgtggccgagcacgaaaagctgatcctgctggcccagctgaagcccgagaaggatagcgacgaagccgtgacatatagcctgggaaagtttgggcagagggccctggatttctacagcattcatgtgaccaaggagtccacccaccccgtgaagcccctggcccagatcgccggaaacagatacgcctccggacctgtgggaaaggccctgagcgacgcatgtatgggcacaatcgcctccttcctgtctaagtaccaggacatcatcatcgaacaccagaaggtggtgaagggcaaccagaagagactggagagcctgcgggagctggccggcaaggaaaacctggaataccctagcgtgaccctgccacctcagcctcacaccaaggagggcgttgatgcctacaacgaagtgatcgcccgggtgcgaatgtgggtgaacctgaacctgtggcagaagctgaagctaagcagagatgatgccaagcctctgctgagactgaagggattcccttcctttcctctggtcgagagacaggccaacgaagtggactggtgggacatggtgtgtaacgtgaagaagctgatcaacgagaaaaaggaggatggcaaggtgttttggcagaatctggctggctacaagagacaggaagccctgagaccatacctgagcagcgaggaagatcggaagaagggaaagaaattcgctcggtaccagctgggcgacctgctgctgcacctggaaaagaagcacggcgaggactggggaaaggtgtacgacgaggcctgggagcggattgacaagaaagtggaaggcctgagcaagcacatcaagctggaagaggaacggagaagcgaggacgcccagagcaaggccgccctgaccgactggctgcgggctaaggccagcttcgtgatcgagggcctgaaggaggccgacaaggacgagttctgcagatgcgagctgaagctgcagaagtggtacggggacctgcggggaaagcccttcgccatcgaagccgagaacagcatcctggacatcagcggcttcagcaagcagtacaactgtgccttcatctggcagaaggacggcgtgaagaagctgaacctgtacctgatcatcaactacttcaagggcggcaagctgcggttcaagaagatcaaacctgaagccttcgaagccaacagattctacaccgtgatcaacaaaaagagcggcgagatcgtgcccatggaggtgaacttcaacttcgacgaccccaacctgatcatcctgcctctggcctttggcaagagacagggcagagaattcatctggaacgacctgctgtccctggaaaccggcagcctgaagctggccaacggaagagtgatcgagaagacactgtacaacagaagaacccggcaggatgagcctgccctgttcgtggccctgaccttcgagcggcgggaggtcctggactcctccaatatcaaaccaatgaacctgatcggcgtggcaagaggcgaaaacatccccgccgtgatcgccctgaccgaccccgagggctgcccactgagccggtttaaggatagcctgggaaacccaacccacatcctgagaatcggcgagagctataaggagaagcagcggaccatccaggccaagaaggaggtggagcagcggagagccggcggctacagccggaagtacgccagcaaagccaagaatctggcagacgatatggtgagaaacaccgctagagatctgctgtactacgccgtgacccaggatgccatgctgatcttcgccaacctgagccggggcttcggccggcagggcaagcggaccttcatggccgagagacagtacacacggatggaggactggctgaccgccaagctggcctacgagggcctgagcaagacctacctgtccaagacactggcccagtacacctccaagacatgcagcaactgtgggtttaccatcaccagcgccgactacgacagggtgctggagaagctgaagaagacagcaacaggctggatgaccacaattaacggcaaggagctgaaggtggagggccagattacctactacaacagatacaagagacagaacgtagtcaaggacctgtccgtcgagctggatagactgagcgaagaatctgtgaacaacgacatctcctcctggacaaagggcagaagcggagaagctctgagcctcctgaagaaaagattctcccatagacccgtgcaggagaagttcgtgtgcctgaactgcggcttcgagacacacgcagccgagcaagccgccctgaacatcgccagatcctggctgttcctgcggagccaggagtacaagaaataccagacaaacaagacaaccggcaacaccgataagagagccttcgtcgagacctggcagtccttttaccggaagaagcttaaggaggtgtggaaacctgccgtgcggtctggcggatctggcggaggctccaccagccccaagaaaaagagaaaagtctaagctgccttctgcggggcttgccttctggccatgcccttcttctctcccttgcacctgtacctcttggtctttgaataaagcctgagtaggaaggctagcaaaaaaaaaaaaaaaaaaaaaaaaaaaaaaaaaaaaaaaaaaaaaaaaaaaaaaaaaaaaaaaaaaaaaaaaaaaaaaaa

SEQ ID NO: 12348 - RNA, 5785 nt, synthetic construct
  source 1..5785: mol_type = other RNA
aggaaataagagagaaaagaagagtaagaagaaatataagagccaccatggcccctaagaagaagcgtaaagtgagccggatggaacgcctcgtctacgaggtgcggcagaagtgcagaaacatcgaggacatctgcatctcctgcggatctctgaacgtgaccctggagcacccactgttcatcggcggcatgtgccagaactgtaaaaactgttttctggagtgtgcctatcaatacgacgatgacggctaccagagctactgcaccatctgttgcggcggaagagaggtgctgatgtgtggaaataacaactgctgccggtgcttctgcgtggaatgcgtggacctgctggtgggccccggcgccgcccaggccgctattaaggaagatccttggaactgctacatgtgcggccacaagggcacatacggcctgctgagacggagagaggactggcctagcagactgcagatgttcttcgccaataaccacgaccaggagttcgacccccctaaggtgtaccctcccgtccccgccgagaagagaaagcccatccgggtcctgagcctgttcgatggcatcgccaccggtctgctggtgctgaaggacctgggcatccaggtggataggtacattgcctccgaggtgtgcgaggactccatcaccgtgggaatggtgcgtcatcagggcaagatcatgtacgtgggcgacgtgcggagcgtgacacagaagcatatccaggagtggggccctttcgacctggtgatcggcggcagcccttgcaatgacctgagcatcgtgaacccagcccggaagggcctgtacgagggaaccggcagactgttcttcgagttttacagactgctgcacgacgcccggcctaaggaaggcgacgaccggcccttcttttggctgttcgagaatgtggtggccatgggagtcagcgacaagcgggatattagccggttcctggagagcaaccccgtgatgatcgatgccaaggaagtgagcgccgcccaccgggccagatacttctggggcaatctgcctggcatgaacagacccctggccagcaccgtgaacgacaagctggagctgcaggagtgcctggagcacggccggatcgccaagttcagcaaggtgagaaccatcaccacccgaagcaacagcatcaaacaaggcaaggaccagcactttcctgtgttcatgaacgagaaggaggacatcctgtggtgtaccgagatggagagagtgttcgggttcccagtccactacacagatgtcagcaacatgtctagactggccagacagagactgctgggaagaagctggtccgtccctgtgatcagacacctgttcgcccctctgaaggagtacttcgcctgcgtgagcagcggcaacagcaacgccaacagccggggccccagcttctctagcggcctggtgccactgtccctgagagggagccacatgggccccatggagatctacaaaaccgtgagcgcctggaagcggcagcctgtgcgcgtgctgagcctgtttcggaatatcgataaagtcctgaaaagcctgggattcctggagagcggctctggctccggcggtggcaccctgaagtacgtggaggatgtgacaaacgtggtcagacgggatgtggagaagtggggccccttcgatctggtgtacggcagcacccaacccctgggcagctcttgtgaccggtgccctggctggtacatgtttcagttccaccggatcctgcagtacgccctgccgagacaggagtcccagcggccattcttttggattttcatggacaacttgctgctgaccgaggatgaccaggaaactaccactcggttcctgcagaccgaagccgtgaccctgcaggacgtgagaggccgggactaccagaacgccatgcgggtgtggtccaacatccctggactgaaaagcaagcacgcacctctgacccctaaagaagaggagtacctgcaggcccaggtgcggagcagaagcaagctggacgcccctaaggtggatctgctggtgaagaattgcctcctgcccctgagagagtacttcaagtatttcagccagaatagtctgcccctgggaggcagcggcggcggcagcaaggccagcgtgaccttcgccgacctggccgtgtacttcagccaggaggagtgggagggcctgagccccatccagaaggacctgtacgaggacgtgatgctggagacctaccagaacctggtgagcgtgggcctgagctgcaggaggcccagcgtgatcaccctgctggagaagggcaaggccccctggaccgtggagcccgccaggcagaggaggggccccgacagcggcgccaagtgcggcggcccaagcagcggcgcccctcctcccagcggcggcagcccagccggctccccaacctctaccgaggagggcacctctgagtccgccacccccgagagcggccctggcacctccaccgagcccagcgagggcagcgcacccggcagccctgccggcagccccacctccacagaggagggaaccagcaccgagcccagcgaaggcagcgccccaggcaccagcaccgagcctagtgagcaggagattaaacggatcaacaagatcagaagaagacttgtgaaagacagcaacaccaagaaggccggcaagacaggccccatgaaaaccctgctggttagagtgatgacacccgatctgagagagcggctggaaaacctgagaaagaagcctgaaaatatcccccagcccatcagcaatacatctagagccaacctgaataagctgctgaccgattacaccgaaatgaagaaggcgatcctgcatgtgtactgggaagagttccagaaggaccctgtgggcctgatgagccgggtggcccagcctgccagcaagaagatcgatcagaacaagctgaaacctgagatggacgagaagggcaacctgaccaccgccggctttgcctgctctcagtgtggccagcccctgttcgtgtacaagctggagcaggtgtctgagaagggcaaggcttacaccaactacttcggacggtgcaatgtggccgagcacgaaaagctgatcctgctggcccagctgaagcccgagaaggatagcgacgaagccgtgacatatagcctgggaaagtttgggcagagggccctggatttctacagcattcatgtgaccaaggagtccacccaccccgtgaagcccctggcccagatcgccggaaacagatacgcctccggacctgtgggaaaggccctgagcgacgcatgtatgggcacaatcgcctccttcctgtctaagtaccaggacatcatcatcgaacaccagaaggtggtgaagggcaaccagaagagactggagagcctgcgggagctggccggcaaggaaaacctggaataccctagcgtgaccctgccacctcagcctcacaccaaggagggcgttgatgcctacaacgaagtgatcgcccgggtgcgaatgtgggtgaacctgaacctgtggcagaagctgaagctaagcagagatgatgccaagcctctgctgagactgaagggattcccttcctttcctctggtcgagagacaggccaacgaagtggactggtgggacatggtgtgtaacgtgaagaagctgatcaacgagaaaaaggaggatggcaaggtgttttggcagaatctggctggctacaagagacaggaagccctgagaccatacctgagcagcgaggaagatcggaagaagggaaagaaattcgctcggtaccagctgggcgacctgctgctgcacctggaaaagaagcacggcgaggactggggaaaggtgtacgacgaggcctgggagcggattgacaagaaagtggaaggcctgagcaagcacatcaagctggaagaggaacggagaagcgaggacgcccagagcaaggccgccctgaccgactggctgcgggctaaggccagcttcgtgatcgagggcctgaaggaggccgacaaggacgagttctgcagatgcgagctgaagctgcagaagtggtacggggacctgcggggaaagcccttcgccatcgaagccgagaacagcatcctggacatcagcggcttcagcaagcagtacaactgtgccttcatctggcagaaggacggcgtgaagaagctgaacctgtacctgatcatcaactacttcaagggcggcaagctgcggttcaagaagatcaaacctgaagccttcgaagccaacagattctacaccgtgatcaacaaaaagagcggcgagatcgtgcccatggaggtgaacttcaacttcgacgaccccaacctgatcatcctgcctctggcctttggcaagagacagggcagagaattcatctggaacgacctgctgtccctggaaaccggcagcctgaagctggccaacggaagagtgatcgagaagacactgtacaacagaagaacccggcaggatgagcctgccctgttcgtggccctgaccttcgagcggcgggaggtcctggactcctccaatatcaaaccaatgaacctgatcggcgtggcaagaggcgaaaacatccccgccgtgatcgccctgaccgaccccgagggctgcccactgagccggtttaaggatagcctgggaaacccaacccacatcctgagaatcggcgagagctataaggagaagcagcggaccatccaggccaagaaggaggtggagcagcggagagccggcggctacagccggaagtacgccagcaaagccaagaatctggcagacgatatggtgagaaacaccgctagagatctgctgtactacgccgtgacccaggatgccatgctgatcttcgccaacctgagccggggcttcggccggcagggcaagcggaccttcatggccgagagacagtacacacggatggaggactggctgaccgccaagctggcctacgagggcctgagcaagacctacctgtccaagacactggcccagtacacctccaagacatgcagcaactgtgggtttaccatcaccagcgccgactacgacagggtgctggagaagctgaagaagacagcaacaggctggatgaccacaattaacggcaaggagctgaaggtggagggccagattacctactacaacagatacaagagacagaacgtagtcaaggacctgtccgtcgagctggatagactgagcgaagaatctgtgaacaacgacatctcctcctggacaaagggcagaagcggagaagctctgagcctcctgaagaaaagattctcccatagacccgtgcaggagaagttcgtgtgcctgaactgcggcttcgagacacacgcagccgagcaagccgccctgaacatcgccagatcctggctgttcctgcggagccaggagtacaagaaataccagacaaacaagacaaccggcaacaccgataagagagccttcgtcgagacctggcagtccttttaccggaagaagcttaaggaggtgtggaaacctgccgtgcggtctggcggatctggcggaggctccaccagccccaagaaaaagagaaaagtctaagctgccttctgcggggcttgccttctggccatgcccttcttctctcccttgcacctgtacctcttggtctttgaataaagcctgagtaggaaggctagcaaaaaaaaaaaaaaaaaaaaaaaaaaaaaaaaaaaaaaaaaaaaaaaaaaaaaaaaaaaaaaaaaaaaaaaaaaaaaaaa

SEQ ID NO: 12349 - RNA, 5785 nt, synthetic construct
  source 1..5785: mol_type = other RNA
aggaaataagagagaaaagaagagtaagaagaaatataagagccaccatggcccctaagaagaagcgtaaagtgagccggatggaacgcctcgtctacgaggtgcggcagaagtgcagaaacatcgaggacatctgcatctcctgcggatctctgaacgtgaccctggagcacccactgttcatcggcggcatgtgccagaactgtaaaaactgttttctggagtgtgcctatcaatacgacgatgacggctaccagagctactgcaccatctgttgcggcggaagagaggtgctgatgtgtggaaataacaactgctgccggtgcttctgcgtggaatgcgtggacctgctggtgggccccggcgccgcccaggccgctattaaggaagatccttggaactgctacatgtgcggccacaagggcacatacggcctgctgagacggagagaggactggcctagcagactgcagatgttcttcgccaataaccacgaccaggagttcgacccccctaaggtgtaccctcccgtccccgccgagaagagaaagcccatccgggtcctgagcctgttcgatggcatcgccaccggtctgctggtgctgaaggacctgggcatccaggtggataggtacattgcctccgaggtgtgcgaggactccatcaccgtgggaatggtgcgtcatcagggcaagatcatgtacgtgggcgacgtgcggagcgtgacacagaagcatatccaggagtggggccctttcgacctggtgatcggcggcagcccttgcaatgacctgagcatcgtgaacccagcccggaagggcctgtacgagggaaccggcagactgttcttcgagttttacagactgctgcacgacgcccggcctaaggaaggcgacgaccggcccttcttttggctgttcgagaatgtggtggccatgggagtcagcgacaagcgggatattagccggttcctggagagcaaccccgtgatgatcgatgccaaggaagtgagcgccgcccaccgggccagatacttctggggcaatctgcctggcatgaacagacccctggccagcaccgtgaacgacaagctggagctgcaggagtgcctggagcacggccggatcgccaagttcagcaaggtgagaaccatcaccacccgaagcaacagcatcaaacaaggcaaggaccagcactttcctgtgttcatgaacgagaaggaggacatcctgtggtgtaccgagatggagagagtgttcgggttcccagtccactacacagatgtcagcaacatgtctagactggccagacagagactgctgggaagaagctggtccgtccctgtgatcagacacctgttcgcccctctgaaggagtacttcgcctgcgtgagcagcggcaacagcaacgccaacagccggggccccagcttctctagcggcctggtgccactgtccctgagagggagccacatgggccccatggagatctacaaaaccgtgagcgcctggaagcggcagcctgtgcgcgtgctgagcctgtttcggaatatcgataaagtcctgaaaagcctgggattcctggagagcggctctggctccggcggtggcaccctgaagtacgtggaggatgtgacaaacgtggtcagacgggatgtggagaagtggggccccttcgatctggtgtacggcagcacccaacccctgggcagctcttgtgaccggtgccctggctggtacatgtttcagttccaccggatcctgcagtacgccctgccgagacaggagtcccagcggccattcttttggattttcatggacaacttgctgctgaccgaggatgaccaggaaactaccactcggttcctgcagaccgaagccgtgaccctgcaggacgtgagaggccgggactaccagaacgccatgcgggtgtggtccaacatccctggactgaaaagcaagcacgcacctctgacccctaaagaagaggagtacctgcaggcccaggtgcggagcagaagcaagctggacgcccctaaggtggatctgctggtgaagaattgcctcctgcccctgagagagtacttcaagtatttcagccagaatagtctgcccctgggaggcagcggcggcggcgagagcgtggccttcgaggacgtggccgtgtacttcacccagaaccagtgggccagcctggaccccgcccagagggccctgtacagggaggtgatgctggagaactacgccaacgtggccagcctggtggccttccccttccccaagcccgccctgatcagccacctggagaagggcgaggccccctggggccccgacccctgggacgccgagatccccagcagcctgagccagggcgacgagggcggcccaagcagcggcgcccctcctcccagcggcggcagcccagccggctccccaacctctaccgaggagggcacctctgagtccgccacccccgagagcggccctggcacctccaccgagcccagcgagggcagcgcacccggcagccctgccggcagccccacctccacagaggagggaaccagcaccgagcccagcgaaggcagcgccccaggcaccagcaccgagcctagtgagcaggagattaaacggatcaacaagatcagaagaagacttgtgaaagacagcaacaccaagaaggccggcaagacaggccccatgaaaaccctgctggttagagtgatgacacccgatctgagagagcggctggaaaacctgagaaagaagcctgaaaatatcccccagcccatcagcaatacatctagagccaacctgaataagctgctgaccgattacaccgaaatgaagaaggcgatcctgcatgtgtactgggaagagttccagaaggaccctgtgggcctgatgagccgggtggcccagcctgccagcaagaagatcgatcagaacaagctgaaacctgagatggacgagaagggcaacctgaccaccgccggctttgcctgctctcagtgtggccagcccctgttcgtgtacaagctggagcaggtgtctgagaagggcaaggcttacaccaactacttcggacggtgcaatgtggccgagcacgaaaagctgatcctgctggcccagctgaagcccgagaaggatagcgacgaagccgtgacatatagcctgggaaagtttgggcagagggccctggatttctacagcattcatgtgaccaaggagtccacccaccccgtgaagcccctggcccagatcgccggaaacagatacgcctccggacctgtgggaaaggccctgagcgacgcatgtatgggcacaatcgcctccttcctgtctaagtaccaggacatcatcatcgaacaccagaaggtggtgaagggcaaccagaagagactggagagcctgcgggagctggccggcaaggaaaacctggaataccctagcgtgaccctgccacctcagcctcacaccaaggagggcgttgatgcctacaacgaagtgatcgcccgggtgcgaatgtgggtgaacctgaacctgtggcagaagctgaagctaagcagagatgatgccaagcctctgctgagactgaagggattcccttcctttcctctggtcgagagacaggccaacgaagtggactggtgggacatggtgtgtaacgtgaagaagctgatcaacgagaaaaaggaggatggcaaggtgttttggcagaatctggctggctacaagagacaggaagccctgagaccatacctgagcagcgaggaagatcggaagaagggaaagaaattcgctcggtaccagctgggcgacctgctgctgcacctggaaaagaagcacggcgaggactggggaaaggtgtacgacgaggcctgggagcggattgacaagaaagtggaaggcctgagcaagcacatcaagctggaagaggaacggagaagcgaggacgcccagagcaaggccgccctgaccgactggctgcgggctaaggccagcttcgtgatcgagggcctgaaggaggccgacaaggacgagttctgcagatgcgagctgaagctgcagaagtggtacggggacctgcggggaaagcccttcgccatcgaagccgagaacagcatcctggacatcagcggcttcagcaagcagtacaactgtgccttcatctggcagaaggacggcgtgaagaagctgaacctgtacctgatcatcaactacttcaagggcggcaagctgcggttcaagaagatcaaacctgaagccttcgaagccaacagattctacaccgtgatcaacaaaaagagcggcgagatcgtgcccatggaggtgaacttcaacttcgacgaccccaacctgatcatcctgcctctggcctttggcaagagacagggcagagaattcatctggaacgacctgctgtccctggaaaccggcagcctgaagctggccaacggaagagtgatcgagaagacactgtacaacagaagaacccggcaggatgagcctgccctgttcgtggccctgaccttcgagcggcgggaggtcctggactcctccaatatcaaaccaatgaacctgatcggcgtggcaagaggcgaaaacatccccgccgtgatcgccctgaccgaccccgagggctgcccactgagccggtttaaggatagcctgggaaacccaacccacatcctgagaatcggcgagagctataaggagaagcagcggaccatccaggccaagaaggaggtggagcagcggagagccggcggctacagccggaagtacgccagcaaagccaagaatctggcagacgatatggtgagaaacaccgctagagatctgctgtactacgccgtgacccaggatgccatgctgatcttcgccaacctgagccggggcttcggccggcagggcaagcggaccttcatggccgagagacagtacacacggatggaggactggctgaccgccaagctggcctacgagggcctgagcaagacctacctgtccaagacactggcccagtacacctccaagacatgcagcaactgtgggtttaccatcaccagcgccgactacgacagggtgctggagaagctgaagaagacagcaacaggctggatgaccacaattaacggcaaggagctgaaggtggagggccagattacctactacaacagatacaagagacagaacgtagtcaaggacctgtccgtcgagctggatagactgagcgaagaatctgtgaacaacgacatctcctcctggacaaagggcagaagcggagaagctctgagcctcctgaagaaaagattctcccatagacccgtgcaggagaagttcgtgtgcctgaactgcggcttcgagacacacgcagccgagcaagccgccctgaacatcgccagatcctggctgttcctgcggagccaggagtacaagaaataccagacaaacaagacaaccggcaacaccgataagagagccttcgtcgagacctggcagtccttttaccggaagaagcttaaggaggtgtggaaacctgccgtgcggtctggcggatctggcggaggctccaccagccccaagaaaaagagaaaagtctaagctgccttctgcggggcttgccttctggccatgcccttcttctctcccttgcacctgtacctcttggtctttgaataaagcctgagtaggaaggctagcaaaaaaaaaaaaaaaaaaaaaaaaaaaaaaaaaaaaaaaaaaaaaaaaaaaaaaaaaaaaaaaaaaaaaaaaaaaaaaaa

SEQ ID NO: 12350 - RNA, 5785 nt, synthetic construct
  source 1..5785: mol_type = other RNA
aggaaataagagagaaaagaagagtaagaagaaatataagagccaccatggcccctaagaagaagcgtaaagtgagccggatggaacgcctcgtctacgaggtgcggcagaagtgcagaaacatcgaggacatctgcatctcctgcggatctctgaacgtgaccctggagcacccactgttcatcggcggcatgtgccagaactgtaaaaactgttttctggagtgtgcctatcaatacgacgatgacggctaccagagctactgcaccatctgttgcggcggaagagaggtgctgatgtgtggaaataacaactgctgccggtgcttctgcgtggaatgcgtggacctgctggtgggccccggcgccgcccaggccgctattaaggaagatccttggaactgctacatgtgcggccacaagggcacatacggcctgctgagacggagagaggactggcctagcagactgcagatgttcttcgccaataaccacgaccaggagttcgacccccctaaggtgtaccctcccgtccccgccgagaagagaaagcccatccgggtcctgagcctgttcgatggcatcgccaccggtctgctggtgctgaaggacctgggcatccaggtggataggtacattgcctccgaggtgtgcgaggactccatcaccgtgggaatggtgcgtcatcagggcaagatcatgtacgtgggcgacgtgcggagcgtgacacagaagcatatccaggagtggggccctttcgacctggtgatcggcggcagcccttgcaatgacctgagcatcgtgaacccagcccggaagggcctgtacgagggaaccggcagactgttcttcgagttttacagactgctgcacgacgcccggcctaaggaaggcgacgaccggcccttcttttggctgttcgagaatgtggtggccatgggagtcagcgacaagcgggatattagccggttcctggagagcaaccccgtgatgatcgatgccaaggaagtgagcgccgcccaccgggccagatacttctggggcaatctgcctggcatgaacagacccctggccagcaccgtgaacgacaagctggagctgcaggagtgcctggagcacggccggatcgccaagttcagcaaggtgagaaccatcaccacccgaagcaacagcatcaaacaaggcaaggaccagcactttcctgtgttcatgaacgagaaggaggacatcctgtggtgtaccgagatggagagagtgttcgggttcccagtccactacacagatgtcagcaacatgtctagactggccagacagagactgctgggaagaagctggtccgtccctgtgatcagacacctgttcgcccctctgaaggagtacttcgcctgcgtgagcagcggcaacagcaacgccaacagccggggccccagcttctctagcggcctggtgccactgtccctgagagggagccacatgggccccatggagatctacaaaaccgtgagcgcctggaagcggcagcctgtgcgcgtgctgagcctgtttcggaatatcgataaagtcctgaaaagcctgggattcctggagagcggctctggctccggcggtggcaccctgaagtacgtggaggatgtgacaaacgtggtcagacgggatgtggagaagtggggccccttcgatctggtgtacggcagcacccaacccctgggcagctcttgtgaccggtgccctggctggtacatgtttcagttccaccggatcctgcagtacgccctgccgagacaggagtcccagcggccattcttttggattttcatggacaacttgctgctgaccgaggatgaccaggaaactaccactcggttcctgcagaccgaagccgtgaccctgcaggacgtgagaggccgggactaccagaacgccatgcgggtgtggtccaacatccctggactgaaaagcaagcacgcacctctgacccctaaagaagaggagtacctgcaggcccaggtgcggagcagaagcaagctggacgcccctaaggtggatctgctggtgaagaattgcctcctgcccctgagagagtacttcaagtatttcagccagaatagtctgcccctgggaggcagcggcggcggccccgtgaggggccccggcgaggccaggcccagcaggaagaggggcaggaggcccagggccctgaagttcgtggacgtggccgtgtacttcagcagcgaggagtggggctgcctgaggcccgcccagagggccctgtacagggacgtgatgagggagacctacggccacctgggcgccctgggctgcgccggccccaagcccgccctgatcagctggctggagaggaacaccgacgactgggagggcggcccaagcagcggcgcccctcctcccagcggcggcagcccagccggctccccaacctctaccgaggagggcacctctgagtccgccacccccgagagcggccctggcacctccaccgagcccagcgagggcagcgcacccggcagccctgccggcagccccacctccacagaggagggaaccagcaccgagcccagcgaaggcagcgccccaggcaccagcaccgagcctagtgagcaggagattaaacggatcaacaagatcagaagaagacttgtgaaagacagcaacaccaagaaggccggcaagacaggccccatgaaaaccctgctggttagagtgatgacacccgatctgagagagcggctggaaaacctgagaaagaagcctgaaaatatcccccagcccatcagcaatacatctagagccaacctgaataagctgctgaccgattacaccgaaatgaagaaggcgatcctgcatgtgtactgggaagagttccagaaggaccctgtgggcctgatgagccgggtggcccagcctgccagcaagaagatcgatcagaacaagctgaaacctgagatggacgagaagggcaacctgaccaccgccggctttgcctgctctcagtgtggccagcccctgttcgtgtacaagctggagcaggtgtctgagaagggcaaggcttacaccaactacttcggacggtgcaatgtggccgagcacgaaaagctgatcctgctggcccagctgaagcccgagaaggatagcgacgaagccgtgacatatagcctgggaaagtttgggcagagggccctggatttctacagcattcatgtgaccaaggagtccacccaccccgtgaagcccctggcccagatcgccggaaacagatacgcctccggacctgtgggaaaggccctgagcgacgcatgtatgggcacaatcgcctccttcctgtctaagtaccaggacatcatcatcgaacaccagaaggtggtgaagggcaaccagaagagactggagagcctgcgggagctggccggcaaggaaaacctggaataccctagcgtgaccctgccacctcagcctcacaccaaggagggcgttgatgcctacaacgaagtgatcgcccgggtgcgaatgtgggtgaacctgaacctgtggcagaagctgaagctaagcagagatgatgccaagcctctgctgagactgaagggattcccttcctttcctctggtcgagagacaggccaacgaagtggactggtgggacatggtgtgtaacgtgaagaagctgatcaacgagaaaaaggaggatggcaaggtgttttggcagaatctggctggctacaagagacaggaagccctgagaccatacctgagcagcgaggaagatcggaagaagggaaagaaattcgctcggtaccagctgggcgacctgctgctgcacctggaaaagaagcacggcgaggactggggaaaggtgtacgacgaggcctgggagcggattgacaagaaagtggaaggcctgagcaagcacatcaagctggaagaggaacggagaagcgaggacgcccagagcaaggccgccctgaccgactggctgcgggctaaggccagcttcgtgatcgagggcctgaaggaggccgacaaggacgagttctgcagatgcgagctgaagctgcagaagtggtacggggacctgcggggaaagcccttcgccatcgaagccgagaacagcatcctggacatcagcggcttcagcaagcagtacaactgtgccttcatctggcagaaggacggcgtgaagaagctgaacctgtacctgatcatcaactacttcaagggcggcaagctgcggttcaagaagatcaaacctgaagccttcgaagccaacagattctacaccgtgatcaacaaaaagagcggcgagatcgtgcccatggaggtgaacttcaacttcgacgaccccaacctgatcatcctgcctctggcctttggcaagagacagggcagagaattcatctggaacgacctgctgtccctggaaaccggcagcctgaagctggccaacggaagagtgatcgagaagacactgtacaacagaagaacccggcaggatgagcctgccctgttcgtggccctgaccttcgagcggcgggaggtcctggactcctccaatatcaaaccaatgaacctgatcggcgtggcaagaggcgaaaacatccccgccgtgatcgccctgaccgaccccgagggctgcccactgagccggtttaaggatagcctgggaaacccaacccacatcctgagaatcggcgagagctataaggagaagcagcggaccatccaggccaagaaggaggtggagcagcggagagccggcggctacagccggaagtacgccagcaaagccaagaatctggcagacgatatggtgagaaacaccgctagagatctgctgtactacgccgtgacccaggatgccatgctgatcttcgccaacctgagccggggcttcggccggcagggcaagcggaccttcatggccgagagacagtacacacggatggaggactggctgaccgccaagctggcctacgagggcctgagcaagacctacctgtccaagacactggcccagtacacctccaagacatgcagcaactgtgggtttaccatcaccagcgccgactacgacagggtgctggagaagctgaagaagacagcaacaggctggatgaccacaattaacggcaaggagctgaaggtggagggccagattacctactacaacagatacaagagacagaacgtagtcaaggacctgtccgtcgagctggatagactgagcgaagaatctgtgaacaacgacatctcctcctggacaaagggcagaagcggagaagctctgagcctcctgaagaaaagattctcccatagacccgtgcaggagaagttcgtgtgcctgaactgcggcttcgagacacacgcagccgagcaagccgccctgaacatcgccagatcctggctgttcctgcggagccaggagtacaagaaataccagacaaacaagacaaccggcaacaccgataagagagccttcgtcgagacctggcagtccttttaccggaagaagcttaaggaggtgtggaaacctgccgtgcggtctggcggatctggcggaggctccaccagccccaagaaaaagagaaaagtctaagctgccttctgcggggcttgccttctggccatgcccttcttctctcccttgcacctgtacctcttggtctttgaataaagcctgagtaggaaggctagcaaaaaaaaaaaaaaaaaaaaaaaaaaaaaaaaaaaaaaaaaaaaaaaaaaaaaaaaaaaaaaaaaaaaaaaaaaaaaaaa

SEQ ID NO: 12351 - RNA, 5785 nt, synthetic construct
  source 1..5785: mol_type = other RNA
aggaaataagagagaaaagaagagtaagaagaaatataagagccaccatggcccctaagaagaagcgtaaagtgagccggatggaacgcctcgtctacgaggtgcggcagaagtgcagaaacatcgaggacatctgcatctcctgcggatctctgaacgtgaccctggagcacccactgttcatcggcggcatgtgccagaactgtaaaaactgttttctggagtgtgcctatcaatacgacgatgacggctaccagagctactgcaccatctgttgcggcggaagagaggtgctgatgtgtggaaataacaactgctgccggtgcttctgcgtggaatgcgtggacctgctggtgggccccggcgccgcccaggccgctattaaggaagatccttggaactgctacatgtgcggccacaagggcacatacggcctgctgagacggagagaggactggcctagcagactgcagatgttcttcgccaataaccacgaccaggagttcgacccccctaaggtgtaccctcccgtccccgccgagaagagaaagcccatccgggtcctgagcctgttcgatggcatcgccaccggtctgctggtgctgaaggacctgggcatccaggtggataggtacattgcctccgaggtgtgcgaggactccatcaccgtgggaatggtgcgtcatcagggcaagatcatgtacgtgggcgacgtgcggagcgtgacacagaagcatatccaggagtggggccctttcgacctggtgatcggcggcagcccttgcaatgacctgagcatcgtgaacccagcccggaagggcctgtacgagggaaccggcagactgttcttcgagttttacagactgctgcacgacgcccggcctaaggaaggcgacgaccggcccttcttttggctgttcgagaatgtggtggccatgggagtcagcgacaagcgggatattagccggttcctggagagcaaccccgtgatgatcgatgccaaggaagtgagcgccgcccaccgggccagatacttctggggcaatctgcctggcatgaacagacccctggccagcaccgtgaacgacaagctggagctgcaggagtgcctggagcacggccggatcgccaagttcagcaaggtgagaaccatcaccacccgaagcaacagcatcaaacaaggcaaggaccagcactttcctgtgttcatgaacgagaaggaggacatcctgtggtgtaccgagatggagagagtgttcgggttcccagtccactacacagatgtcagcaacatgtctagactggccagacagagactgctgggaagaagctggtccgtccctgtgatcagacacctgttcgcccctctgaaggagtacttcgcctgcgtgagcagcggcaacagcaacgccaacagccggggccccagcttctctagcggcctggtgccactgtccctgagagggagccacatgggccccatggagatctacaaaaccgtgagcgcctggaagcggcagcctgtgcgcgtgctgagcctgtttcggaatatcgataaagtcctgaaaagcctgggattcctggagagcggctctggctccggcggtggcaccctgaagtacgtggaggatgtgacaaacgtggtcagacgggatgtggagaagtggggccccttcgatctggtgtacggcagcacccaacccctgggcagctcttgtgaccggtgccctggctggtacatgtttcagttccaccggatcctgcagtacgccctgccgagacaggagtcccagcggccattcttttggattttcatggacaacttgctgctgaccgaggatgaccaggaaactaccactcggttcctgcagaccgaagccgtgaccctgcaggacgtgagaggccgggactaccagaacgccatgcgggtgtggtccaacatccctggactgaaaagcaagcacgcacctctgacccctaaagaagaggagtacctgcaggcccaggtgcggagcagaagcaagctggacgcccctaaggtggatctgctggtgaagaattgcctcctgcccctgagagagtacttcaagtatttcagccagaatagtctgcccctgggaggcagcggcggcggcagcaaggcccccatcaccttcggcgacctggccatctacttcagccaggaggagtgggagtggctgagccccatccagaaggacctgtacgaggacgtgatgctggagaactacaggaacctggtgagcctgggcctgagcttcaggaggcccaacgtgatcaccctgctggagaagggcaaggccccctggatggtggagcccgccaggaggaggaggggccccgagctgaccgaggccagcggcggcccaagcagcggcgcccctcctcccagcggcggcagcccagccggctccccaacctctaccgaggagggcacctctgagtccgccacccccgagagcggccctggcacctccaccgagcccagcgagggcagcgcacccggcagccctgccggcagccccacctccacagaggagggaaccagcaccgagcccagcgaaggcagcgccccaggcaccagcaccgagcctagtgagcaggagattaaacggatcaacaagatcagaagaagacttgtgaaagacagcaacaccaagaaggccggcaagacaggccccatgaaaaccctgctggttagagtgatgacacccgatctgagagagcggctggaaaacctgagaaagaagcctgaaaatatcccccagcccatcagcaatacatctagagccaacctgaataagctgctgaccgattacaccgaaatgaagaaggcgatcctgcatgtgtactgggaagagttccagaaggaccctgtgggcctgatgagccgggtggcccagcctgccagcaagaagatcgatcagaacaagctgaaacctgagatggacgagaagggcaacctgaccaccgccggctttgcctgctctcagtgtggccagcccctgttcgtgtacaagctggagcaggtgtctgagaagggcaaggcttacaccaactacttcggacggtgcaatgtggccgagcacgaaaagctgatcctgctggcccagctgaagcccgagaaggatagcgacgaagccgtgacatatagcctgggaaagtttgggcagagggccctggatttctacagcattcatgtgaccaaggagtccacccaccccgtgaagcccctggcccagatcgccggaaacagatacgcctccggacctgtgggaaaggccctgagcgacgcatgtatgggcacaatcgcctccttcctgtctaagtaccaggacatcatcatcgaacaccagaaggtggtgaagggcaaccagaagagactggagagcctgcgggagctggccggcaaggaaaacctggaataccctagcgtgaccctgccacctcagcctcacaccaaggagggcgttgatgcctacaacgaagtgatcgcccgggtgcgaatgtgggtgaacctgaacctgtggcagaagctgaagctaagcagagatgatgccaagcctctgctgagactgaagggattcccttcctttcctctggtcgagagacaggccaacgaagtggactggtgggacatggtgtgtaacgtgaagaagctgatcaacgagaaaaaggaggatggcaaggtgttttggcagaatctggctggctacaagagacaggaagccctgagaccatacctgagcagcgaggaagatcggaagaagggaaagaaattcgctcggtaccagctgggcgacctgctgctgcacctggaaaagaagcacggcgaggactggggaaaggtgtacgacgaggcctgggagcggattgacaagaaagtggaaggcctgagcaagcacatcaagctggaagaggaacggagaagcgaggacgcccagagcaaggccgccctgaccgactggctgcgggctaaggccagcttcgtgatcgagggcctgaaggaggccgacaaggacgagttctgcagatgcgagctgaagctgcagaagtggtacggggacctgcggggaaagcccttcgccatcgaagccgagaacagcatcctggacatcagcggcttcagcaagcagtacaactgtgccttcatctggcagaaggacggcgtgaagaagctgaacctgtacctgatcatcaactacttcaagggcggcaagctgcggttcaagaagatcaaacctgaagccttcgaagccaacagattctacaccgtgatcaacaaaaagagcggcgagatcgtgcccatggaggtgaacttcaacttcgacgaccccaacctgatcatcctgcctctggcctttggcaagagacagggcagagaattcatctggaacgacctgctgtccctggaaaccggcagcctgaagctggccaacggaagagtgatcgagaagacactgtacaacagaagaacccggcaggatgagcctgccctgttcgtggccctgaccttcgagcggcgggaggtcctggactcctccaatatcaaaccaatgaacctgatcggcgtggcaagaggcgaaaacatccccgccgtgatcgccctgaccgaccccgagggctgcccactgagccggtttaaggatagcctgggaaacccaacccacatcctgagaatcggcgagagctataaggagaagcagcggaccatccaggccaagaaggaggtggagcagcggagagccggcggctacagccggaagtacgccagcaaagccaagaatctggcagacgatatggtgagaaacaccgctagagatctgctgtactacgccgtgacccaggatgccatgctgatcttcgccaacctgagccggggcttcggccggcagggcaagcggaccttcatggccgagagacagtacacacggatggaggactggctgaccgccaagctggcctacgagggcctgagcaagacctacctgtccaagacactggcccagtacacctccaagacatgcagcaactgtgggtttaccatcaccagcgccgactacgacagggtgctggagaagctgaagaagacagcaacaggctggatgaccacaattaacggcaaggagctgaaggtggagggccagattacctactacaacagatacaagagacagaacgtagtcaaggacctgtccgtcgagctggatagactgagcgaagaatctgtgaacaacgacatctcctcctggacaaagggcagaagcggagaagctctgagcctcctgaagaaaagattctcccatagacccgtgcaggagaagttcgtgtgcctgaactgcggcttcgagacacacgcagccgagcaagccgccctgaacatcgccagatcctggctgttcctgcggagccaggagtacaagaaataccagacaaacaagacaaccggcaacaccgataagagagccttcgtcgagacctggcagtccttttaccggaagaagcttaaggaggtgtggaaacctgccgtgcggtctggcggatctggcggaggctccaccagccccaagaaaaagagaaaagtctaagctgccttctgcggggcttgccttctggccatgcccttcttctctcccttgcacctgtacctcttggtctttgaataaagcctgagtaggaaggctagcaaaaaaaaaaaaaaaaaaaaaaaaaaaaaaaaaaaaaaaaaaaaaaaaaaaaaaaaaaaaaaaaaaaaaaaaaaaaaaaa

SEQ ID NO: 12352 - RNA, 5785 nt, synthetic construct
  source 1..5785: mol_type = other RNA
aggaaataagagagaaaagaagagtaagaagaaatataagagccaccatggcccctaagaagaagcgtaaagtgagccggatggaacgcctcgtctacgaggtgcggcagaagtgcagaaacatcgaggacatctgcatctcctgcggatctctgaacgtgaccctggagcacccactgttcatcggcggcatgtgccagaactgtaaaaactgttttctggagtgtgcctatcaatacgacgatgacggctaccagagctactgcaccatctgttgcggcggaagagaggtgctgatgtgtggaaataacaactgctgccggtgcttctgcgtggaatgcgtggacctgctggtgggccccggcgccgcccaggccgctattaaggaagatccttggaactgctacatgtgcggccacaagggcacatacggcctgctgagacggagagaggactggcctagcagactgcagatgttcttcgccaataaccacgaccaggagttcgacccccctaaggtgtaccctcccgtccccgccgagaagagaaagcccatccgggtcctgagcctgttcgatggcatcgccaccggtctgctggtgctgaaggacctgggcatccaggtggataggtacattgcctccgaggtgtgcgaggactccatcaccgtgggaatggtgcgtcatcagggcaagatcatgtacgtgggcgacgtgcggagcgtgacacagaagcatatccaggagtggggccctttcgacctggtgatcggcggcagcccttgcaatgacctgagcatcgtgaacccagcccggaagggcctgtacgagggaaccggcagactgttcttcgagttttacagactgctgcacgacgcccggcctaaggaaggcgacgaccggcccttcttttggctgttcgagaatgtggtggccatgggagtcagcgacaagcgggatattagccggttcctggagagcaaccccgtgatgatcgatgccaaggaagtgagcgccgcccaccgggccagatacttctggggcaatctgcctggcatgaacagacccctggccagcaccgtgaacgacaagctggagctgcaggagtgcctggagcacggccggatcgccaagttcagcaaggtgagaaccatcaccacccgaagcaacagcatcaaacaaggcaaggaccagcactttcctgtgttcatgaacgagaaggaggacatcctgtggtgtaccgagatggagagagtgttcgggttcccagtccactacacagatgtcagcaacatgtctagactggccagacagagactgctgggaagaagctggtccgtccctgtgatcagacacctgttcgcccctctgaaggagtacttcgcctgcgtgagcagcggcaacagcaacgccaacagccggggccccagcttctctagcggcctggtgccactgtccctgagagggagccacatgggccccatggagatctacaaaaccgtgagcgcctggaagcggcagcctgtgcgcgtgctgagcctgtttcggaatatcgataaagtcctgaaaagcctgggattcctggagagcggctctggctccggcggtggcaccctgaagtacgtggaggatgtgacaaacgtggtcagacgggatgtggagaagtggggccccttcgatctggtgtacggcagcacccaacccctgggcagctcttgtgaccggtgccctggctggtacatgtttcagttccaccggatcctgcagtacgccctgccgagacaggagtcccagcggccattcttttggattttcatggacaacttgctgctgaccgaggatgaccaggaaactaccactcggttcctgcagaccgaagccgtgaccctgcaggacgtgagaggccgggactaccagaacgccatgcgggtgtggtccaacatccctggactgaaaagcaagcacgcacctctgacccctaaagaagaggagtacctgcaggcccaggtgcggagcagaagcaagctggacgcccctaaggtggatctgctggtgaagaattgcctcctgcccctgagagagtacttcaagtatttcagccagaatagtctgcccctgggaggcagcggcggcggcaggcccggcgccgtgagcttcgccgacgtggccgtgtacttcagccccgaggagtggggctgcctgaggcccgcccagagggccctgtacaggaacgtgatgagggagacctacggccacctgggcgccctgggcttcgccggccccaagcccgccctgatcagctggctggagaggaagaaggaggtgtggagccccgaggccgaggaccccgaggccggcgccaggcaccccggcagcggcggcggcccaagcagcggcgcccctcctcccagcggcggcagcccagccggctccccaacctctaccgaggagggcacctctgagtccgccacccccgagagcggccctggcacctccaccgagcccagcgagggcagcgcacccggcagccctgccggcagccccacctccacagaggagggaaccagcaccgagcccagcgaaggcagcgccccaggcaccagcaccgagcctagtgagcaggagattaaacggatcaacaagatcagaagaagacttgtgaaagacagcaacaccaagaaggccggcaagacaggccccatgaaaaccctgctggttagagtgatgacacccgatctgagagagcggctggaaaacctgagaaagaagcctgaaaatatcccccagcccatcagcaatacatctagagccaacctgaataagctgctgaccgattacaccgaaatgaagaaggcgatcctgcatgtgtactgggaagagttccagaaggaccctgtgggcctgatgagccgggtggcccagcctgccagcaagaagatcgatcagaacaagctgaaacctgagatggacgagaagggcaacctgaccaccgccggctttgcctgctctcagtgtggccagcccctgttcgtgtacaagctggagcaggtgtctgagaagggcaaggcttacaccaactacttcggacggtgcaatgtggccgagcacgaaaagctgatcctgctggcccagctgaagcccgagaaggatagcgacgaagccgtgacatatagcctgggaaagtttgggcagagggccctggatttctacagcattcatgtgaccaaggagtccacccaccccgtgaagcccctggcccagatcgccggaaacagatacgcctccggacctgtgggaaaggccctgagcgacgcatgtatgggcacaatcgcctccttcctgtctaagtaccaggacatcatcatcgaacaccagaaggtggtgaagggcaaccagaagagactggagagcctgcgggagctggccggcaaggaaaacctggaataccctagcgtgaccctgccacctcagcctcacaccaaggagggcgttgatgcctacaacgaagtgatcgcccgggtgcgaatgtgggtgaacctgaacctgtggcagaagctgaagctaagcagagatgatgccaagcctctgctgagactgaagggattcccttcctttcctctggtcgagagacaggccaacgaagtggactggtgggacatggtgtgtaacgtgaagaagctgatcaacgagaaaaaggaggatggcaaggtgttttggcagaatctggctggctacaagagacaggaagccctgagaccatacctgagcagcgaggaagatcggaagaagggaaagaaattcgctcggtaccagctgggcgacctgctgctgcacctggaaaagaagcacggcgaggactggggaaaggtgtacgacgaggcctgggagcggattgacaagaaagtggaaggcctgagcaagcacatcaagctggaagaggaacggagaagcgaggacgcccagagcaaggccgccctgaccgactggctgcgggctaaggccagcttcgtgatcgagggcctgaaggaggccgacaaggacgagttctgcagatgcgagctgaagctgcagaagtggtacggggacctgcggggaaagcccttcgccatcgaagccgagaacagcatcctggacatcagcggcttcagcaagcagtacaactgtgccttcatctggcagaaggacggcgtgaagaagctgaacctgtacctgatcatcaactacttcaagggcggcaagctgcggttcaagaagatcaaacctgaagccttcgaagccaacagattctacaccgtgatcaacaaaaagagcggcgagatcgtgcccatggaggtgaacttcaacttcgacgaccccaacctgatcatcctgcctctggcctttggcaagagacagggcagagaattcatctggaacgacctgctgtccctggaaaccggcagcctgaagctggccaacggaagagtgatcgagaagacactgtacaacagaagaacccggcaggatgagcctgccctgttcgtggccctgaccttcgagcggcgggaggtcctggactcctccaatatcaaaccaatgaacctgatcggcgtggcaagaggcgaaaacatccccgccgtgatcgccctgaccgaccccgagggctgcccactgagccggtttaaggatagcctgggaaacccaacccacatcctgagaatcggcgagagctataaggagaagcagcggaccatccaggccaagaaggaggtggagcagcggagagccggcggctacagccggaagtacgccagcaaagccaagaatctggcagacgatatggtgagaaacaccgctagagatctgctgtactacgccgtgacccaggatgccatgctgatcttcgccaacctgagccggggcttcggccggcagggcaagcggaccttcatggccgagagacagtacacacggatggaggactggctgaccgccaagctggcctacgagggcctgagcaagacctacctgtccaagacactggcccagtacacctccaagacatgcagcaactgtgggtttaccatcaccagcgccgactacgacagggtgctggagaagctgaagaagacagcaacaggctggatgaccacaattaacggcaaggagctgaaggtggagggccagattacctactacaacagatacaagagacagaacgtagtcaaggacctgtccgtcgagctggatagactgagcgaagaatctgtgaacaacgacatctcctcctggacaaagggcagaagcggagaagctctgagcctcctgaagaaaagattctcccatagacccgtgcaggagaagttcgtgtgcctgaactgcggcttcgagacacacgcagccgagcaagccgccctgaacatcgccagatcctggctgttcctgcggagccaggagtacaagaaataccagacaaacaagacaaccggcaacaccgataagagagccttcgtcgagacctggcagtccttttaccggaagaagcttaaggaggtgtggaaacctgccgtgcggtctggcggatctggcggaggctccaccagccccaagaaaaagagaaaagtctaagctgccttctgcggggcttgccttctggccatgcccttcttctctcccttgcacctgtacctcttggtctttgaataaagcctgagtaggaaggctagcaaaaaaaaaaaaaaaaaaaaaaaaaaaaaaaaaaaaaaaaaaaaaaaaaaaaaaaaaaaaaaaaaaaaaaaaaaaaaaaa

SEQ ID NO: 12353 - RNA, 5785 nt, synthetic construct
  source 1..5785: mol_type = other RNA
aggaaataagagagaaaagaagagtaagaagaaatataagagccaccatggcccctaagaagaagcgtaaagtgagccggatggaacgcctcgtctacgaggtgcggcagaagtgcagaaacatcgaggacatctgcatctcctgcggatctctgaacgtgaccctggagcacccactgttcatcggcggcatgtgccagaactgtaaaaactgttttctggagtgtgcctatcaatacgacgatgacggctaccagagctactgcaccatctgttgcggcggaagagaggtgctgatgtgtggaaataacaactgctgccggtgcttctgcgtggaatgcgtggacctgctggtgggccccggcgccgcccaggccgctattaaggaagatccttggaactgctacatgtgcggccacaagggcacatacggcctgctgagacggagagaggactggcctagcagactgcagatgttcttcgccaataaccacgaccaggagttcgacccccctaaggtgtaccctcccgtccccgccgagaagagaaagcccatccgggtcctgagcctgttcgatggcatcgccaccggtctgctggtgctgaaggacctgggcatccaggtggataggtacattgcctccgaggtgtgcgaggactccatcaccgtgggaatggtgcgtcatcagggcaagatcatgtacgtgggcgacgtgcggagcgtgacacagaagcatatccaggagtggggccctttcgacctggtgatcggcggcagcccttgcaatgacctgagcatcgtgaacccagcccggaagggcctgtacgagggaaccggcagactgttcttcgagttttacagactgctgcacgacgcccggcctaaggaaggcgacgaccggcccttcttttggctgttcgagaatgtggtggccatgggagtcagcgacaagcgggatattagccggttcctggagagcaaccccgtgatgatcgatgccaaggaagtgagcgccgcccaccgggccagatacttctggggcaatctgcctggcatgaacagacccctggccagcaccgtgaacgacaagctggagctgcaggagtgcctggagcacggccggatcgccaagttcagcaaggtgagaaccatcaccacccgaagcaacagcatcaaacaaggcaaggaccagcactttcctgtgttcatgaacgagaaggaggacatcctgtggtgtaccgagatggagagagtgttcgggttcccagtccactacacagatgtcagcaacatgtctagactggccagacagagactgctgggaagaagctggtccgtccctgtgatcagacacctgttcgcccctctgaaggagtacttcgcctgcgtgagcagcggcaacagcaacgccaacagccggggccccagcttctctagcggcctggtgccactgtccctgagagggagccacatgggccccatggagatctacaaaaccgtgagcgcctggaagcggcagcctgtgcgcgtgctgagcctgtttcggaatatcgataaagtcctgaaaagcctgggattcctggagagcggctctggctccggcggtggcaccctgaagtacgtggaggatgtgacaaacgtggtcagacgggatgtggagaagtggggccccttcgatctggtgtacggcagcacccaacccctgggcagctcttgtgaccggtgccctggctggtacatgtttcagttccaccggatcctgcagtacgccctgccgagacaggagtcccagcggccattcttttggattttcatggacaacttgctgctgaccgaggatgaccaggaaactaccactcggttcctgcagaccgaagccgtgaccctgcaggacgtgagaggccgggactaccagaacgccatgcgggtgtggtccaacatccctggactgaaaagcaagcacgcacctctgacccctaaagaagaggagtacctgcaggcccaggtgcggagcagaagcaagctggacgcccctaaggtggatctgctggtgaagaattgcctcctgcccctgagagagtacttcaagtatttcagccagaatagtctgcccctgggaggcagcggcggcggcagcaaggcccccatcaccttcggcgacctggccatctacttcagccaggaggagtgggagtggctgagccccatccagaaggacctgtacgaggacgtgatgctggagaactacaggaacctggtgagcctgggcctgagcttcaggaggcccaacgtgatcaccctgctggagaagggcaaggccccctggatggtggagcccgtgaggaggaggcaggcccccgacagcggcagcaagtgcggcggcccaagcagcggcgcccctcctcccagcggcggcagcccagccggctccccaacctctaccgaggagggcacctctgagtccgccacccccgagagcggccctggcacctccaccgagcccagcgagggcagcgcacccggcagccctgccggcagccccacctccacagaggagggaaccagcaccgagcccagcgaaggcagcgccccaggcaccagcaccgagcctagtgagcaggagattaaacggatcaacaagatcagaagaagacttgtgaaagacagcaacaccaagaaggccggcaagacaggccccatgaaaaccctgctggttagagtgatgacacccgatctgagagagcggctggaaaacctgagaaagaagcctgaaaatatcccccagcccatcagcaatacatctagagccaacctgaataagctgctgaccgattacaccgaaatgaagaaggcgatcctgcatgtgtactgggaagagttccagaaggaccctgtgggcctgatgagccgggtggcccagcctgccagcaagaagatcgatcagaacaagctgaaacctgagatggacgagaagggcaacctgaccaccgccggctttgcctgctctcagtgtggccagcccctgttcgtgtacaagctggagcaggtgtctgagaagggcaaggcttacaccaactacttcggacggtgcaatgtggccgagcacgaaaagctgatcctgctggcccagctgaagcccgagaaggatagcgacgaagccgtgacatatagcctgggaaagtttgggcagagggccctggatttctacagcattcatgtgaccaaggagtccacccaccccgtgaagcccctggcccagatcgccggaaacagatacgcctccggacctgtgggaaaggccctgagcgacgcatgtatgggcacaatcgcctccttcctgtctaagtaccaggacatcatcatcgaacaccagaaggtggtgaagggcaaccagaagagactggagagcctgcgggagctggccggcaaggaaaacctggaataccctagcgtgaccctgccacctcagcctcacaccaaggagggcgttgatgcctacaacgaagtgatcgcccgggtgcgaatgtgggtgaacctgaacctgtggcagaagctgaagctaagcagagatgatgccaagcctctgctgagactgaagggattcccttcctttcctctggtcgagagacaggccaacgaagtggactggtgggacatggtgtgtaacgtgaagaagctgatcaacgagaaaaaggaggatggcaaggtgttttggcagaatctggctggctacaagagacaggaagccctgagaccatacctgagcagcgaggaagatcggaagaagggaaagaaattcgctcggtaccagctgggcgacctgctgctgcacctggaaaagaagcacggcgaggactggggaaaggtgtacgacgaggcctgggagcggattgacaagaaagtggaaggcctgagcaagcacatcaagctggaagaggaacggagaagcgaggacgcccagagcaaggccgccctgaccgactggctgcgggctaaggccagcttcgtgatcgagggcctgaaggaggccgacaaggacgagttctgcagatgcgagctgaagctgcagaagtggtacggggacctgcggggaaagcccttcgccatcgaagccgagaacagcatcctggacatcagcggcttcagcaagcagtacaactgtgccttcatctggcagaaggacggcgtgaagaagctgaacctgtacctgatcatcaactacttcaagggcggcaagctgcggttcaagaagatcaaacctgaagccttcgaagccaacagattctacaccgtgatcaacaaaaagagcggcgagatcgtgcccatggaggtgaacttcaacttcgacgaccccaacctgatcatcctgcctctggcctttggcaagagacagggcagagaattcatctggaacgacctgctgtccctggaaaccggcagcctgaagctggccaacggaagagtgatcgagaagacactgtacaacagaagaacccggcaggatgagcctgccctgttcgtggccctgaccttcgagcggcgggaggtcctggactcctccaatatcaaaccaatgaacctgatcggcgtggcaagaggcgaaaacatccccgccgtgatcgccctgaccgaccccgagggctgcccactgagccggtttaaggatagcctgggaaacccaacccacatcctgagaatcggcgagagctataaggagaagcagcggaccatccaggccaagaaggaggtggagcagcggagagccggcggctacagccggaagtacgccagcaaagccaagaatctggcagacgatatggtgagaaacaccgctagagatctgctgtactacgccgtgacccaggatgccatgctgatcttcgccaacctgagccggggcttcggccggcagggcaagcggaccttcatggccgagagacagtacacacggatggaggactggctgaccgccaagctggcctacgagggcctgagcaagacctacctgtccaagacactggcccagtacacctccaagacatgcagcaactgtgggtttaccatcaccagcgccgactacgacagggtgctggagaagctgaagaagacagcaacaggctggatgaccacaattaacggcaaggagctgaaggtggagggccagattacctactacaacagatacaagagacagaacgtagtcaaggacctgtccgtcgagctggatagactgagcgaagaatctgtgaacaacgacatctcctcctggacaaagggcagaagcggagaagctctgagcctcctgaagaaaagattctcccatagacccgtgcaggagaagttcgtgtgcctgaactgcggcttcgagacacacgcagccgagcaagccgccctgaacatcgccagatcctggctgttcctgcggagccaggagtacaagaaataccagacaaacaagacaaccggcaacaccgataagagagccttcgtcgagacctggcagtccttttaccggaagaagcttaaggaggtgtggaaacctgccgtgcggtctggcggatctggcggaggctccaccagccccaagaaaaagagaaaagtctaagctgccttctgcggggcttgccttctggccatgcccttcttctctcccttgcacctgtacctcttggtctttgaataaagcctgagtaggaaggctagcaaaaaaaaaaaaaaaaaaaaaaaaaaaaaaaaaaaaaaaaaaaaaaaaaaaaaaaaaaaaaaaaaaaaaaaaaaaaaaaa

SEQ ID NO: 12354 - RNA, 5785 nt, synthetic construct
  source 1..5785: mol_type = other RNA
aggaaataagagagaaaagaagagtaagaagaaatataagagccaccatggcccctaagaagaagcgtaaagtgagccggatggaacgcctcgtctacgaggtgcggcagaagtgcagaaacatcgaggacatctgcatctcctgcggatctctgaacgtgaccctggagcacccactgttcatcggcggcatgtgccagaactgtaaaaactgttttctggagtgtgcctatcaatacgacgatgacggctaccagagctactgcaccatctgttgcggcggaagagaggtgctgatgtgtggaaataacaactgctgccggtgcttctgcgtggaatgcgtggacctgctggtgggccccggcgccgcccaggccgctattaaggaagatccttggaactgctacatgtgcggccacaagggcacatacggcctgctgagacggagagaggactggcctagcagactgcagatgttcttcgccaataaccacgaccaggagttcgacccccctaaggtgtaccctcccgtccccgccgagaagagaaagcccatccgggtcctgagcctgttcgatggcatcgccaccggtctgctggtgctgaaggacctgggcatccaggtggataggtacattgcctccgaggtgtgcgaggactccatcaccgtgggaatggtgcgtcatcagggcaagatcatgtacgtgggcgacgtgcggagcgtgacacagaagcatatccaggagtggggccctttcgacctggtgatcggcggcagcccttgcaatgacctgagcatcgtgaacccagcccggaagggcctgtacgagggaaccggcagactgttcttcgagttttacagactgctgcacgacgcccggcctaaggaaggcgacgaccggcccttcttttggctgttcgagaatgtggtggccatgggagtcagcgacaagcgggatattagccggttcctggagagcaaccccgtgatgatcgatgccaaggaagtgagcgccgcccaccgggccagatacttctggggcaatctgcctggcatgaacagacccctggccagcaccgtgaacgacaagctggagctgcaggagtgcctggagcacggccggatcgccaagttcagcaaggtgagaaccatcaccacccgaagcaacagcatcaaacaaggcaaggaccagcactttcctgtgttcatgaacgagaaggaggacatcctgtggtgtaccgagatggagagagtgttcgggttcccagtccactacacagatgtcagcaacatgtctagactggccagacagagactgctgggaagaagctggtccgtccctgtgatcagacacctgttcgcccctctgaaggagtacttcgcctgcgtgagcagcggcaacagcaacgccaacagccggggccccagcttctctagcggcctggtgccactgtccctgagagggagccacatgggccccatggagatctacaaaaccgtgagcgcctggaagcggcagcctgtgcgcgtgctgagcctgtttcggaatatcgataaagtcctgaaaagcctgggattcctggagagcggctctggctccggcggtggcaccctgaagtacgtggaggatgtgacaaacgtggtcagacgggatgtggagaagtggggccccttcgatctggtgtacggcagcacccaacccctgggcagctcttgtgaccggtgccctggctggtacatgtttcagttccaccggatcctgcagtacgccctgccgagacaggagtcccagcggccattcttttggattttcatggacaacttgctgctgaccgaggatgaccaggaaactaccactcggttcctgcagaccgaagccgtgaccctgcaggacgtgagaggccgggactaccagaacgccatgcgggtgtggtccaacatccctggactgaaaagcaagcacgcacctctgacccctaaagaagaggagtacctgcaggcccaggtgcggagcagaagcaagctggacgcccctaaggtggatctgctggtgaagaattgcctcctgcccctgagagagtacttcaagtatttcagccagaatagtctgcccctgggaggcagcggcggcggcatggtgaccttcgaggacgtggccgtgcacttcaccaagaccgagtggaccggcctgagccccgcccagagggccctgtacaggagcgtgatgctggagaacttcggcaacctgaccgccctgggctaccccgtgcccaagcccgccctgatcagcctgctggagggcggcgacatggcctggggcctggaggcccaggacgacccccccgccgagaggaccaagaacgtgtgcaaggtgatcggcggcccaagcagcggcgcccctcctcccagcggcggcagcccagccggctccccaacctctaccgaggagggcacctctgagtccgccacccccgagagcggccctggcacctccaccgagcccagcgagggcagcgcacccggcagccctgccggcagccccacctccacagaggagggaaccagcaccgagcccagcgaaggcagcgccccaggcaccagcaccgagcctagtgagcaggagattaaacggatcaacaagatcagaagaagacttgtgaaagacagcaacaccaagaaggccggcaagacaggccccatgaaaaccctgctggttagagtgatgacacccgatctgagagagcggctggaaaacctgagaaagaagcctgaaaatatcccccagcccatcagcaatacatctagagccaacctgaataagctgctgaccgattacaccgaaatgaagaaggcgatcctgcatgtgtactgggaagagttccagaaggaccctgtgggcctgatgagccgggtggcccagcctgccagcaagaagatcgatcagaacaagctgaaacctgagatggacgagaagggcaacctgaccaccgccggctttgcctgctctcagtgtggccagcccctgttcgtgtacaagctggagcaggtgtctgagaagggcaaggcttacaccaactacttcggacggtgcaatgtggccgagcacgaaaagctgatcctgctggcccagctgaagcccgagaaggatagcgacgaagccgtgacatatagcctgggaaagtttgggcagagggccctggatttctacagcattcatgtgaccaaggagtccacccaccccgtgaagcccctggcccagatcgccggaaacagatacgcctccggacctgtgggaaaggccctgagcgacgcatgtatgggcacaatcgcctccttcctgtctaagtaccaggacatcatcatcgaacaccagaaggtggtgaagggcaaccagaagagactggagagcctgcgggagctggccggcaaggaaaacctggaataccctagcgtgaccctgccacctcagcctcacaccaaggagggcgttgatgcctacaacgaagtgatcgcccgggtgcgaatgtgggtgaacctgaacctgtggcagaagctgaagctaagcagagatgatgccaagcctctgctgagactgaagggattcccttcctttcctctggtcgagagacaggccaacgaagtggactggtgggacatggtgtgtaacgtgaagaagctgatcaacgagaaaaaggaggatggcaaggtgttttggcagaatctggctggctacaagagacaggaagccctgagaccatacctgagcagcgaggaagatcggaagaagggaaagaaattcgctcggtaccagctgggcgacctgctgctgcacctggaaaagaagcacggcgaggactggggaaaggtgtacgacgaggcctgggagcggattgacaagaaagtggaaggcctgagcaagcacatcaagctggaagaggaacggagaagcgaggacgcccagagcaaggccgccctgaccgactggctgcgggctaaggccagcttcgtgatcgagggcctgaaggaggccgacaaggacgagttctgcagatgcgagctgaagctgcagaagtggtacggggacctgcggggaaagcccttcgccatcgaagccgagaacagcatcctggacatcagcggcttcagcaagcagtacaactgtgccttcatctggcagaaggacggcgtgaagaagctgaacctgtacctgatcatcaactacttcaagggcggcaagctgcggttcaagaagatcaaacctgaagccttcgaagccaacagattctacaccgtgatcaacaaaaagagcggcgagatcgtgcccatggaggtgaacttcaacttcgacgaccccaacctgatcatcctgcctctggcctttggcaagagacagggcagagaattcatctggaacgacctgctgtccctggaaaccggcagcctgaagctggccaacggaagagtgatcgagaagacactgtacaacagaagaacccggcaggatgagcctgccctgttcgtggccctgaccttcgagcggcgggaggtcctggactcctccaatatcaaaccaatgaacctgatcggcgtggcaagaggcgaaaacatccccgccgtgatcgccctgaccgaccccgagggctgcccactgagccggtttaaggatagcctgggaaacccaacccacatcctgagaatcggcgagagctataaggagaagcagcggaccatccaggccaagaaggaggtggagcagcggagagccggcggctacagccggaagtacgccagcaaagccaagaatctggcagacgatatggtgagaaacaccgctagagatctgctgtactacgccgtgacccaggatgccatgctgatcttcgccaacctgagccggggcttcggccggcagggcaagcggaccttcatggccgagagacagtacacacggatggaggactggctgaccgccaagctggcctacgagggcctgagcaagacctacctgtccaagacactggcccagtacacctccaagacatgcagcaactgtgggtttaccatcaccagcgccgactacgacagggtgctggagaagctgaagaagacagcaacaggctggatgaccacaattaacggcaaggagctgaaggtggagggccagattacctactacaacagatacaagagacagaacgtagtcaaggacctgtccgtcgagctggatagactgagcgaagaatctgtgaacaacgacatctcctcctggacaaagggcagaagcggagaagctctgagcctcctgaagaaaagattctcccatagacccgtgcaggagaagttcgtgtgcctgaactgcggcttcgagacacacgcagccgagcaagccgccctgaacatcgccagatcctggctgttcctgcggagccaggagtacaagaaataccagacaaacaagacaaccggcaacaccgataagagagccttcgtcgagacctggcagtccttttaccggaagaagcttaaggaggtgtggaaacctgccgtgcggtctggcggatctggcggaggctccaccagccccaagaaaaagagaaaagtctaagctgccttctgcggggcttgccttctggccatgcccttcttctctcccttgcacctgtacctcttggtctttgaataaagcctgagtaggaaggctagcaaaaaaaaaaaaaaaaaaaaaaaaaaaaaaaaaaaaaaaaaaaaaaaaaaaaaaaaaaaaaaaaaaaaaaaaaaaaaaaa

SEQ ID NO: 12355 - RNA, 5785 nt, synthetic construct
  source 1..5785: mol_type = other RNA
aggaaataagagagaaaagaagagtaagaagaaatataagagccaccatggcccctaagaagaagcgtaaagtgagccggatggaacgcctcgtctacgaggtgcggcagaagtgcagaaacatcgaggacatctgcatctcctgcggatctctgaacgtgaccctggagcacccactgttcatcggcggcatgtgccagaactgtaaaaactgttttctggagtgtgcctatcaatacgacgatgacggctaccagagctactgcaccatctgttgcggcggaagagaggtgctgatgtgtggaaataacaactgctgccggtgcttctgcgtggaatgcgtggacctgctggtgggccccggcgccgcccaggccgctattaaggaagatccttggaactgctacatgtgcggccacaagggcacatacggcctgctgagacggagagaggactggcctagcagactgcagatgttcttcgccaataaccacgaccaggagttcgacccccctaaggtgtaccctcccgtccccgccgagaagagaaagcccatccgggtcctgagcctgttcgatggcatcgccaccggtctgctggtgctgaaggacctgggcatccaggtggataggtacattgcctccgaggtgtgcgaggactccatcaccgtgggaatggtgcgtcatcagggcaagatcatgtacgtgggcgacgtgcggagcgtgacacagaagcatatccaggagtggggccctttcgacctggtgatcggcggcagcccttgcaatgacctgagcatcgtgaacccagcccggaagggcctgtacgagggaaccggcagactgttcttcgagttttacagactgctgcacgacgcccggcctaaggaaggcgacgaccggcccttcttttggctgttcgagaatgtggtggccatgggagtcagcgacaagcgggatattagccggttcctggagagcaaccccgtgatgatcgatgccaaggaagtgagcgccgcccaccgggccagatacttctggggcaatctgcctggcatgaacagacccctggccagcaccgtgaacgacaagctggagctgcaggagtgcctggagcacggccggatcgccaagttcagcaaggtgagaaccatcaccacccgaagcaacagcatcaaacaaggcaaggaccagcactttcctgtgttcatgaacgagaaggaggacatcctgtggtgtaccgagatggagagagtgttcgggttcccagtccactacacagatgtcagcaacatgtctagactggccagacagagactgctgggaagaagctggtccgtccctgtgatcagacacctgttcgcccctctgaaggagtacttcgcctgcgtgagcagcggcaacagcaacgccaacagccggggccccagcttctctagcggcctggtgccactgtccctgagagggagccacatgggccccatggagatctacaaaaccgtgagcgcctggaagcggcagcctgtgcgcgtgctgagcctgtttcggaatatcgataaagtcctgaaaagcctgggattcctggagagcggctctggctccggcggtggcaccctgaagtacgtggaggatgtgacaaacgtggtcagacgggatgtggagaagtggggccccttcgatctggtgtacggcagcacccaacccctgggcagctcttgtgaccggtgccctggctggtacatgtttcagttccaccggatcctgcagtacgccctgccgagacaggagtcccagcggccattcttttggattttcatggacaacttgctgctgaccgaggatgaccaggaaactaccactcggttcctgcagaccgaagccgtgaccctgcaggacgtgagaggccgggactaccagaacgccatgcgggtgtggtccaacatccctggactgaaaagcaagcacgcacctctgacccctaaagaagaggagtacctgcaggcccaggtgcggagcagaagcaagctggacgcccctaaggtggatctgctggtgaagaattgcctcctgcccctgagagagtacttcaagtatttcagccagaatagtctgcccctgggaggcagcggcggcggcagcaaggcccccgtgaccttcggcgacctggccatctacttcagccaggaggagtgggagtggctgagccccatccagaaggacctgtacgaggacgtgatgctggagaactaccagaacctggtgagcctgggcctgagcttcaggaggcccaacgtgatcaccctgctggagaagggcaaggccccctggatggtggagcccgtgaagaggaggaggggcctggacctgggcagcaagtgcggcggcccaagcagcggcgcccctcctcccagcggcggcagcccagccggctccccaacctctaccgaggagggcacctctgagtccgccacccccgagagcggccctggcacctccaccgagcccagcgagggcagcgcacccggcagccctgccggcagccccacctccacagaggagggaaccagcaccgagcccagcgaaggcagcgccccaggcaccagcaccgagcctagtgagcaggagattaaacggatcaacaagatcagaagaagacttgtgaaagacagcaacaccaagaaggccggcaagacaggccccatgaaaaccctgctggttagagtgatgacacccgatctgagagagcggctggaaaacctgagaaagaagcctgaaaatatcccccagcccatcagcaatacatctagagccaacctgaataagctgctgaccgattacaccgaaatgaagaaggcgatcctgcatgtgtactgggaagagttccagaaggaccctgtgggcctgatgagccgggtggcccagcctgccagcaagaagatcgatcagaacaagctgaaacctgagatggacgagaagggcaacctgaccaccgccggctttgcctgctctcagtgtggccagcccctgttcgtgtacaagctggagcaggtgtctgagaagggcaaggcttacaccaactacttcggacggtgcaatgtggccgagcacgaaaagctgatcctgctggcccagctgaagcccgagaaggatagcgacgaagccgtgacatatagcctgggaaagtttgggcagagggccctggatttctacagcattcatgtgaccaaggagtccacccaccccgtgaagcccctggcccagatcgccggaaacagatacgcctccggacctgtgggaaaggccctgagcgacgcatgtatgggcacaatcgcctccttcctgtctaagtaccaggacatcatcatcgaacaccagaaggtggtgaagggcaaccagaagagactggagagcctgcgggagctggccggcaaggaaaacctggaataccctagcgtgaccctgccacctcagcctcacaccaaggagggcgttgatgcctacaacgaagtgatcgcccgggtgcgaatgtgggtgaacctgaacctgtggcagaagctgaagctaagcagagatgatgccaagcctctgctgagactgaagggattcccttcctttcctctggtcgagagacaggccaacgaagtggactggtgggacatggtgtgtaacgtgaagaagctgatcaacgagaaaaaggaggatggcaaggtgttttggcagaatctggctggctacaagagacaggaagccctgagaccatacctgagcagcgaggaagatcggaagaagggaaagaaattcgctcggtaccagctgggcgacctgctgctgcacctggaaaagaagcacggcgaggactggggaaaggtgtacgacgaggcctgggagcggattgacaagaaagtggaaggcctgagcaagcacatcaagctggaagaggaacggagaagcgaggacgcccagagcaaggccgccctgaccgactggctgcgggctaaggccagcttcgtgatcgagggcctgaaggaggccgacaaggacgagttctgcagatgcgagctgaagctgcagaagtggtacggggacctgcggggaaagcccttcgccatcgaagccgagaacagcatcctggacatcagcggcttcagcaagcagtacaactgtgccttcatctggcagaaggacggcgtgaagaagctgaacctgtacctgatcatcaactacttcaagggcggcaagctgcggttcaagaagatcaaacctgaagccttcgaagccaacagattctacaccgtgatcaacaaaaagagcggcgagatcgtgcccatggaggtgaacttcaacttcgacgaccccaacctgatcatcctgcctctggcctttggcaagagacagggcagagaattcatctggaacgacctgctgtccctggaaaccggcagcctgaagctggccaacggaagagtgatcgagaagacactgtacaacagaagaacccggcaggatgagcctgccctgttcgtggccctgaccttcgagcggcgggaggtcctggactcctccaatatcaaaccaatgaacctgatcggcgtggcaagaggcgaaaacatccccgccgtgatcgccctgaccgaccccgagggctgcccactgagccggtttaaggatagcctgggaaacccaacccacatcctgagaatcggcgagagctataaggagaagcagcggaccatccaggccaagaaggaggtggagcagcggagagccggcggctacagccggaagtacgccagcaaagccaagaatctggcagacgatatggtgagaaacaccgctagagatctgctgtactacgccgtgacccaggatgccatgctgatcttcgccaacctgagccggggcttcggccggcagggcaagcggaccttcatggccgagagacagtacacacggatggaggactggctgaccgccaagctggcctacgagggcctgagcaagacctacctgtccaagacactggcccagtacacctccaagacatgcagcaactgtgggtttaccatcaccagcgccgactacgacagggtgctggagaagctgaagaagacagcaacaggctggatgaccacaattaacggcaaggagctgaaggtggagggccagattacctactacaacagatacaagagacagaacgtagtcaaggacctgtccgtcgagctggatagactgagcgaagaatctgtgaacaacgacatctcctcctggacaaagggcagaagcggagaagctctgagcctcctgaagaaaagattctcccatagacccgtgcaggagaagttcgtgtgcctgaactgcggcttcgagacacacgcagccgagcaagccgccctgaacatcgccagatcctggctgttcctgcggagccaggagtacaagaaataccagacaaacaagacaaccggcaacaccgataagagagccttcgtcgagacctggcagtccttttaccggaagaagcttaaggaggtgtggaaacctgccgtgcggtctggcggatctggcggaggctccaccagccccaagaaaaagagaaaagtctaagctgccttctgcggggcttgccttctggccatgcccttcttctctcccttgcacctgtacctcttggtctttgaataaagcctgagtaggaaggctagcaaaaaaaaaaaaaaaaaaaaaaaaaaaaaaaaaaaaaaaaaaaaaaaaaaaaaaaaaaaaaaaaaaaaaaaaaaaaaaaa

SEQ ID NO: 12356 - RNA, 5785 nt, synthetic construct
  source 1..5785: mol_type = other RNA
aggaaataagagagaaaagaagagtaagaagaaatataagagccaccatggcccctaagaagaagcgtaaagtgagccggatggaacgcctcgtctacgaggtgcggcagaagtgcagaaacatcgaggacatctgcatctcctgcggatctctgaacgtgaccctggagcacccactgttcatcggcggcatgtgccagaactgtaaaaactgttttctggagtgtgcctatcaatacgacgatgacggctaccagagctactgcaccatctgttgcggcggaagagaggtgctgatgtgtggaaataacaactgctgccggtgcttctgcgtggaatgcgtggacctgctggtgggccccggcgccgcccaggccgctattaaggaagatccttggaactgctacatgtgcggccacaagggcacatacggcctgctgagacggagagaggactggcctagcagactgcagatgttcttcgccaataaccacgaccaggagttcgacccccctaaggtgtaccctcccgtccccgccgagaagagaaagcccatccgggtcctgagcctgttcgatggcatcgccaccggtctgctggtgctgaaggacctgggcatccaggtggataggtacattgcctccgaggtgtgcgaggactccatcaccgtgggaatggtgcgtcatcagggcaagatcatgtacgtgggcgacgtgcggagcgtgacacagaagcatatccaggagtggggccctttcgacctggtgatcggcggcagcccttgcaatgacctgagcatcgtgaacccagcccggaagggcctgtacgagggaaccggcagactgttcttcgagttttacagactgctgcacgacgcccggcctaaggaaggcgacgaccggcccttcttttggctgttcgagaatgtggtggccatgggagtcagcgacaagcgggatattagccggttcctggagagcaaccccgtgatgatcgatgccaaggaagtgagcgccgcccaccgggccagatacttctggggcaatctgcctggcatgaacagacccctggccagcaccgtgaacgacaagctggagctgcaggagtgcctggagcacggccggatcgccaagttcagcaaggtgagaaccatcaccacccgaagcaacagcatcaaacaaggcaaggaccagcactttcctgtgttcatgaacgagaaggaggacatcctgtggtgtaccgagatggagagagtgttcgggttcccagtccactacacagatgtcagcaacatgtctagactggccagacagagactgctgggaagaagctggtccgtccctgtgatcagacacctgttcgcccctctgaaggagtacttcgcctgcgtgagcagcggcaacagcaacgccaacagccggggccccagcttctctagcggcctggtgccactgtccctgagagggagccacatgggccccatggagatctacaaaaccgtgagcgcctggaagcggcagcctgtgcgcgtgctgagcctgtttcggaatatcgataaagtcctgaaaagcctgggattcctggagagcggctctggctccggcggtggcaccctgaagtacgtggaggatgtgacaaacgtggtcagacgggatgtggagaagtggggccccttcgatctggtgtacggcagcacccaacccctgggcagctcttgtgaccggtgccctggctggtacatgtttcagttccaccggatcctgcagtacgccctgccgagacaggagtcccagcggccattcttttggattttcatggacaacttgctgctgaccgaggatgaccaggaaactaccactcggttcctgcagaccgaagccgtgaccctgcaggacgtgagaggccgggactaccagaacgccatgcgggtgtggtccaacatccctggactgaaaagcaagcacgcacctctgacccctaaagaagaggagtacctgcaggcccaggtgcggagcagaagcaagctggacgcccctaaggtggatctgctggtgaagaattgcctcctgcccctgagagagtacttcaagtatttcagccagaatagtctgcccctgggaggcagcggcggcggcagcaaggcccccgtgaccttcggcgacctggccatctacttcagccaggaggagtgggagtggctgagccccatccagaaggacctgtacgaggacgtgatgctggagaactaccagaacctggtgagcctgggcctgagcttcaggaggcccaacgtgatcgccctgctggagaagggcaaggccccctggatggtggagcccgtgaagaggaggaggggcctggacagcggcagcaagtgcggcggcccaagcagcggcgcccctcctcccagcggcggcagcccagccggctccccaacctctaccgaggagggcacctctgagtccgccacccccgagagcggccctggcacctccaccgagcccagcgagggcagcgcacccggcagccctgccggcagccccacctccacagaggagggaaccagcaccgagcccagcgaaggcagcgccccaggcaccagcaccgagcctagtgagcaggagattaaacggatcaacaagatcagaagaagacttgtgaaagacagcaacaccaagaaggccggcaagacaggccccatgaaaaccctgctggttagagtgatgacacccgatctgagagagcggctggaaaacctgagaaagaagcctgaaaatatcccccagcccatcagcaatacatctagagccaacctgaataagctgctgaccgattacaccgaaatgaagaaggcgatcctgcatgtgtactgggaagagttccagaaggaccctgtgggcctgatgagccgggtggcccagcctgccagcaagaagatcgatcagaacaagctgaaacctgagatggacgagaagggcaacctgaccaccgccggctttgcctgctctcagtgtggccagcccctgttcgtgtacaagctggagcaggtgtctgagaagggcaaggcttacaccaactacttcggacggtgcaatgtggccgagcacgaaaagctgatcctgctggcccagctgaagcccgagaaggatagcgacgaagccgtgacatatagcctgggaaagtttgggcagagggccctggatttctacagcattcatgtgaccaaggagtccacccaccccgtgaagcccctggcccagatcgccggaaacagatacgcctccggacctgtgggaaaggccctgagcgacgcatgtatgggcacaatcgcctccttcctgtctaagtaccaggacatcatcatcgaacaccagaaggtggtgaagggcaaccagaagagactggagagcctgcgggagctggccggcaaggaaaacctggaataccctagcgtgaccctgccacctcagcctcacaccaaggagggcgttgatgcctacaacgaagtgatcgcccgggtgcgaatgtgggtgaacctgaacctgtggcagaagctgaagctaagcagagatgatgccaagcctctgctgagactgaagggattcccttcctttcctctggtcgagagacaggccaacgaagtggactggtgggacatggtgtgtaacgtgaagaagctgatcaacgagaaaaaggaggatggcaaggtgttttggcagaatctggctggctacaagagacaggaagccctgagaccatacctgagcagcgaggaagatcggaagaagggaaagaaattcgctcggtaccagctgggcgacctgctgctgcacctggaaaagaagcacggcgaggactggggaaaggtgtacgacgaggcctgggagcggattgacaagaaagtggaaggcctgagcaagcacatcaagctggaagaggaacggagaagcgaggacgcccagagcaaggccgccctgaccgactggctgcgggctaaggccagcttcgtgatcgagggcctgaaggaggccgacaaggacgagttctgcagatgcgagctgaagctgcagaagtggtacggggacctgcggggaaagcccttcgccatcgaagccgagaacagcatcctggacatcagcggcttcagcaagcagtacaactgtgccttcatctggcagaaggacggcgtgaagaagctgaacctgtacctgatcatcaactacttcaagggcggcaagctgcggttcaagaagatcaaacctgaagccttcgaagccaacagattctacaccgtgatcaacaaaaagagcggcgagatcgtgcccatggaggtgaacttcaacttcgacgaccccaacctgatcatcctgcctctggcctttggcaagagacagggcagagaattcatctggaacgacctgctgtccctggaaaccggcagcctgaagctggccaacggaagagtgatcgagaagacactgtacaacagaagaacccggcaggatgagcctgccctgttcgtggccctgaccttcgagcggcgggaggtcctggactcctccaatatcaaaccaatgaacctgatcggcgtggcaagaggcgaaaacatccccgccgtgatcgccctgaccgaccccgagggctgcccactgagccggtttaaggatagcctgggaaacccaacccacatcctgagaatcggcgagagctataaggagaagcagcggaccatccaggccaagaaggaggtggagcagcggagagccggcggctacagccggaagtacgccagcaaagccaagaatctggcagacgatatggtgagaaacaccgctagagatctgctgtactacgccgtgacccaggatgccatgctgatcttcgccaacctgagccggggcttcggccggcagggcaagcggaccttcatggccgagagacagtacacacggatggaggactggctgaccgccaagctggcctacgagggcctgagcaagacctacctgtccaagacactggcccagtacacctccaagacatgcagcaactgtgggtttaccatcaccagcgccgactacgacagggtgctggagaagctgaagaagacagcaacaggctggatgaccacaattaacggcaaggagctgaaggtggagggccagattacctactacaacagatacaagagacagaacgtagtcaaggacctgtccgtcgagctggatagactgagcgaagaatctgtgaacaacgacatctcctcctggacaaagggcagaagcggagaagctctgagcctcctgaagaaaagattctcccatagacccgtgcaggagaagttcgtgtgcctgaactgcggcttcgagacacacgcagccgagcaagccgccctgaacatcgccagatcctggctgttcctgcggagccaggagtacaagaaataccagacaaacaagacaaccggcaacaccgataagagagccttcgtcgagacctggcagtccttttaccggaagaagcttaaggaggtgtggaaacctgccgtgcggtctggcggatctggcggaggctccaccagccccaagaaaaagagaaaagtctaagctgccttctgcggggcttgccttctggccatgcccttcttctctcccttgcacctgtacctcttggtctttgaataaagcctgagtaggaaggctagcaaaaaaaaaaaaaaaaaaaaaaaaaaaaaaaaaaaaaaaaaaaaaaaaaaaaaaaaaaaaaaaaaaaaaaaaaaaaaaaa

SEQ ID NO: 12357 - RNA, 5785 nt, synthetic construct
  source 1..5785: mol_type = other RNA
aggaaataagagagaaaagaagagtaagaagaaatataagagccaccatggcccctaagaagaagcgtaaagtgagccggatggaacgcctcgtctacgaggtgcggcagaagtgcagaaacatcgaggacatctgcatctcctgcggatctctgaacgtgaccctggagcacccactgttcatcggcggcatgtgccagaactgtaaaaactgttttctggagtgtgcctatcaatacgacgatgacggctaccagagctactgcaccatctgttgcggcggaagagaggtgctgatgtgtggaaataacaactgctgccggtgcttctgcgtggaatgcgtggacctgctggtgggccccggcgccgcccaggccgctattaaggaagatccttggaactgctacatgtgcggccacaagggcacatacggcctgctgagacggagagaggactggcctagcagactgcagatgttcttcgccaataaccacgaccaggagttcgacccccctaaggtgtaccctcccgtccccgccgagaagagaaagcccatccgggtcctgagcctgttcgatggcatcgccaccggtctgctggtgctgaaggacctgggcatccaggtggataggtacattgcctccgaggtgtgcgaggactccatcaccgtgggaatggtgcgtcatcagggcaagatcatgtacgtgggcgacgtgcggagcgtgacacagaagcatatccaggagtggggccctttcgacctggtgatcggcggcagcccttgcaatgacctgagcatcgtgaacccagcccggaagggcctgtacgagggaaccggcagactgttcttcgagttttacagactgctgcacgacgcccggcctaaggaaggcgacgaccggcccttcttttggctgttcgagaatgtggtggccatgggagtcagcgacaagcgggatattagccggttcctggagagcaaccccgtgatgatcgatgccaaggaagtgagcgccgcccaccgggccagatacttctggggcaatctgcctggcatgaacagacccctggccagcaccgtgaacgacaagctggagctgcaggagtgcctggagcacggccggatcgccaagttcagcaaggtgagaaccatcaccacccgaagcaacagcatcaaacaaggcaaggaccagcactttcctgtgttcatgaacgagaaggaggacatcctgtggtgtaccgagatggagagagtgttcgggttcccagtccactacacagatgtcagcaacatgtctagactggccagacagagactgctgggaagaagctggtccgtccctgtgatcagacacctgttcgcccctctgaaggagtacttcgcctgcgtgagcagcggcaacagcaacgccaacagccggggccccagcttctctagcggcctggtgccactgtccctgagagggagccacatgggccccatggagatctacaaaaccgtgagcgcctggaagcggcagcctgtgcgcgtgctgagcctgtttcggaatatcgataaagtcctgaaaagcctgggattcctggagagcggctctggctccggcggtggcaccctgaagtacgtggaggatgtgacaaacgtggtcagacgggatgtggagaagtggggccccttcgatctggtgtacggcagcacccaacccctgggcagctcttgtgaccggtgccctggctggtacatgtttcagttccaccggatcctgcagtacgccctgccgagacaggagtcccagcggccattcttttggattttcatggacaacttgctgctgaccgaggatgaccaggaaactaccactcggttcctgcagaccgaagccgtgaccctgcaggacgtgagaggccgggactaccagaacgccatgcgggtgtggtccaacatccctggactgaaaagcaagcacgcacctctgacccctaaagaagaggagtacctgcaggcccaggtgcggagcagaagcaagctggacgcccctaaggtggatctgctggtgaagaattgcctcctgcccctgagagagtacttcaagtatttcagccagaatagtctgcccctgggaggcagcggcggcggcaggcccagggccctgaagttcgccgacgtggccgtgtacttcagcctggaggagtggggctgcctgaggcccgcccagaggaccctgtacaggaacgtgatgagggagacctacggccacctgggcgccctgggctgcgccggccccaagcccgccctgatcagctggctggagaggaacaccgacgactgggagcccgccgccctggacccccaggagtaccccaggggcgtgaccgtgcagggcggcccaagcagcggcgcccctcctcccagcggcggcagcccagccggctccccaacctctaccgaggagggcacctctgagtccgccacccccgagagcggccctggcacctccaccgagcccagcgagggcagcgcacccggcagccctgccggcagccccacctccacagaggagggaaccagcaccgagcccagcgaaggcagcgccccaggcaccagcaccgagcctagtgagcaggagattaaacggatcaacaagatcagaagaagacttgtgaaagacagcaacaccaagaaggccggcaagacaggccccatgaaaaccctgctggttagagtgatgacacccgatctgagagagcggctggaaaacctgagaaagaagcctgaaaatatcccccagcccatcagcaatacatctagagccaacctgaataagctgctgaccgattacaccgaaatgaagaaggcgatcctgcatgtgtactgggaagagttccagaaggaccctgtgggcctgatgagccgggtggcccagcctgccagcaagaagatcgatcagaacaagctgaaacctgagatggacgagaagggcaacctgaccaccgccggctttgcctgctctcagtgtggccagcccctgttcgtgtacaagctggagcaggtgtctgagaagggcaaggcttacaccaactacttcggacggtgcaatgtggccgagcacgaaaagctgatcctgctggcccagctgaagcccgagaaggatagcgacgaagccgtgacatatagcctgggaaagtttgggcagagggccctggatttctacagcattcatgtgaccaaggagtccacccaccccgtgaagcccctggcccagatcgccggaaacagatacgcctccggacctgtgggaaaggccctgagcgacgcatgtatgggcacaatcgcctccttcctgtctaagtaccaggacatcatcatcgaacaccagaaggtggtgaagggcaaccagaagagactggagagcctgcgggagctggccggcaaggaaaacctggaataccctagcgtgaccctgccacctcagcctcacaccaaggagggcgttgatgcctacaacgaagtgatcgcccgggtgcgaatgtgggtgaacctgaacctgtggcagaagctgaagctaagcagagatgatgccaagcctctgctgagactgaagggattcccttcctttcctctggtcgagagacaggccaacgaagtggactggtgggacatggtgtgtaacgtgaagaagctgatcaacgagaaaaaggaggatggcaaggtgttttggcagaatctggctggctacaagagacaggaagccctgagaccatacctgagcagcgaggaagatcggaagaagggaaagaaattcgctcggtaccagctgggcgacctgctgctgcacctggaaaagaagcacggcgaggactggggaaaggtgtacgacgaggcctgggagcggattgacaagaaagtggaaggcctgagcaagcacatcaagctggaagaggaacggagaagcgaggacgcccagagcaaggccgccctgaccgactggctgcgggctaaggccagcttcgtgatcgagggcctgaaggaggccgacaaggacgagttctgcagatgcgagctgaagctgcagaagtggtacggggacctgcggggaaagcccttcgccatcgaagccgagaacagcatcctggacatcagcggcttcagcaagcagtacaactgtgccttcatctggcagaaggacggcgtgaagaagctgaacctgtacctgatcatcaactacttcaagggcggcaagctgcggttcaagaagatcaaacctgaagccttcgaagccaacagattctacaccgtgatcaacaaaaagagcggcgagatcgtgcccatggaggtgaacttcaacttcgacgaccccaacctgatcatcctgcctctggcctttggcaagagacagggcagagaattcatctggaacgacctgctgtccctggaaaccggcagcctgaagctggccaacggaagagtgatcgagaagacactgtacaacagaagaacccggcaggatgagcctgccctgttcgtggccctgaccttcgagcggcgggaggtcctggactcctccaatatcaaaccaatgaacctgatcggcgtggcaagaggcgaaaacatccccgccgtgatcgccctgaccgaccccgagggctgcccactgagccggtttaaggatagcctgggaaacccaacccacatcctgagaatcggcgagagctataaggagaagcagcggaccatccaggccaagaaggaggtggagcagcggagagccggcggctacagccggaagtacgccagcaaagccaagaatctggcagacgatatggtgagaaacaccgctagagatctgctgtactacgccgtgacccaggatgccatgctgatcttcgccaacctgagccggggcttcggccggcagggcaagcggaccttcatggccgagagacagtacacacggatggaggactggctgaccgccaagctggcctacgagggcctgagcaagacctacctgtccaagacactggcccagtacacctccaagacatgcagcaactgtgggtttaccatcaccagcgccgactacgacagggtgctggagaagctgaagaagacagcaacaggctggatgaccacaattaacggcaaggagctgaaggtggagggccagattacctactacaacagatacaagagacagaacgtagtcaaggacctgtccgtcgagctggatagactgagcgaagaatctgtgaacaacgacatctcctcctggacaaagggcagaagcggagaagctctgagcctcctgaagaaaagattctcccatagacccgtgcaggagaagttcgtgtgcctgaactgcggcttcgagacacacgcagccgagcaagccgccctgaacatcgccagatcctggctgttcctgcggagccaggagtacaagaaataccagacaaacaagacaaccggcaacaccgataagagagccttcgtcgagacctggcagtccttttaccggaagaagcttaaggaggtgtggaaacctgccgtgcggtctggcggatctggcggaggctccaccagccccaagaaaaagagaaaagtctaagctgccttctgcggggcttgccttctggccatgcccttcttctctcccttgcacctgtacctcttggtctttgaataaagcctgagtaggaaggctagcaaaaaaaaaaaaaaaaaaaaaaaaaaaaaaaaaaaaaaaaaaaaaaaaaaaaaaaaaaaaaaaaaaaaaaaaaaaaaaaa

SEQ ID NO: 12358 - RNA, 5794 nt, synthetic construct
  source 1..5794: mol_type = other RNA
aggaaataagagagaaaagaagagtaagaagaaatataagagccaccatggcccctaagaagaagcgtaaagtgagccggatggaacgcctcgtctacgaggtgcggcagaagtgcagaaacatcgaggacatctgcatctcctgcggatctctgaacgtgaccctggagcacccactgttcatcggcggcatgtgccagaactgtaaaaactgttttctggagtgtgcctatcaatacgacgatgacggctaccagagctactgcaccatctgttgcggcggaagagaggtgctgatgtgtggaaataacaactgctgccggtgcttctgcgtggaatgcgtggacctgctggtgggccccggcgccgcccaggccgctattaaggaagatccttggaactgctacatgtgcggccacaagggcacatacggcctgctgagacggagagaggactggcctagcagactgcagatgttcttcgccaataaccacgaccaggagttcgacccccctaaggtgtaccctcccgtccccgccgagaagagaaagcccatccgggtcctgagcctgttcgatggcatcgccaccggtctgctggtgctgaaggacctgggcatccaggtggataggtacattgcctccgaggtgtgcgaggactccatcaccgtgggaatggtgcgtcatcagggcaagatcatgtacgtgggcgacgtgcggagcgtgacacagaagcatatccaggagtggggccctttcgacctggtgatcggcggcagcccttgcaatgacctgagcatcgtgaacccagcccggaagggcctgtacgagggaaccggcagactgttcttcgagttttacagactgctgcacgacgcccggcctaaggaaggcgacgaccggcccttcttttggctgttcgagaatgtggtggccatgggagtcagcgacaagcgggatattagccggttcctggagagcaaccccgtgatgatcgatgccaaggaagtgagcgccgcccaccgggccagatacttctggggcaatctgcctggcatgaacagacccctggccagcaccgtgaacgacaagctggagctgcaggagtgcctggagcacggccggatcgccaagttcagcaaggtgagaaccatcaccacccgaagcaacagcatcaaacaaggcaaggaccagcactttcctgtgttcatgaacgagaaggaggacatcctgtggtgtaccgagatggagagagtgttcgggttcccagtccactacacagatgtcagcaacatgtctagactggccagacagagactgctgggaagaagctggtccgtccctgtgatcagacacctgttcgcccctctgaaggagtacttcgcctgcgtgagcagcggcaacagcaacgccaacagccggggccccagcttctctagcggcctggtgccactgtccctgagagggagccacatgggccccatggagatctacaaaaccgtgagcgcctggaagcggcagcctgtgcgcgtgctgagcctgtttcggaatatcgataaagtcctgaaaagcctgggattcctggagagcggctctggctccggcggtggcaccctgaagtacgtggaggatgtgacaaacgtggtcagacgggatgtggagaagtggggccccttcgatctggtgtacggcagcacccaacccctgggcagctcttgtgaccggtgccctggctggtacatgtttcagttccaccggatcctgcagtacgccctgccgagacaggagtcccagcggccattcttttggattttcatggacaacttgctgctgaccgaggatgaccaggaaactaccactcggttcctgcagaccgaagccgtgaccctgcaggacgtgagaggccgggactaccagaacgccatgcgggtgtggtccaacatccctggactgaaaagcaagcacgcacctctgacccctaaagaagaggagtacctgcaggcccaggtgcggagcagaagcaagctggacgcccctaaggtggatctgctggtgaagaattgcctcctgcccctgagagagtacttcaagtatttcagccagaatagtctgcccctgggaggcagcggcggcggcctgacctacgacgacgtgcagatcaacttcaccagcgaggagtggagcctgctggacaccagccagaagaacctgtacaaggacgtgatgctggagacctacaagaacctgaccgacatcggctacacctgggaggactgcagcatcgaggagcactgcgccagcagcaagaggaaggagaggcccaagaggagccagaccggcgagaagcccagcgcctacacccagtgcgccaaggacttcgcctacagcggcggcccaagcagcggcgcccctcctcccagcggcggcagcccagccggctccccaacctctaccgaggagggcacctctgagtccgccacccccgagagcggccctggcacctccaccgagcccagcgagggcagcgcacccggcagccctgccggcagccccacctccacagaggagggaaccagcaccgagcccagcgaaggcagcgccccaggcaccagcaccgagcctagtgagcaggagattaaacggatcaacaagatcagaagaagacttgtgaaagacagcaacaccaagaaggccggcaagacaggccccatgaaaaccctgctggttagagtgatgacacccgatctgagagagcggctggaaaacctgagaaagaagcctgaaaatatcccccagcccatcagcaatacatctagagccaacctgaataagctgctgaccgattacaccgaaatgaagaaggcgatcctgcatgtgtactgggaagagttccagaaggaccctgtgggcctgatgagccgggtggcccagcctgccagcaagaagatcgatcagaacaagctgaaacctgagatggacgagaagggcaacctgaccaccgccggctttgcctgctctcagtgtggccagcccctgttcgtgtacaagctggagcaggtgtctgagaagggcaaggcttacaccaactacttcggacggtgcaatgtggccgagcacgaaaagctgatcctgctggcccagctgaagcccgagaaggatagcgacgaagccgtgacatatagcctgggaaagtttgggcagagggccctggatttctacagcattcatgtgaccaaggagtccacccaccccgtgaagcccctggcccagatcgccggaaacagatacgcctccggacctgtgggaaaggccctgagcgacgcatgtatgggcacaatcgcctccttcctgtctaagtaccaggacatcatcatcgaacaccagaaggtggtgaagggcaaccagaagagactggagagcctgcgggagctggccggcaaggaaaacctggaataccctagcgtgaccctgccacctcagcctcacaccaaggagggcgttgatgcctacaacgaagtgatcgcccgggtgcgaatgtgggtgaacctgaacctgtggcagaagctgaagctaagcagagatgatgccaagcctctgctgagactgaagggattcccttcctttcctctggtcgagagacaggccaacgaagtggactggtgggacatggtgtgtaacgtgaagaagctgatcaacgagaaaaaggaggatggcaaggtgttttggcagaatctggctggctacaagagacaggaagccctgagaccatacctgagcagcgaggaagatcggaagaagggaaagaaattcgctcggtaccagctgggcgacctgctgctgcacctggaaaagaagcacggcgaggactggggaaaggtgtacgacgaggcctgggagcggattgacaagaaagtggaaggcctgagcaagcacatcaagctggaagaggaacggagaagcgaggacgcccagagcaaggccgccctgaccgactggctgcgggctaaggccagcttcgtgatcgagggcctgaaggaggccgacaaggacgagttctgcagatgcgagctgaagctgcagaagtggtacggggacctgcggggaaagcccttcgccatcgaagccgagaacagcatcctggacatcagcggcttcagcaagcagtacaactgtgccttcatctggcagaaggacggcgtgaagaagctgaacctgtacctgatcatcaactacttcaagggcggcaagctgcggttcaagaagatcaaacctgaagccttcgaagccaacagattctacaccgtgatcaacaaaaagagcggcgagatcgtgcccatggaggtgaacttcaacttcgacgaccccaacctgatcatcctgcctctggcctttggcaagagacagggcagagaattcatctggaacgacctgctgtccctggaaaccggcagcctgaagctggccaacggaagagtgatcgagaagacactgtacaacagaagaacccggcaggatgagcctgccctgttcgtggccctgaccttcgagcggcgggaggtcctggactcctccaatatcaaaccaatgaacctgatcggcgtggcaagaggcgaaaacatccccgccgtgatcgccctgaccgaccccgagggctgcccactgagccggtttaaggatagcctgggaaacccaacccacatcctgagaatcggcgagagctataaggagaagcagcggaccatccaggccaagaaggaggtggagcagcggagagccggcggctacagccggaagtacgccagcaaagccaagaatctggcagacgatatggtgagaaacaccgctagagatctgctgtactacgccgtgacccaggatgccatgctgatcttcgccaacctgagccggggcttcggccggcagggcaagcggaccttcatggccgagagacagtacacacggatggaggactggctgaccgccaagctggcctacgagggcctgagcaagacctacctgtccaagacactggcccagtacacctccaagacatgcagcaactgtgggtttaccatcaccagcgccgactacgacagggtgctggagaagctgaagaagacagcaacaggctggatgaccacaattaacggcaaggagctgaaggtggagggccagattacctactacaacagatacaagagacagaacgtagtcaaggacctgtccgtcgagctggatagactgagcgaagaatctgtgaacaacgacatctcctcctggacaaagggcagaagcggagaagctctgagcctcctgaagaaaagattctcccatagacccgtgcaggagaagttcgtgtgcctgaactgcggcttcgagacacacgcagccgagcaagccgccctgaacatcgccagatcctggctgttcctgcggagccaggagtacaagaaataccagacaaacaagacaaccggcaacaccgataagagagccttcgtcgagacctggcagtccttttaccggaagaagcttaaggaggtgtggaaacctgccgtgcggtctggcggatctggcggaggctccaccagccccaagaaaaagagaaaagtctaagctgccttctgcggggcttgccttctggccatgcccttcttctctcccttgcacctgtacctcttggtctttgaataaagcctgagtaggaaggctagcaaaaaaaaaaaaaaaaaaaaaaaaaaaaaaaaaaaaaaaaaaaaaaaaaaaaaaaaaaaaaaaaaaaaaaaaaaaaaaaa

SEQ ID NO: 12359 - RNA, 5785 nt, synthetic construct
  source 1..5785: mol_type = other RNA
aggaaataagagagaaaagaagagtaagaagaaatataagagccaccatggcccctaagaagaagcgtaaagtgagccggatggaacgcctcgtctacgaggtgcggcagaagtgcagaaacatcgaggacatctgcatctcctgcggatctctgaacgtgaccctggagcacccactgttcatcggcggcatgtgccagaactgtaaaaactgttttctggagtgtgcctatcaatacgacgatgacggctaccagagctactgcaccatctgttgcggcggaagagaggtgctgatgtgtggaaataacaactgctgccggtgcttctgcgtggaatgcgtggacctgctggtgggccccggcgccgcccaggccgctattaaggaagatccttggaactgctacatgtgcggccacaagggcacatacggcctgctgagacggagagaggactggcctagcagactgcagatgttcttcgccaataaccacgaccaggagttcgacccccctaaggtgtaccctcccgtccccgccgagaagagaaagcccatccgggtcctgagcctgttcgatggcatcgccaccggtctgctggtgctgaaggacctgggcatccaggtggataggtacattgcctccgaggtgtgcgaggactccatcaccgtgggaatggtgcgtcatcagggcaagatcatgtacgtgggcgacgtgcggagcgtgacacagaagcatatccaggagtggggccctttcgacctggtgatcggcggcagcccttgcaatgacctgagcatcgtgaacccagcccggaagggcctgtacgagggaaccggcagactgttcttcgagttttacagactgctgcacgacgcccggcctaaggaaggcgacgaccggcccttcttttggctgttcgagaatgtggtggccatgggagtcagcgacaagcgggatattagccggttcctggagagcaaccccgtgatgatcgatgccaaggaagtgagcgccgcccaccgggccagatacttctggggcaatctgcctggcatgaacagacccctggccagcaccgtgaacgacaagctggagctgcaggagtgcctggagcacggccggatcgccaagttcagcaaggtgagaaccatcaccacccgaagcaacagcatcaaacaaggcaaggaccagcactttcctgtgttcatgaacgagaaggaggacatcctgtggtgtaccgagatggagagagtgttcgggttcccagtccactacacagatgtcagcaacatgtctagactggccagacagagactgctgggaagaagctggtccgtccctgtgatcagacacctgttcgcccctctgaaggagtacttcgcctgcgtgagcagcggcaacagcaacgccaacagccggggccccagcttctctagcggcctggtgccactgtccctgagagggagccacatgggccccatggagatctacaaaaccgtgagcgcctggaagcggcagcctgtgcgcgtgctgagcctgtttcggaatatcgataaagtcctgaaaagcctgggattcctggagagcggctctggctccggcggtggcaccctgaagtacgtggaggatgtgacaaacgtggtcagacgggatgtggagaagtggggccccttcgatctggtgtacggcagcacccaacccctgggcagctcttgtgaccggtgccctggctggtacatgtttcagttccaccggatcctgcagtacgccctgccgagacaggagtcccagcggccattcttttggattttcatggacaacttgctgctgaccgaggatgaccaggaaactaccactcggttcctgcagaccgaagccgtgaccctgcaggacgtgagaggccgggactaccagaacgccatgcgggtgtggtccaacatccctggactgaaaagcaagcacgcacctctgacccctaaagaagaggagtacctgcaggcccaggtgcggagcagaagcaagctggacgcccctaaggtggatctgctggtgaagaattgcctcctgcccctgagagagtacttcaagtatttcagccagaatagtctgcccctgggaggcagcggcggcggcaggcaggccttcctggccttcggcgacgtgaccgtggacttcacccagaaggagtggaggctgctgagccccgcccagagggccctgtacagggaggtgaccctggagaactacagccacctggtgagcctgggcatcctgcacagcaagcccgagctgatcaggaggctggagcagggcgaggccccctggggcgaggagaggaggaggaggcccggcccctgcgccggcatctacgccgagggcggcccaagcagcggcgcccctcctcccagcggcggcagcccagccggctccccaacctctaccgaggagggcacctctgagtccgccacccccgagagcggccctggcacctccaccgagcccagcgagggcagcgcacccggcagccctgccggcagccccacctccacagaggagggaaccagcaccgagcccagcgaaggcagcgccccaggcaccagcaccgagcctagtgagcaggagattaaacggatcaacaagatcagaagaagacttgtgaaagacagcaacaccaagaaggccggcaagacaggccccatgaaaaccctgctggttagagtgatgacacccgatctgagagagcggctggaaaacctgagaaagaagcctgaaaatatcccccagcccatcagcaatacatctagagccaacctgaataagctgctgaccgattacaccgaaatgaagaaggcgatcctgcatgtgtactgggaagagttccagaaggaccctgtgggcctgatgagccgggtggcccagcctgccagcaagaagatcgatcagaacaagctgaaacctgagatggacgagaagggcaacctgaccaccgccggctttgcctgctctcagtgtggccagcccctgttcgtgtacaagctggagcaggtgtctgagaagggcaaggcttacaccaactacttcggacggtgcaatgtggccgagcacgaaaagctgatcctgctggcccagctgaagcccgagaaggatagcgacgaagccgtgacatatagcctgggaaagtttgggcagagggccctggatttctacagcattcatgtgaccaaggagtccacccaccccgtgaagcccctggcccagatcgccggaaacagatacgcctccggacctgtgggaaaggccctgagcgacgcatgtatgggcacaatcgcctccttcctgtctaagtaccaggacatcatcatcgaacaccagaaggtggtgaagggcaaccagaagagactggagagcctgcgggagctggccggcaaggaaaacctggaataccctagcgtgaccctgccacctcagcctcacaccaaggagggcgttgatgcctacaacgaagtgatcgcccgggtgcgaatgtgggtgaacctgaacctgtggcagaagctgaagctaagcagagatgatgccaagcctctgctgagactgaagggattcccttcctttcctctggtcgagagacaggccaacgaagtggactggtgggacatggtgtgtaacgtgaagaagctgatcaacgagaaaaaggaggatggcaaggtgttttggcagaatctggctggctacaagagacaggaagccctgagaccatacctgagcagcgaggaagatcggaagaagggaaagaaattcgctcggtaccagctgggcgacctgctgctgcacctggaaaagaagcacggcgaggactggggaaaggtgtacgacgaggcctgggagcggattgacaagaaagtggaaggcctgagcaagcacatcaagctggaagaggaacggagaagcgaggacgcccagagcaaggccgccctgaccgactggctgcgggctaaggccagcttcgtgatcgagggcctgaaggaggccgacaaggacgagttctgcagatgcgagctgaagctgcagaagtggtacggggacctgcggggaaagcccttcgccatcgaagccgagaacagcatcctggacatcagcggcttcagcaagcagtacaactgtgccttcatctggcagaaggacggcgtgaagaagctgaacctgtacctgatcatcaactacttcaagggcggcaagctgcggttcaagaagatcaaacctgaagccttcgaagccaacagattctacaccgtgatcaacaaaaagagcggcgagatcgtgcccatggaggtgaacttcaacttcgacgaccccaacctgatcatcctgcctctggcctttggcaagagacagggcagagaattcatctggaacgacctgctgtccctggaaaccggcagcctgaagctggccaacggaagagtgatcgagaagacactgtacaacagaagaacccggcaggatgagcctgccctgttcgtggccctgaccttcgagcggcgggaggtcctggactcctccaatatcaaaccaatgaacctgatcggcgtggcaagaggcgaaaacatccccgccgtgatcgccctgaccgaccccgagggctgcccactgagccggtttaaggatagcctgggaaacccaacccacatcctgagaatcggcgagagctataaggagaagcagcggaccatccaggccaagaaggaggtggagcagcggagagccggcggctacagccggaagtacgccagcaaagccaagaatctggcagacgatatggtgagaaacaccgctagagatctgctgtactacgccgtgacccaggatgccatgctgatcttcgccaacctgagccggggcttcggccggcagggcaagcggaccttcatggccgagagacagtacacacggatggaggactggctgaccgccaagctggcctacgagggcctgagcaagacctacctgtccaagacactggcccagtacacctccaagacatgcagcaactgtgggtttaccatcaccagcgccgactacgacagggtgctggagaagctgaagaagacagcaacaggctggatgaccacaattaacggcaaggagctgaaggtggagggccagattacctactacaacagatacaagagacagaacgtagtcaaggacctgtccgtcgagctggatagactgagcgaagaatctgtgaacaacgacatctcctcctggacaaagggcagaagcggagaagctctgagcctcctgaagaaaagattctcccatagacccgtgcaggagaagttcgtgtgcctgaactgcggcttcgagacacacgcagccgagcaagccgccctgaacatcgccagatcctggctgttcctgcggagccaggagtacaagaaataccagacaaacaagacaaccggcaacaccgataagagagccttcgtcgagacctggcagtccttttaccggaagaagcttaaggaggtgtggaaacctgccgtgcggtctggcggatctggcggaggctccaccagccccaagaaaaagagaaaagtctaagctgccttctgcggggcttgccttctggccatgcccttcttctctcccttgcacctgtacctcttggtctttgaataaagcctgagtaggaaggctagcaaaaaaaaaaaaaaaaaaaaaaaaaaaaaaaaaaaaaaaaaaaaaaaaaaaaaaaaaaaaaaaaaaaaaaaaaaaaaaaa

SEQ ID NO: 12360 - RNA, 5785 nt, synthetic construct
  source 1..5785: mol_type = other RNA
aggaaataagagagaaaagaagagtaagaagaaatataagagccaccatggcccctaagaagaagcgtaaagtgagccggatggaacgcctcgtctacgaggtgcggcagaagtgcagaaacatcgaggacatctgcatctcctgcggatctctgaacgtgaccctggagcacccactgttcatcggcggcatgtgccagaactgtaaaaactgttttctggagtgtgcctatcaatacgacgatgacggctaccagagctactgcaccatctgttgcggcggaagagaggtgctgatgtgtggaaataacaactgctgccggtgcttctgcgtggaatgcgtggacctgctggtgggccccggcgccgcccaggccgctattaaggaagatccttggaactgctacatgtgcggccacaagggcacatacggcctgctgagacggagagaggactggcctagcagactgcagatgttcttcgccaataaccacgaccaggagttcgacccccctaaggtgtaccctcccgtccccgccgagaagagaaagcccatccgggtcctgagcctgttcgatggcatcgccaccggtctgctggtgctgaaggacctgggcatccaggtggataggtacattgcctccgaggtgtgcgaggactccatcaccgtgggaatggtgcgtcatcagggcaagatcatgtacgtgggcgacgtgcggagcgtgacacagaagcatatccaggagtggggccctttcgacctggtgatcggcggcagcccttgcaatgacctgagcatcgtgaacccagcccggaagggcctgtacgagggaaccggcagactgttcttcgagttttacagactgctgcacgacgcccggcctaaggaaggcgacgaccggcccttcttttggctgttcgagaatgtggtggccatgggagtcagcgacaagcgggatattagccggttcctggagagcaaccccgtgatgatcgatgccaaggaagtgagcgccgcccaccgggccagatacttctggggcaatctgcctggcatgaacagacccctggccagcaccgtgaacgacaagctggagctgcaggagtgcctggagcacggccggatcgccaagttcagcaaggtgagaaccatcaccacccgaagcaacagcatcaaacaaggcaaggaccagcactttcctgtgttcatgaacgagaaggaggacatcctgtggtgtaccgagatggagagagtgttcgggttcccagtccactacacagatgtcagcaacatgtctagactggccagacagagactgctgggaagaagctggtccgtccctgtgatcagacacctgttcgcccctctgaaggagtacttcgcctgcgtgagcagcggcaacagcaacgccaacagccggggccccagcttctctagcggcctggtgccactgtccctgagagggagccacatgggccccatggagatctacaaaaccgtgagcgcctggaagcggcagcctgtgcgcgtgctgagcctgtttcggaatatcgataaagtcctgaaaagcctgggattcctggagagcggctctggctccggcggtggcaccctgaagtacgtggaggatgtgacaaacgtggtcagacgggatgtggagaagtggggccccttcgatctggtgtacggcagcacccaacccctgggcagctcttgtgaccggtgccctggctggtacatgtttcagttccaccggatcctgcagtacgccctgccgagacaggagtcccagcggccattcttttggattttcatggacaacttgctgctgaccgaggatgaccaggaaactaccactcggttcctgcagaccgaagccgtgaccctgcaggacgtgagaggccgggactaccagaacgccatgcgggtgtggtccaacatccctggactgaaaagcaagcacgcacctctgacccctaaagaagaggagtacctgcaggcccaggtgcggagcagaagcaagctggacgcccctaaggtggatctgctggtgaagaattgcctcctgcccctgagagagtacttcaagtatttcagccagaatagtctgcccctgggaggcagcggcggcggcaggcccagggccctgaagttcgtggacgtggccgtgtacttcagcagcgaggagtggggctgcctgaggcccgcccagagggccctgtacagggacgtgatgagggagacctacggccacctgggcgccctgggcttccccggccccaagcccgccctgatcagctggatggagcaggagagcgaggcctggagcagcgccgcccaggaccccgagaagggcgagaacctgggcggcgccaggggcggcccaagcagcggcgcccctcctcccagcggcggcagcccagccggctccccaacctctaccgaggagggcacctctgagtccgccacccccgagagcggccctggcacctccaccgagcccagcgagggcagcgcacccggcagccctgccggcagccccacctccacagaggagggaaccagcaccgagcccagcgaaggcagcgccccaggcaccagcaccgagcctagtgagcaggagattaaacggatcaacaagatcagaagaagacttgtgaaagacagcaacaccaagaaggccggcaagacaggccccatgaaaaccctgctggttagagtgatgacacccgatctgagagagcggctggaaaacctgagaaagaagcctgaaaatatcccccagcccatcagcaatacatctagagccaacctgaataagctgctgaccgattacaccgaaatgaagaaggcgatcctgcatgtgtactgggaagagttccagaaggaccctgtgggcctgatgagccgggtggcccagcctgccagcaagaagatcgatcagaacaagctgaaacctgagatggacgagaagggcaacctgaccaccgccggctttgcctgctctcagtgtggccagcccctgttcgtgtacaagctggagcaggtgtctgagaagggcaaggcttacaccaactacttcggacggtgcaatgtggccgagcacgaaaagctgatcctgctggcccagctgaagcccgagaaggatagcgacgaagccgtgacatatagcctgggaaagtttgggcagagggccctggatttctacagcattcatgtgaccaaggagtccacccaccccgtgaagcccctggcccagatcgccggaaacagatacgcctccggacctgtgggaaaggccctgagcgacgcatgtatgggcacaatcgcctccttcctgtctaagtaccaggacatcatcatcgaacaccagaaggtggtgaagggcaaccagaagagactggagagcctgcgggagctggccggcaaggaaaacctggaataccctagcgtgaccctgccacctcagcctcacaccaaggagggcgttgatgcctacaacgaagtgatcgcccgggtgcgaatgtgggtgaacctgaacctgtggcagaagctgaagctaagcagagatgatgccaagcctctgctgagactgaagggattcccttcctttcctctggtcgagagacaggccaacgaagtggactggtgggacatggtgtgtaacgtgaagaagctgatcaacgagaaaaaggaggatggcaaggtgttttggcagaatctggctggctacaagagacaggaagccctgagaccatacctgagcagcgaggaagatcggaagaagggaaagaaattcgctcggtaccagctgggcgacctgctgctgcacctggaaaagaagcacggcgaggactggggaaaggtgtacgacgaggcctgggagcggattgacaagaaagtggaaggcctgagcaagcacatcaagctggaagaggaacggagaagcgaggacgcccagagcaaggccgccctgaccgactggctgcgggctaaggccagcttcgtgatcgagggcctgaaggaggccgacaaggacgagttctgcagatgcgagctgaagctgcagaagtggtacggggacctgcggggaaagcccttcgccatcgaagccgagaacagcatcctggacatcagcggcttcagcaagcagtacaactgtgccttcatctggcagaaggacggcgtgaagaagctgaacctgtacctgatcatcaactacttcaagggcggcaagctgcggttcaagaagatcaaacctgaagccttcgaagccaacagattctacaccgtgatcaacaaaaagagcggcgagatcgtgcccatggaggtgaacttcaacttcgacgaccccaacctgatcatcctgcctctggcctttggcaagagacagggcagagaattcatctggaacgacctgctgtccctggaaaccggcagcctgaagctggccaacggaagagtgatcgagaagacactgtacaacagaagaacccggcaggatgagcctgccctgttcgtggccctgaccttcgagcggcgggaggtcctggactcctccaatatcaaaccaatgaacctgatcggcgtggcaagaggcgaaaacatccccgccgtgatcgccctgaccgaccccgagggctgcccactgagccggtttaaggatagcctgggaaacccaacccacatcctgagaatcggcgagagctataaggagaagcagcggaccatccaggccaagaaggaggtggagcagcggagagccggcggctacagccggaagtacgccagcaaagccaagaatctggcagacgatatggtgagaaacaccgctagagatctgctgtactacgccgtgacccaggatgccatgctgatcttcgccaacctgagccggggcttcggccggcagggcaagcggaccttcatggccgagagacagtacacacggatggaggactggctgaccgccaagctggcctacgagggcctgagcaagacctacctgtccaagacactggcccagtacacctccaagacatgcagcaactgtgggtttaccatcaccagcgccgactacgacagggtgctggagaagctgaagaagacagcaacaggctggatgaccacaattaacggcaaggagctgaaggtggagggccagattacctactacaacagatacaagagacagaacgtagtcaaggacctgtccgtcgagctggatagactgagcgaagaatctgtgaacaacgacatctcctcctggacaaagggcagaagcggagaagctctgagcctcctgaagaaaagattctcccatagacccgtgcaggagaagttcgtgtgcctgaactgcggcttcgagacacacgcagccgagcaagccgccctgaacatcgccagatcctggctgttcctgcggagccaggagtacaagaaataccagacaaacaagacaaccggcaacaccgataagagagccttcgtcgagacctggcagtccttttaccggaagaagcttaaggaggtgtggaaacctgccgtgcggtctggcggatctggcggaggctccaccagccccaagaaaaagagaaaagtctaagctgccttctgcggggcttgccttctggccatgcccttcttctctcccttgcacctgtacctcttggtctttgaataaagcctgagtaggaaggctagcaaaaaaaaaaaaaaaaaaaaaaaaaaaaaaaaaaaaaaaaaaaaaaaaaaaaaaaaaaaaaaaaaaaaaaaaaaaaaaaa

SEQ ID NO: 12361 - RNA, 5785 nt, synthetic construct
  source 1..5785: mol_type = other RNA
aggaaataagagagaaaagaagagtaagaagaaatataagagccaccatggcccctaagaagaagcgtaaagtgagccggatggaacgcctcgtctacgaggtgcggcagaagtgcagaaacatcgaggacatctgcatctcctgcggatctctgaacgtgaccctggagcacccactgttcatcggcggcatgtgccagaactgtaaaaactgttttctggagtgtgcctatcaatacgacgatgacggctaccagagctactgcaccatctgttgcggcggaagagaggtgctgatgtgtggaaataacaactgctgccggtgcttctgcgtggaatgcgtggacctgctggtgggccccggcgccgcccaggccgctattaaggaagatccttggaactgctacatgtgcggccacaagggcacatacggcctgctgagacggagagaggactggcctagcagactgcagatgttcttcgccaataaccacgaccaggagttcgacccccctaaggtgtaccctcccgtccccgccgagaagagaaagcccatccgggtcctgagcctgttcgatggcatcgccaccggtctgctggtgctgaaggacctgggcatccaggtggataggtacattgcctccgaggtgtgcgaggactccatcaccgtgggaatggtgcgtcatcagggcaagatcatgtacgtgggcgacgtgcggagcgtgacacagaagcatatccaggagtggggccctttcgacctggtgatcggcggcagcccttgcaatgacctgagcatcgtgaacccagcccggaagggcctgtacgagggaaccggcagactgttcttcgagttttacagactgctgcacgacgcccggcctaaggaaggcgacgaccggcccttcttttggctgttcgagaatgtggtggccatgggagtcagcgacaagcgggatattagccggttcctggagagcaaccccgtgatgatcgatgccaaggaagtgagcgccgcccaccgggccagatacttctggggcaatctgcctggcatgaacagacccctggccagcaccgtgaacgacaagctggagctgcaggagtgcctggagcacggccggatcgccaagttcagcaaggtgagaaccatcaccacccgaagcaacagcatcaaacaaggcaaggaccagcactttcctgtgttcatgaacgagaaggaggacatcctgtggtgtaccgagatggagagagtgttcgggttcccagtccactacacagatgtcagcaacatgtctagactggccagacagagactgctgggaagaagctggtccgtccctgtgatcagacacctgttcgcccctctgaaggagtacttcgcctgcgtgagcagcggcaacagcaacgccaacagccggggccccagcttctctagcggcctggtgccactgtccctgagagggagccacatgggccccatggagatctacaaaaccgtgagcgcctggaagcggcagcctgtgcgcgtgctgagcctgtttcggaatatcgataaagtcctgaaaagcctgggattcctggagagcggctctggctccggcggtggcaccctgaagtacgtggaggatgtgacaaacgtggtcagacgggatgtggagaagtggggccccttcgatctggtgtacggcagcacccaacccctgggcagctcttgtgaccggtgccctggctggtacatgtttcagttccaccggatcctgcagtacgccctgccgagacaggagtcccagcggccattcttttggattttcatggacaacttgctgctgaccgaggatgaccaggaaactaccactcggttcctgcagaccgaagccgtgaccctgcaggacgtgagaggccgggactaccagaacgccatgcgggtgtggtccaacatccctggactgaaaagcaagcacgcacctctgacccctaaagaagaggagtacctgcaggcccaggtgcggagcagaagcaagctggacgcccctaaggtggatctgctggtgaagaattgcctcctgcccctgagagagtacttcaagtatttcagccagaatagtctgcccctgggaggcagcggcggcggcgagcccgtgaccttcgaggacgtggccgtgtacttcagccagaaccagtgggccagcctggacagcgcccagagggccctgtacagggaggtgatgctggagaactacgccaacgtggccagcctggtgagccccttccccaggcccgacctgatcagccagctggagaggggcgaggccccctgggaccccaacccctgggaggccgaggacctgaggggcatctgccccggcggcgagaggggcggcccaagcagcggcgcccctcctcccagcggcggcagcccagccggctccccaacctctaccgaggagggcacctctgagtccgccacccccgagagcggccctggcacctccaccgagcccagcgagggcagcgcacccggcagccctgccggcagccccacctccacagaggagggaaccagcaccgagcccagcgaaggcagcgccccaggcaccagcaccgagcctagtgagcaggagattaaacggatcaacaagatcagaagaagacttgtgaaagacagcaacaccaagaaggccggcaagacaggccccatgaaaaccctgctggttagagtgatgacacccgatctgagagagcggctggaaaacctgagaaagaagcctgaaaatatcccccagcccatcagcaatacatctagagccaacctgaataagctgctgaccgattacaccgaaatgaagaaggcgatcctgcatgtgtactgggaagagttccagaaggaccctgtgggcctgatgagccgggtggcccagcctgccagcaagaagatcgatcagaacaagctgaaacctgagatggacgagaagggcaacctgaccaccgccggctttgcctgctctcagtgtggccagcccctgttcgtgtacaagctggagcaggtgtctgagaagggcaaggcttacaccaactacttcggacggtgcaatgtggccgagcacgaaaagctgatcctgctggcccagctgaagcccgagaaggatagcgacgaagccgtgacatatagcctgggaaagtttgggcagagggccctggatttctacagcattcatgtgaccaaggagtccacccaccccgtgaagcccctggcccagatcgccggaaacagatacgcctccggacctgtgggaaaggccctgagcgacgcatgtatgggcacaatcgcctccttcctgtctaagtaccaggacatcatcatcgaacaccagaaggtggtgaagggcaaccagaagagactggagagcctgcgggagctggccggcaaggaaaacctggaataccctagcgtgaccctgccacctcagcctcacaccaaggagggcgttgatgcctacaacgaagtgatcgcccgggtgcgaatgtgggtgaacctgaacctgtggcagaagctgaagctaagcagagatgatgccaagcctctgctgagactgaagggattcccttcctttcctctggtcgagagacaggccaacgaagtggactggtgggacatggtgtgtaacgtgaagaagctgatcaacgagaaaaaggaggatggcaaggtgttttggcagaatctggctggctacaagagacaggaagccctgagaccatacctgagcagcgaggaagatcggaagaagggaaagaaattcgctcggtaccagctgggcgacctgctgctgcacctggaaaagaagcacggcgaggactggggaaaggtgtacgacgaggcctgggagcggattgacaagaaagtggaaggcctgagcaagcacatcaagctggaagaggaacggagaagcgaggacgcccagagcaaggccgccctgaccgactggctgcgggctaaggccagcttcgtgatcgagggcctgaaggaggccgacaaggacgagttctgcagatgcgagctgaagctgcagaagtggtacggggacctgcggggaaagcccttcgccatcgaagccgagaacagcatcctggacatcagcggcttcagcaagcagtacaactgtgccttcatctggcagaaggacggcgtgaagaagctgaacctgtacctgatcatcaactacttcaagggcggcaagctgcggttcaagaagatcaaacctgaagccttcgaagccaacagattctacaccgtgatcaacaaaaagagcggcgagatcgtgcccatggaggtgaacttcaacttcgacgaccccaacctgatcatcctgcctctggcctttggcaagagacagggcagagaattcatctggaacgacctgctgtccctggaaaccggcagcctgaagctggccaacggaagagtgatcgagaagacactgtacaacagaagaacccggcaggatgagcctgccctgttcgtggccctgaccttcgagcggcgggaggtcctggactcctccaatatcaaaccaatgaacctgatcggcgtggcaagaggcgaaaacatccccgccgtgatcgccctgaccgaccccgagggctgcccactgagccggtttaaggatagcctgggaaacccaacccacatcctgagaatcggcgagagctataaggagaagcagcggaccatccaggccaagaaggaggtggagcagcggagagccggcggctacagccggaagtacgccagcaaagccaagaatctggcagacgatatggtgagaaacaccgctagagatctgctgtactacgccgtgacccaggatgccatgctgatcttcgccaacctgagccggggcttcggccggcagggcaagcggaccttcatggccgagagacagtacacacggatggaggactggctgaccgccaagctggcctacgagggcctgagcaagacctacctgtccaagacactggcccagtacacctccaagacatgcagcaactgtgggtttaccatcaccagcgccgactacgacagggtgctggagaagctgaagaagacagcaacaggctggatgaccacaattaacggcaaggagctgaaggtggagggccagattacctactacaacagatacaagagacagaacgtagtcaaggacctgtccgtcgagctggatagactgagcgaagaatctgtgaacaacgacatctcctcctggacaaagggcagaagcggagaagctctgagcctcctgaagaaaagattctcccatagacccgtgcaggagaagttcgtgtgcctgaactgcggcttcgagacacacgcagccgagcaagccgccctgaacatcgccagatcctggctgttcctgcggagccaggagtacaagaaataccagacaaacaagacaaccggcaacaccgataagagagccttcgtcgagacctggcagtccttttaccggaagaagcttaaggaggtgtggaaacctgccgtgcggtctggcggatctggcggaggctccaccagccccaagaaaaagagaaaagtctaagctgccttctgcggggcttgccttctggccatgcccttcttctctcccttgcacctgtacctcttggtctttgaataaagcctgagtaggaaggctagcaaaaaaaaaaaaaaaaaaaaaaaaaaaaaaaaaaaaaaaaaaaaaaaaaaaaaaaaaaaaaaaaaaaaaaaaaaaaaaaa

SEQ ID NO: 12362 - RNA, 5785 nt, synthetic construct
  source 1..5785: mol_type = other RNA
aggaaataagagagaaaagaagagtaagaagaaatataagagccaccatggcccctaagaagaagcgtaaagtgagccggatggaacgcctcgtctacgaggtgcggcagaagtgcagaaacatcgaggacatctgcatctcctgcggatctctgaacgtgaccctggagcacccactgttcatcggcggcatgtgccagaactgtaaaaactgttttctggagtgtgcctatcaatacgacgatgacggctaccagagctactgcaccatctgttgcggcggaagagaggtgctgatgtgtggaaataacaactgctgccggtgcttctgcgtggaatgcgtggacctgctggtgggccccggcgccgcccaggccgctattaaggaagatccttggaactgctacatgtgcggccacaagggcacatacggcctgctgagacggagagaggactggcctagcagactgcagatgttcttcgccaataaccacgaccaggagttcgacccccctaaggtgtaccctcccgtccccgccgagaagagaaagcccatccgggtcctgagcctgttcgatggcatcgccaccggtctgctggtgctgaaggacctgggcatccaggtggataggtacattgcctccgaggtgtgcgaggactccatcaccgtgggaatggtgcgtcatcagggcaagatcatgtacgtgggcgacgtgcggagcgtgacacagaagcatatccaggagtggggccctttcgacctggtgatcggcggcagcccttgcaatgacctgagcatcgtgaacccagcccggaagggcctgtacgagggaaccggcagactgttcttcgagttttacagactgctgcacgacgcccggcctaaggaaggcgacgaccggcccttcttttggctgttcgagaatgtggtggccatgggagtcagcgacaagcgggatattagccggttcctggagagcaaccccgtgatgatcgatgccaaggaagtgagcgccgcccaccgggccagatacttctggggcaatctgcctggcatgaacagacccctggccagcaccgtgaacgacaagctggagctgcaggagtgcctggagcacggccggatcgccaagttcagcaaggtgagaaccatcaccacccgaagcaacagcatcaaacaaggcaaggaccagcactttcctgtgttcatgaacgagaaggaggacatcctgtggtgtaccgagatggagagagtgttcgggttcccagtccactacacagatgtcagcaacatgtctagactggccagacagagactgctgggaagaagctggtccgtccctgtgatcagacacctgttcgcccctctgaaggagtacttcgcctgcgtgagcagcggcaacagcaacgccaacagccggggccccagcttctctagcggcctggtgccactgtccctgagagggagccacatgggccccatggagatctacaaaaccgtgagcgcctggaagcggcagcctgtgcgcgtgctgagcctgtttcggaatatcgataaagtcctgaaaagcctgggattcctggagagcggctctggctccggcggtggcaccctgaagtacgtggaggatgtgacaaacgtggtcagacgggatgtggagaagtggggccccttcgatctggtgtacggcagcacccaacccctgggcagctcttgtgaccggtgccctggctggtacatgtttcagttccaccggatcctgcagtacgccctgccgagacaggagtcccagcggccattcttttggattttcatggacaacttgctgctgaccgaggatgaccaggaaactaccactcggttcctgcagaccgaagccgtgaccctgcaggacgtgagaggccgggactaccagaacgccatgcgggtgtggtccaacatccctggactgaaaagcaagcacgcacctctgacccctaaagaagaggagtacctgcaggcccaggtgcggagcagaagcaagctggacgcccctaaggtggatctgctggtgaagaattgcctcctgcccctgagagagtacttcaagtatttcagccagaatagtctgcccctgggaggcagcggcggcggcatccacgagagcgtgaccttcgaggacgtggccgtgaacttcaccgacagggagtggcagtgcctgacccacgcccagaggcacctgtacaaggacgtgatgctggagaactacggcaacatggtgagcctgggcttccccttccccaagccccccctgatcagccacctggagagggagaccgagccctgggtgcaggacctgcaggacagggagagcctgagcagcttctaccccgtgagcggcggcccaagcagcggcgcccctcctcccagcggcggcagcccagccggctccccaacctctaccgaggagggcacctctgagtccgccacccccgagagcggccctggcacctccaccgagcccagcgagggcagcgcacccggcagccctgccggcagccccacctccacagaggagggaaccagcaccgagcccagcgaaggcagcgccccaggcaccagcaccgagcctagtgagcaggagattaaacggatcaacaagatcagaagaagacttgtgaaagacagcaacaccaagaaggccggcaagacaggccccatgaaaaccctgctggttagagtgatgacacccgatctgagagagcggctggaaaacctgagaaagaagcctgaaaatatcccccagcccatcagcaatacatctagagccaacctgaataagctgctgaccgattacaccgaaatgaagaaggcgatcctgcatgtgtactgggaagagttccagaaggaccctgtgggcctgatgagccgggtggcccagcctgccagcaagaagatcgatcagaacaagctgaaacctgagatggacgagaagggcaacctgaccaccgccggctttgcctgctctcagtgtggccagcccctgttcgtgtacaagctggagcaggtgtctgagaagggcaaggcttacaccaactacttcggacggtgcaatgtggccgagcacgaaaagctgatcctgctggcccagctgaagcccgagaaggatagcgacgaagccgtgacatatagcctgggaaagtttgggcagagggccctggatttctacagcattcatgtgaccaaggagtccacccaccccgtgaagcccctggcccagatcgccggaaacagatacgcctccggacctgtgggaaaggccctgagcgacgcatgtatgggcacaatcgcctccttcctgtctaagtaccaggacatcatcatcgaacaccagaaggtggtgaagggcaaccagaagagactggagagcctgcgggagctggccggcaaggaaaacctggaataccctagcgtgaccctgccacctcagcctcacaccaaggagggcgttgatgcctacaacgaagtgatcgcccgggtgcgaatgtgggtgaacctgaacctgtggcagaagctgaagctaagcagagatgatgccaagcctctgctgagactgaagggattcccttcctttcctctggtcgagagacaggccaacgaagtggactggtgggacatggtgtgtaacgtgaagaagctgatcaacgagaaaaaggaggatggcaaggtgttttggcagaatctggctggctacaagagacaggaagccctgagaccatacctgagcagcgaggaagatcggaagaagggaaagaaattcgctcggtaccagctgggcgacctgctgctgcacctggaaaagaagcacggcgaggactggggaaaggtgtacgacgaggcctgggagcggattgacaagaaagtggaaggcctgagcaagcacatcaagctggaagaggaacggagaagcgaggacgcccagagcaaggccgccctgaccgactggctgcgggctaaggccagcttcgtgatcgagggcctgaaggaggccgacaaggacgagttctgcagatgcgagctgaagctgcagaagtggtacggggacctgcggggaaagcccttcgccatcgaagccgagaacagcatcctggacatcagcggcttcagcaagcagtacaactgtgccttcatctggcagaaggacggcgtgaagaagctgaacctgtacctgatcatcaactacttcaagggcggcaagctgcggttcaagaagatcaaacctgaagccttcgaagccaacagattctacaccgtgatcaacaaaaagagcggcgagatcgtgcccatggaggtgaacttcaacttcgacgaccccaacctgatcatcctgcctctggcctttggcaagagacagggcagagaattcatctggaacgacctgctgtccctggaaaccggcagcctgaagctggccaacggaagagtgatcgagaagacactgtacaacagaagaacccggcaggatgagcctgccctgttcgtggccctgaccttcgagcggcgggaggtcctggactcctccaatatcaaaccaatgaacctgatcggcgtggcaagaggcgaaaacatccccgccgtgatcgccctgaccgaccccgagggctgcccactgagccggtttaaggatagcctgggaaacccaacccacatcctgagaatcggcgagagctataaggagaagcagcggaccatccaggccaagaaggaggtggagcagcggagagccggcggctacagccggaagtacgccagcaaagccaagaatctggcagacgatatggtgagaaacaccgctagagatctgctgtactacgccgtgacccaggatgccatgctgatcttcgccaacctgagccggggcttcggccggcagggcaagcggaccttcatggccgagagacagtacacacggatggaggactggctgaccgccaagctggcctacgagggcctgagcaagacctacctgtccaagacactggcccagtacacctccaagacatgcagcaactgtgggtttaccatcaccagcgccgactacgacagggtgctggagaagctgaagaagacagcaacaggctggatgaccacaattaacggcaaggagctgaaggtggagggccagattacctactacaacagatacaagagacagaacgtagtcaaggacctgtccgtcgagctggatagactgagcgaagaatctgtgaacaacgacatctcctcctggacaaagggcagaagcggagaagctctgagcctcctgaagaaaagattctcccatagacccgtgcaggagaagttcgtgtgcctgaactgcggcttcgagacacacgcagccgagcaagccgccctgaacatcgccagatcctggctgttcctgcggagccaggagtacaagaaataccagacaaacaagacaaccggcaacaccgataagagagccttcgtcgagacctggcagtccttttaccggaagaagcttaaggaggtgtggaaacctgccgtgcggtctggcggatctggcggaggctccaccagccccaagaaaaagagaaaagtctaagctgccttctgcggggcttgccttctggccatgcccttcttctctcccttgcacctgtacctcttggtctttgaataaagcctgagtaggaaggctagcaaaaaaaaaaaaaaaaaaaaaaaaaaaaaaaaaaaaaaaaaaaaaaaaaaaaaaaaaaaaaaaaaaaaaaaaaaaaaaaa

SEQ ID NO: 12363 - RNA, 5785 nt, synthetic construct
  source 1..5785: mol_type = other RNA
aggaaataagagagaaaagaagagtaagaagaaatataagagccaccatggcccctaagaagaagcgtaaagtgagccggatggaacgcctcgtctacgaggtgcggcagaagtgcagaaacatcgaggacatctgcatctcctgcggatctctgaacgtgaccctggagcacccactgttcatcggcggcatgtgccagaactgtaaaaactgttttctggagtgtgcctatcaatacgacgatgacggctaccagagctactgcaccatctgttgcggcggaagagaggtgctgatgtgtggaaataacaactgctgccggtgcttctgcgtggaatgcgtggacctgctggtgggccccggcgccgcccaggccgctattaaggaagatccttggaactgctacatgtgcggccacaagggcacatacggcctgctgagacggagagaggactggcctagcagactgcagatgttcttcgccaataaccacgaccaggagttcgacccccctaaggtgtaccctcccgtccccgccgagaagagaaagcccatccgggtcctgagcctgttcgatggcatcgccaccggtctgctggtgctgaaggacctgggcatccaggtggataggtacattgcctccgaggtgtgcgaggactccatcaccgtgggaatggtgcgtcatcagggcaagatcatgtacgtgggcgacgtgcggagcgtgacacagaagcatatccaggagtggggccctttcgacctggtgatcggcggcagcccttgcaatgacctgagcatcgtgaacccagcccggaagggcctgtacgagggaaccggcagactgttcttcgagttttacagactgctgcacgacgcccggcctaaggaaggcgacgaccggcccttcttttggctgttcgagaatgtggtggccatgggagtcagcgacaagcgggatattagccggttcctggagagcaaccccgtgatgatcgatgccaaggaagtgagcgccgcccaccgggccagatacttctggggcaatctgcctggcatgaacagacccctggccagcaccgtgaacgacaagctggagctgcaggagtgcctggagcacggccggatcgccaagttcagcaaggtgagaaccatcaccacccgaagcaacagcatcaaacaaggcaaggaccagcactttcctgtgttcatgaacgagaaggaggacatcctgtggtgtaccgagatggagagagtgttcgggttcccagtccactacacagatgtcagcaacatgtctagactggccagacagagactgctgggaagaagctggtccgtccctgtgatcagacacctgttcgcccctctgaaggagtacttcgcctgcgtgagcagcggcaacagcaacgccaacagccggggccccagcttctctagcggcctggtgccactgtccctgagagggagccacatgggccccatggagatctacaaaaccgtgagcgcctggaagcggcagcctgtgcgcgtgctgagcctgtttcggaatatcgataaagtcctgaaaagcctgggattcctggagagcggctctggctccggcggtggcaccctgaagtacgtggaggatgtgacaaacgtggtcagacgggatgtggagaagtggggccccttcgatctggtgtacggcagcacccaacccctgggcagctcttgtgaccggtgccctggctggtacatgtttcagttccaccggatcctgcagtacgccctgccgagacaggagtcccagcggccattcttttggattttcatggacaacttgctgctgaccgaggatgaccaggaaactaccactcggttcctgcagaccgaagccgtgaccctgcaggacgtgagaggccgggactaccagaacgccatgcgggtgtggtccaacatccctggactgaaaagcaagcacgcacctctgacccctaaagaagaggagtacctgcaggcccaggtgcggagcagaagcaagctggacgcccctaaggtggatctgctggtgaagaattgcctcctgcccctgagagagtacttcaagtatttcagccagaatagtctgcccctgggaggcagcggcggcggcagccaggagcaggtgagcttcaaggacgtgtgcgtggacttcaccagggaggagtggtacctgctggaccccgcccagaagatcctgtacagggacgtgatcctggagaactacagccacctggtgagcgtgggcaactgcatcaccaagcccgaggtgatcttcaagatcgagcagggcgaggagccctggatcctggaggagaggttccccaagcagtgctgcagcgagaggaactggaagggcggcccaagcagcggcgcccctcctcccagcggcggcagcccagccggctccccaacctctaccgaggagggcacctctgagtccgccacccccgagagcggccctggcacctccaccgagcccagcgagggcagcgcacccggcagccctgccggcagccccacctccacagaggagggaaccagcaccgagcccagcgaaggcagcgccccaggcaccagcaccgagcctagtgagcaggagattaaacggatcaacaagatcagaagaagacttgtgaaagacagcaacaccaagaaggccggcaagacaggccccatgaaaaccctgctggttagagtgatgacacccgatctgagagagcggctggaaaacctgagaaagaagcctgaaaatatcccccagcccatcagcaatacatctagagccaacctgaataagctgctgaccgattacaccgaaatgaagaaggcgatcctgcatgtgtactgggaagagttccagaaggaccctgtgggcctgatgagccgggtggcccagcctgccagcaagaagatcgatcagaacaagctgaaacctgagatggacgagaagggcaacctgaccaccgccggctttgcctgctctcagtgtggccagcccctgttcgtgtacaagctggagcaggtgtctgagaagggcaaggcttacaccaactacttcggacggtgcaatgtggccgagcacgaaaagctgatcctgctggcccagctgaagcccgagaaggatagcgacgaagccgtgacatatagcctgggaaagtttgggcagagggccctggatttctacagcattcatgtgaccaaggagtccacccaccccgtgaagcccctggcccagatcgccggaaacagatacgcctccggacctgtgggaaaggccctgagcgacgcatgtatgggcacaatcgcctccttcctgtctaagtaccaggacatcatcatcgaacaccagaaggtggtgaagggcaaccagaagagactggagagcctgcgggagctggccggcaaggaaaacctggaataccctagcgtgaccctgccacctcagcctcacaccaaggagggcgttgatgcctacaacgaagtgatcgcccgggtgcgaatgtgggtgaacctgaacctgtggcagaagctgaagctaagcagagatgatgccaagcctctgctgagactgaagggattcccttcctttcctctggtcgagagacaggccaacgaagtggactggtgggacatggtgtgtaacgtgaagaagctgatcaacgagaaaaaggaggatggcaaggtgttttggcagaatctggctggctacaagagacaggaagccctgagaccatacctgagcagcgaggaagatcggaagaagggaaagaaattcgctcggtaccagctgggcgacctgctgctgcacctggaaaagaagcacggcgaggactggggaaaggtgtacgacgaggcctgggagcggattgacaagaaagtggaaggcctgagcaagcacatcaagctggaagaggaacggagaagcgaggacgcccagagcaaggccgccctgaccgactggctgcgggctaaggccagcttcgtgatcgagggcctgaaggaggccgacaaggacgagttctgcagatgcgagctgaagctgcagaagtggtacggggacctgcggggaaagcccttcgccatcgaagccgagaacagcatcctggacatcagcggcttcagcaagcagtacaactgtgccttcatctggcagaaggacggcgtgaagaagctgaacctgtacctgatcatcaactacttcaagggcggcaagctgcggttcaagaagatcaaacctgaagccttcgaagccaacagattctacaccgtgatcaacaaaaagagcggcgagatcgtgcccatggaggtgaacttcaacttcgacgaccccaacctgatcatcctgcctctggcctttggcaagagacagggcagagaattcatctggaacgacctgctgtccctggaaaccggcagcctgaagctggccaacggaagagtgatcgagaagacactgtacaacagaagaacccggcaggatgagcctgccctgttcgtggccctgaccttcgagcggcgggaggtcctggactcctccaatatcaaaccaatgaacctgatcggcgtggcaagaggcgaaaacatccccgccgtgatcgccctgaccgaccccgagggctgcccactgagccggtttaaggatagcctgggaaacccaacccacatcctgagaatcggcgagagctataaggagaagcagcggaccatccaggccaagaaggaggtggagcagcggagagccggcggctacagccggaagtacgccagcaaagccaagaatctggcagacgatatggtgagaaacaccgctagagatctgctgtactacgccgtgacccaggatgccatgctgatcttcgccaacctgagccggggcttcggccggcagggcaagcggaccttcatggccgagagacagtacacacggatggaggactggctgaccgccaagctggcctacgagggcctgagcaagacctacctgtccaagacactggcccagtacacctccaagacatgcagcaactgtgggtttaccatcaccagcgccgactacgacagggtgctggagaagctgaagaagacagcaacaggctggatgaccacaattaacggcaaggagctgaaggtggagggccagattacctactacaacagatacaagagacagaacgtagtcaaggacctgtccgtcgagctggatagactgagcgaagaatctgtgaacaacgacatctcctcctggacaaagggcagaagcggagaagctctgagcctcctgaagaaaagattctcccatagacccgtgcaggagaagttcgtgtgcctgaactgcggcttcgagacacacgcagccgagcaagccgccctgaacatcgccagatcctggctgttcctgcggagccaggagtacaagaaataccagacaaacaagacaaccggcaacaccgataagagagccttcgtcgagacctggcagtccttttaccggaagaagcttaaggaggtgtggaaacctgccgtgcggtctggcggatctggcggaggctccaccagccccaagaaaaagagaaaagtctaagctgccttctgcggggcttgccttctggccatgcccttcttctctcccttgcacctgtacctcttggtctttgaataaagcctgagtaggaaggctagcaaaaaaaaaaaaaaaaaaaaaaaaaaaaaaaaaaaaaaaaaaaaaaaaaaaaaaaaaaaaaaaaaaaaaaaaaaaaaaaa

SEQ ID NO: 12364 - RNA, 5782 nt, synthetic construct
  source 1..5782: mol_type = other RNA
aggaaataagagagaaaagaagagtaagaagaaatataagagccaccatggcccctaagaagaagcgtaaagtgagccggatggaacgcctcgtctacgaggtgcggcagaagtgcagaaacatcgaggacatctgcatctcctgcggatctctgaacgtgaccctggagcacccactgttcatcggcggcatgtgccagaactgtaaaaactgttttctggagtgtgcctatcaatacgacgatgacggctaccagagctactgcaccatctgttgcggcggaagagaggtgctgatgtgtggaaataacaactgctgccggtgcttctgcgtggaatgcgtggacctgctggtgggccccggcgccgcccaggccgctattaaggaagatccttggaactgctacatgtgcggccacaagggcacatacggcctgctgagacggagagaggactggcctagcagactgcagatgttcttcgccaataaccacgaccaggagttcgacccccctaaggtgtaccctcccgtccccgccgagaagagaaagcccatccgggtcctgagcctgttcgatggcatcgccaccggtctgctggtgctgaaggacctgggcatccaggtggataggtacattgcctccgaggtgtgcgaggactccatcaccgtgggaatggtgcgtcatcagggcaagatcatgtacgtgggcgacgtgcggagcgtgacacagaagcatatccaggagtggggccctttcgacctggtgatcggcggcagcccttgcaatgacctgagcatcgtgaacccagcccggaagggcctgtacgagggaaccggcagactgttcttcgagttttacagactgctgcacgacgcccggcctaaggaaggcgacgaccggcccttcttttggctgttcgagaatgtggtggccatgggagtcagcgacaagcgggatattagccggttcctggagagcaaccccgtgatgatcgatgccaaggaagtgagcgccgcccaccgggccagatacttctggggcaatctgcctggcatgaacagacccctggccagcaccgtgaacgacaagctggagctgcaggagtgcctggagcacggccggatcgccaagttcagcaaggtgagaaccatcaccacccgaagcaacagcatcaaacaaggcaaggaccagcactttcctgtgttcatgaacgagaaggaggacatcctgtggtgtaccgagatggagagagtgttcgggttcccagtccactacacagatgtcagcaacatgtctagactggccagacagagactgctgggaagaagctggtccgtccctgtgatcagacacctgttcgcccctctgaaggagtacttcgcctgcgtgagcagcggcaacagcaacgccaacagccggggccccagcttctctagcggcctggtgccactgtccctgagagggagccacatgggccccatggagatctacaaaaccgtgagcgcctggaagcggcagcctgtgcgcgtgctgagcctgtttcggaatatcgataaagtcctgaaaagcctgggattcctggagagcggctctggctccggcggtggcaccctgaagtacgtggaggatgtgacaaacgtggtcagacgggatgtggagaagtggggccccttcgatctggtgtacggcagcacccaacccctgggcagctcttgtgaccggtgccctggctggtacatgtttcagttccaccggatcctgcagtacgccctgccgagacaggagtcccagcggccattcttttggattttcatggacaacttgctgctgaccgaggatgaccaggaaactaccactcggttcctgcagaccgaagccgtgaccctgcaggacgtgagaggccgggactaccagaacgccatgcgggtgtggtccaacatccctggactgaaaagcaagcacgcacctctgacccctaaagaagaggagtacctgcaggcccaggtgcggagcagaagcaagctggacgcccctaaggtggatctgctggtgaagaattgcctcctgcccctgagagagtacttcaagtatttcagccagaatagtctgcccctgggaggcagcggcggcggccaggaccccagcgccgagggcctgagcgaggaggtgcccgtggtgttcgaggagctgcccgtggtgttcgaggacgtggccgtgtacttcaccagagaggagtggggcatgctggacaagagacagaaggagctgtacagagacgtgatgagaatgaactacgagctgctggccagcctgggccccgccgccgccaagcccgacctgatcagcaagctggagagaagagccgccccctggggcggcccaagcagcggcgcccctcctcccagcggcggcagcccagccggctccccaacctctaccgaggagggcacctctgagtccgccacccccgagagcggccctggcacctccaccgagcccagcgagggcagcgcacccggcagccctgccggcagccccacctccacagaggagggaaccagcaccgagcccagcgaaggcagcgccccaggcaccagcaccgagcctagtgagcaggagattaaacggatcaacaagatcagaagaagacttgtgaaagacagcaacaccaagaaggccggcaagacaggccccatgaaaaccctgctggttagagtgatgacacccgatctgagagagcggctggaaaacctgagaaagaagcctgaaaatatcccccagcccatcagcaatacatctagagccaacctgaataagctgctgaccgattacaccgaaatgaagaaggcgatcctgcatgtgtactgggaagagttccagaaggaccctgtgggcctgatgagccgggtggcccagcctgccagcaagaagatcgatcagaacaagctgaaacctgagatggacgagaagggcaacctgaccaccgccggctttgcctgctctcagtgtggccagcccctgttcgtgtacaagctggagcaggtgtctgagaagggcaaggcttacaccaactacttcggacggtgcaatgtggccgagcacgaaaagctgatcctgctggcccagctgaagcccgagaaggatagcgacgaagccgtgacatatagcctgggaaagtttgggcagagggccctggatttctacagcattcatgtgaccaaggagtccacccaccccgtgaagcccctggcccagatcgccggaaacagatacgcctccggacctgtgggaaaggccctgagcgacgcatgtatgggcacaatcgcctccttcctgtctaagtaccaggacatcatcatcgaacaccagaaggtggtgaagggcaaccagaagagactggagagcctgcgggagctggccggcaaggaaaacctggaataccctagcgtgaccctgccacctcagcctcacaccaaggagggcgttgatgcctacaacgaagtgatcgcccgggtgcgaatgtgggtgaacctgaacctgtggcagaagctgaagctaagcagagatgatgccaagcctctgctgagactgaagggattcccttcctttcctctggtcgagagacaggccaacgaagtggactggtgggacatggtgtgtaacgtgaagaagctgatcaacgagaaaaaggaggatggcaaggtgttttggcagaatctggctggctacaagagacaggaagccctgagaccatacctgagcagcgaggaagatcggaagaagggaaagaaattcgctcggtaccagctgggcgacctgctgctgcacctggaaaagaagcacggcgaggactggggaaaggtgtacgacgaggcctgggagcggattgacaagaaagtggaaggcctgagcaagcacatcaagctggaagaggaacggagaagcgaggacgcccagagcaaggccgccctgaccgactggctgcgggctaaggccagcttcgtgatcgagggcctgaaggaggccgacaaggacgagttctgcagatgcgagctgaagctgcagaagtggtacggggacctgcggggaaagcccttcgccatcgaagccgagaacagcatcctggacatcagcggcttcagcaagcagtacaactgtgccttcatctggcagaaggacggcgtgaagaagctgaacctgtacctgatcatcaactacttcaagggcggcaagctgcggttcaagaagatcaaacctgaagccttcgaagccaacagattctacaccgtgatcaacaaaaagagcggcgagatcgtgcccatggaggtgaacttcaacttcgacgaccccaacctgatcatcctgcctctggcctttggcaagagacagggcagagaattcatctggaacgacctgctgtccctggaaaccggcagcctgaagctggccaacggaagagtgatcgagaagacactgtacaacagaagaacccggcaggatgagcctgccctgttcgtggccctgaccttcgagcggcgggaggtcctggactcctccaatatcaaaccaatgaacctgatcggcgtggcaagaggcgaaaacatccccgccgtgatcgccctgaccgaccccgagggctgcccactgagccggtttaaggatagcctgggaaacccaacccacatcctgagaatcggcgagagctataaggagaagcagcggaccatccaggccaagaaggaggtggagcagcggagagccggcggctacagccggaagtacgccagcaaagccaagaatctggcagacgatatggtgagaaacaccgctagagatctgctgtactacgccgtgacccaggatgccatgctgatcttcgccaacctgagccggggcttcggccggcagggcaagcggaccttcatggccgagagacagtacacacggatggaggactggctgaccgccaagctggcctacgagggcctgagcaagacctacctgtccaagacactggcccagtacacctccaagacatgcagcaactgtgggtttaccatcaccagcgccgactacgacagggtgctggagaagctgaagaagacagcaacaggctggatgaccacaattaacggcaaggagctgaaggtggagggccagattacctactacaacagatacaagagacagaacgtagtcaaggacctgtccgtcgagctggatagactgagcgaagaatctgtgaacaacgacatctcctcctggacaaagggcagaagcggagaagctctgagcctcctgaagaaaagattctcccatagacccgtgcaggagaagttcgtgtgcctgaactgcggcttcgagacacacgcagccgagcaagccgccctgaacatcgccagatcctggctgttcctgcggagccaggagtacaagaaataccagacaaacaagacaaccggcaacaccgataagagagccttcgtcgagacctggcagtccttttaccggaagaagcttaaggaggtgtggaaacctgccgtgcggtctggcggatctggcggaggctccaccagccccaagaaaaagagaaaagtctaagctgccttctgcggggcttgccttctggccatgcccttcttctctcccttgcacctgtacctcttggtctttgaataaagcctgagtaggaaggctagcaaaaaaaaaaaaaaaaaaaaaaaaaaaaaaaaaaaaaaaaaaaaaaaaaaaaaaaaaaaaaaaaaaaaaaaaaaaaaaaa

SEQ ID NO: 12365 - RNA, 5785 nt, synthetic construct
  source 1..5785: mol_type = other RNA
aggaaataagagagaaaagaagagtaagaagaaatataagagccaccatggcccctaagaagaagcgtaaagtgagccggatggaacgcctcgtctacgaggtgcggcagaagtgcagaaacatcgaggacatctgcatctcctgcggatctctgaacgtgaccctggagcacccactgttcatcggcggcatgtgccagaactgtaaaaactgttttctggagtgtgcctatcaatacgacgatgacggctaccagagctactgcaccatctgttgcggcggaagagaggtgctgatgtgtggaaataacaactgctgccggtgcttctgcgtggaatgcgtggacctgctggtgggccccggcgccgcccaggccgctattaaggaagatccttggaactgctacatgtgcggccacaagggcacatacggcctgctgagacggagagaggactggcctagcagactgcagatgttcttcgccaataaccacgaccaggagttcgacccccctaaggtgtaccctcccgtccccgccgagaagagaaagcccatccgggtcctgagcctgttcgatggcatcgccaccggtctgctggtgctgaaggacctgggcatccaggtggataggtacattgcctccgaggtgtgcgaggactccatcaccgtgggaatggtgcgtcatcagggcaagatcatgtacgtgggcgacgtgcggagcgtgacacagaagcatatccaggagtggggccctttcgacctggtgatcggcggcagcccttgcaatgacctgagcatcgtgaacccagcccggaagggcctgtacgagggaaccggcagactgttcttcgagttttacagactgctgcacgacgcccggcctaaggaaggcgacgaccggcccttcttttggctgttcgagaatgtggtggccatgggagtcagcgacaagcgggatattagccggttcctggagagcaaccccgtgatgatcgatgccaaggaagtgagcgccgcccaccgggccagatacttctggggcaatctgcctggcatgaacagacccctggccagcaccgtgaacgacaagctggagctgcaggagtgcctggagcacggccggatcgccaagttcagcaaggtgagaaccatcaccacccgaagcaacagcatcaaacaaggcaaggaccagcactttcctgtgttcatgaacgagaaggaggacatcctgtggtgtaccgagatggagagagtgttcgggttcccagtccactacacagatgtcagcaacatgtctagactggccagacagagactgctgggaagaagctggtccgtccctgtgatcagacacctgttcgcccctctgaaggagtacttcgcctgcgtgagcagcggcaacagcaacgccaacagccggggccccagcttctctagcggcctggtgccactgtccctgagagggagccacatgggccccatggagatctacaaaaccgtgagcgcctggaagcggcagcctgtgcgcgtgctgagcctgtttcggaatatcgataaagtcctgaaaagcctgggattcctggagagcggctctggctccggcggtggcaccctgaagtacgtggaggatgtgacaaacgtggtcagacgggatgtggagaagtggggccccttcgatctggtgtacggcagcacccaacccctgggcagctcttgtgaccggtgccctggctggtacatgtttcagttccaccggatcctgcagtacgccctgccgagacaggagtcccagcggccattcttttggattttcatggacaacttgctgctgaccgaggatgaccaggaaactaccactcggttcctgcagaccgaagccgtgaccctgcaggacgtgagaggccgggactaccagaacgccatgcgggtgtggtccaacatccctggactgaaaagcaagcacgcacctctgacccctaaagaagaggagtacctgcaggcccaggtgcggagcagaagcaagctggacgcccctaaggtggatctgctggtgaagaattgcctcctgcccctgagagagtacttcaagtatttcagccagaatagtctgcccctgggaggcagcggcggcggcgtggtggagcccgtgagcttcgaggaggtggccgtgtacttcagcgaggaggagtgggccctgctggaccccggccagagggccctgtactgggccgtgatgcaggagaactacgaggccgtgagctggctgggcttcagcatccccaagcccgacctgatcacccagctggacaggggcgaggagccctgggtgcccgacctgcagcccagcaagaagctggagatcctgaggggcaccaggggcggcccaagcagcggcgcccctcctcccagcggcggcagcccagccggctccccaacctctaccgaggagggcacctctgagtccgccacccccgagagcggccctggcacctccaccgagcccagcgagggcagcgcacccggcagccctgccggcagccccacctccacagaggagggaaccagcaccgagcccagcgaaggcagcgccccaggcaccagcaccgagcctagtgagcaggagattaaacggatcaacaagatcagaagaagacttgtgaaagacagcaacaccaagaaggccggcaagacaggccccatgaaaaccctgctggttagagtgatgacacccgatctgagagagcggctggaaaacctgagaaagaagcctgaaaatatcccccagcccatcagcaatacatctagagccaacctgaataagctgctgaccgattacaccgaaatgaagaaggcgatcctgcatgtgtactgggaagagttccagaaggaccctgtgggcctgatgagccgggtggcccagcctgccagcaagaagatcgatcagaacaagctgaaacctgagatggacgagaagggcaacctgaccaccgccggctttgcctgctctcagtgtggccagcccctgttcgtgtacaagctggagcaggtgtctgagaagggcaaggcttacaccaactacttcggacggtgcaatgtggccgagcacgaaaagctgatcctgctggcccagctgaagcccgagaaggatagcgacgaagccgtgacatatagcctgggaaagtttgggcagagggccctggatttctacagcattcatgtgaccaaggagtccacccaccccgtgaagcccctggcccagatcgccggaaacagatacgcctccggacctgtgggaaaggccctgagcgacgcatgtatgggcacaatcgcctccttcctgtctaagtaccaggacatcatcatcgaacaccagaaggtggtgaagggcaaccagaagagactggagagcctgcgggagctggccggcaaggaaaacctggaataccctagcgtgaccctgccacctcagcctcacaccaaggagggcgttgatgcctacaacgaagtgatcgcccgggtgcgaatgtgggtgaacctgaacctgtggcagaagctgaagctaagcagagatgatgccaagcctctgctgagactgaagggattcccttcctttcctctggtcgagagacaggccaacgaagtggactggtgggacatggtgtgtaacgtgaagaagctgatcaacgagaaaaaggaggatggcaaggtgttttggcagaatctggctggctacaagagacaggaagccctgagaccatacctgagcagcgaggaagatcggaagaagggaaagaaattcgctcggtaccagctgggcgacctgctgctgcacctggaaaagaagcacggcgaggactggggaaaggtgtacgacgaggcctgggagcggattgacaagaaagtggaaggcctgagcaagcacatcaagctggaagaggaacggagaagcgaggacgcccagagcaaggccgccctgaccgactggctgcgggctaaggccagcttcgtgatcgagggcctgaaggaggccgacaaggacgagttctgcagatgcgagctgaagctgcagaagtggtacggggacctgcggggaaagcccttcgccatcgaagccgagaacagcatcctggacatcagcggcttcagcaagcagtacaactgtgccttcatctggcagaaggacggcgtgaagaagctgaacctgtacctgatcatcaactacttcaagggcggcaagctgcggttcaagaagatcaaacctgaagccttcgaagccaacagattctacaccgtgatcaacaaaaagagcggcgagatcgtgcccatggaggtgaacttcaacttcgacgaccccaacctgatcatcctgcctctggcctttggcaagagacagggcagagaattcatctggaacgacctgctgtccctggaaaccggcagcctgaagctggccaacggaagagtgatcgagaagacactgtacaacagaagaacccggcaggatgagcctgccctgttcgtggccctgaccttcgagcggcgggaggtcctggactcctccaatatcaaaccaatgaacctgatcggcgtggcaagaggcgaaaacatccccgccgtgatcgccctgaccgaccccgagggctgcccactgagccggtttaaggatagcctgggaaacccaacccacatcctgagaatcggcgagagctataaggagaagcagcggaccatccaggccaagaaggaggtggagcagcggagagccggcggctacagccggaagtacgccagcaaagccaagaatctggcagacgatatggtgagaaacaccgctagagatctgctgtactacgccgtgacccaggatgccatgctgatcttcgccaacctgagccggggcttcggccggcagggcaagcggaccttcatggccgagagacagtacacacggatggaggactggctgaccgccaagctggcctacgagggcctgagcaagacctacctgtccaagacactggcccagtacacctccaagacatgcagcaactgtgggtttaccatcaccagcgccgactacgacagggtgctggagaagctgaagaagacagcaacaggctggatgaccacaattaacggcaaggagctgaaggtggagggccagattacctactacaacagatacaagagacagaacgtagtcaaggacctgtccgtcgagctggatagactgagcgaagaatctgtgaacaacgacatctcctcctggacaaagggcagaagcggagaagctctgagcctcctgaagaaaagattctcccatagacccgtgcaggagaagttcgtgtgcctgaactgcggcttcgagacacacgcagccgagcaagccgccctgaacatcgccagatcctggctgttcctgcggagccaggagtacaagaaataccagacaaacaagacaaccggcaacaccgataagagagccttcgtcgagacctggcagtccttttaccggaagaagcttaaggaggtgtggaaacctgccgtgcggtctggcggatctggcggaggctccaccagccccaagaaaaagagaaaagtctaagctgccttctgcggggcttgccttctggccatgcccttcttctctcccttgcacctgtacctcttggtctttgaataaagcctgagtaggaaggctagcaaaaaaaaaaaaaaaaaaaaaaaaaaaaaaaaaaaaaaaaaaaaaaaaaaaaaaaaaaaaaaaaaaaaaaaaaaaaaaaa

SEQ ID NO: 12366 - RNA, 5785 nt, synthetic construct
  source 1..5785: mol_type = other RNA
aggaaataagagagaaaagaagagtaagaagaaatataagagccaccatggcccctaagaagaagcgtaaagtgagccggatggaacgcctcgtctacgaggtgcggcagaagtgcagaaacatcgaggacatctgcatctcctgcggatctctgaacgtgaccctggagcacccactgttcatcggcggcatgtgccagaactgtaaaaactgttttctggagtgtgcctatcaatacgacgatgacggctaccagagctactgcaccatctgttgcggcggaagagaggtgctgatgtgtggaaataacaactgctgccggtgcttctgcgtggaatgcgtggacctgctggtgggccccggcgccgcccaggccgctattaaggaagatccttggaactgctacatgtgcggccacaagggcacatacggcctgctgagacggagagaggactggcctagcagactgcagatgttcttcgccaataaccacgaccaggagttcgacccccctaaggtgtaccctcccgtccccgccgagaagagaaagcccatccgggtcctgagcctgttcgatggcatcgccaccggtctgctggtgctgaaggacctgggcatccaggtggataggtacattgcctccgaggtgtgcgaggactccatcaccgtgggaatggtgcgtcatcagggcaagatcatgtacgtgggcgacgtgcggagcgtgacacagaagcatatccaggagtggggccctttcgacctggtgatcggcggcagcccttgcaatgacctgagcatcgtgaacccagcccggaagggcctgtacgagggaaccggcagactgttcttcgagttttacagactgctgcacgacgcccggcctaaggaaggcgacgaccggcccttcttttggctgttcgagaatgtggtggccatgggagtcagcgacaagcgggatattagccggttcctggagagcaaccccgtgatgatcgatgccaaggaagtgagcgccgcccaccgggccagatacttctggggcaatctgcctggcatgaacagacccctggccagcaccgtgaacgacaagctggagctgcaggagtgcctggagcacggccggatcgccaagttcagcaaggtgagaaccatcaccacccgaagcaacagcatcaaacaaggcaaggaccagcactttcctgtgttcatgaacgagaaggaggacatcctgtggtgtaccgagatggagagagtgttcgggttcccagtccactacacagatgtcagcaacatgtctagactggccagacagagactgctgggaagaagctggtccgtccctgtgatcagacacctgttcgcccctctgaaggagtacttcgcctgcgtgagcagcggcaacagcaacgccaacagccggggccccagcttctctagcggcctggtgccactgtccctgagagggagccacatgggccccatggagatctacaaaaccgtgagcgcctggaagcggcagcctgtgcgcgtgctgagcctgtttcggaatatcgataaagtcctgaaaagcctgggattcctggagagcggctctggctccggcggtggcaccctgaagtacgtggaggatgtgacaaacgtggtcagacgggatgtggagaagtggggccccttcgatctggtgtacggcagcacccaacccctgggcagctcttgtgaccggtgccctggctggtacatgtttcagttccaccggatcctgcagtacgccctgccgagacaggagtcccagcggccattcttttggattttcatggacaacttgctgctgaccgaggatgaccaggaaactaccactcggttcctgcagaccgaagccgtgaccctgcaggacgtgagaggccgggactaccagaacgccatgcgggtgtggtccaacatccctggactgaaaagcaagcacgcacctctgacccctaaagaagaggagtacctgcaggcccaggtgcggagcagaagcaagctggacgcccctaaggtggatctgctggtgaagaattgcctcctgcccctgagagagtacttcaagtatttcagccagaatagtctgcccctgggaggcagcggcggcggcgcccaggtgcccgtgaccttcgaggaggtggccgtgtacttcacccagggccagggcgccctgctgggccccgcccagagggccctgtacagggacgtgatgagggagaactacgagatggtgaccagcctgggcttccccgtgcccaagcccgacctggtggccaggctggagaggggcgaggagccctgggtgagcgactgcctggccagcgaggagggcggcaccaggaggggcaggggcggcggcccaagcagcggcgcccctcctcccagcggcggcagcccagccggctccccaacctctaccgaggagggcacctctgagtccgccacccccgagagcggccctggcacctccaccgagcccagcgagggcagcgcacccggcagccctgccggcagccccacctccacagaggagggaaccagcaccgagcccagcgaaggcagcgccccaggcaccagcaccgagcctagtgagcaggagattaaacggatcaacaagatcagaagaagacttgtgaaagacagcaacaccaagaaggccggcaagacaggccccatgaaaaccctgctggttagagtgatgacacccgatctgagagagcggctggaaaacctgagaaagaagcctgaaaatatcccccagcccatcagcaatacatctagagccaacctgaataagctgctgaccgattacaccgaaatgaagaaggcgatcctgcatgtgtactgggaagagttccagaaggaccctgtgggcctgatgagccgggtggcccagcctgccagcaagaagatcgatcagaacaagctgaaacctgagatggacgagaagggcaacctgaccaccgccggctttgcctgctctcagtgtggccagcccctgttcgtgtacaagctggagcaggtgtctgagaagggcaaggcttacaccaactacttcggacggtgcaatgtggccgagcacgaaaagctgatcctgctggcccagctgaagcccgagaaggatagcgacgaagccgtgacatatagcctgggaaagtttgggcagagggccctggatttctacagcattcatgtgaccaaggagtccacccaccccgtgaagcccctggcccagatcgccggaaacagatacgcctccggacctgtgggaaaggccctgagcgacgcatgtatgggcacaatcgcctccttcctgtctaagtaccaggacatcatcatcgaacaccagaaggtggtgaagggcaaccagaagagactggagagcctgcgggagctggccggcaaggaaaacctggaataccctagcgtgaccctgccacctcagcctcacaccaaggagggcgttgatgcctacaacgaagtgatcgcccgggtgcgaatgtgggtgaacctgaacctgtggcagaagctgaagctaagcagagatgatgccaagcctctgctgagactgaagggattcccttcctttcctctggtcgagagacaggccaacgaagtggactggtgggacatggtgtgtaacgtgaagaagctgatcaacgagaaaaaggaggatggcaaggtgttttggcagaatctggctggctacaagagacaggaagccctgagaccatacctgagcagcgaggaagatcggaagaagggaaagaaattcgctcggtaccagctgggcgacctgctgctgcacctggaaaagaagcacggcgaggactggggaaaggtgtacgacgaggcctgggagcggattgacaagaaagtggaaggcctgagcaagcacatcaagctggaagaggaacggagaagcgaggacgcccagagcaaggccgccctgaccgactggctgcgggctaaggccagcttcgtgatcgagggcctgaaggaggccgacaaggacgagttctgcagatgcgagctgaagctgcagaagtggtacggggacctgcggggaaagcccttcgccatcgaagccgagaacagcatcctggacatcagcggcttcagcaagcagtacaactgtgccttcatctggcagaaggacggcgtgaagaagctgaacctgtacctgatcatcaactacttcaagggcggcaagctgcggttcaagaagatcaaacctgaagccttcgaagccaacagattctacaccgtgatcaacaaaaagagcggcgagatcgtgcccatggaggtgaacttcaacttcgacgaccccaacctgatcatcctgcctctggcctttggcaagagacagggcagagaattcatctggaacgacctgctgtccctggaaaccggcagcctgaagctggccaacggaagagtgatcgagaagacactgtacaacagaagaacccggcaggatgagcctgccctgttcgtggccctgaccttcgagcggcgggaggtcctggactcctccaatatcaaaccaatgaacctgatcggcgtggcaagaggcgaaaacatccccgccgtgatcgccctgaccgaccccgagggctgcccactgagccggtttaaggatagcctgggaaacccaacccacatcctgagaatcggcgagagctataaggagaagcagcggaccatccaggccaagaaggaggtggagcagcggagagccggcggctacagccggaagtacgccagcaaagccaagaatctggcagacgatatggtgagaaacaccgctagagatctgctgtactacgccgtgacccaggatgccatgctgatcttcgccaacctgagccggggcttcggccggcagggcaagcggaccttcatggccgagagacagtacacacggatggaggactggctgaccgccaagctggcctacgagggcctgagcaagacctacctgtccaagacactggcccagtacacctccaagacatgcagcaactgtgggtttaccatcaccagcgccgactacgacagggtgctggagaagctgaagaagacagcaacaggctggatgaccacaattaacggcaaggagctgaaggtggagggccagattacctactacaacagatacaagagacagaacgtagtcaaggacctgtccgtcgagctggatagactgagcgaagaatctgtgaacaacgacatctcctcctggacaaagggcagaagcggagaagctctgagcctcctgaagaaaagattctcccatagacccgtgcaggagaagttcgtgtgcctgaactgcggcttcgagacacacgcagccgagcaagccgccctgaacatcgccagatcctggctgttcctgcggagccaggagtacaagaaataccagacaaacaagacaaccggcaacaccgataagagagccttcgtcgagacctggcagtccttttaccggaagaagcttaaggaggtgtggaaacctgccgtgcggtctggcggatctggcggaggctccaccagccccaagaaaaagagaaaagtctaagctgccttctgcggggcttgccttctggccatgcccttcttctctcccttgcacctgtacctcttggtctttgaataaagcctgagtaggaaggctagcaaaaaaaaaaaaaaaaaaaaaaaaaaaaaaaaaaaaaaaaaaaaaaaaaaaaaaaaaaaaaaaaaaaaaaaaaaaaaaaa

SEQ ID NO: 12367 - RNA, 5785 nt, synthetic construct
  source 1..5785: mol_type = other RNA
aggaaataagagagaaaagaagagtaagaagaaatataagagccaccatggcccctaagaagaagcgtaaagtgagccggatggaacgcctcgtctacgaggtgcggcagaagtgcagaaacatcgaggacatctgcatctcctgcggatctctgaacgtgaccctggagcacccactgttcatcggcggcatgtgccagaactgtaaaaactgttttctggagtgtgcctatcaatacgacgatgacggctaccagagctactgcaccatctgttgcggcggaagagaggtgctgatgtgtggaaataacaactgctgccggtgcttctgcgtggaatgcgtggacctgctggtgggccccggcgccgcccaggccgctattaaggaagatccttggaactgctacatgtgcggccacaagggcacatacggcctgctgagacggagagaggactggcctagcagactgcagatgttcttcgccaataaccacgaccaggagttcgacccccctaaggtgtaccctcccgtccccgccgagaagagaaagcccatccgggtcctgagcctgttcgatggcatcgccaccggtctgctggtgctgaaggacctgggcatccaggtggataggtacattgcctccgaggtgtgcgaggactccatcaccgtgggaatggtgcgtcatcagggcaagatcatgtacgtgggcgacgtgcggagcgtgacacagaagcatatccaggagtggggccctttcgacctggtgatcggcggcagcccttgcaatgacctgagcatcgtgaacccagcccggaagggcctgtacgagggaaccggcagactgttcttcgagttttacagactgctgcacgacgcccggcctaaggaaggcgacgaccggcccttcttttggctgttcgagaatgtggtggccatgggagtcagcgacaagcgggatattagccggttcctggagagcaaccccgtgatgatcgatgccaaggaagtgagcgccgcccaccgggccagatacttctggggcaatctgcctggcatgaacagacccctggccagcaccgtgaacgacaagctggagctgcaggagtgcctggagcacggccggatcgccaagttcagcaaggtgagaaccatcaccacccgaagcaacagcatcaaacaaggcaaggaccagcactttcctgtgttcatgaacgagaaggaggacatcctgtggtgtaccgagatggagagagtgttcgggttcccagtccactacacagatgtcagcaacatgtctagactggccagacagagactgctgggaagaagctggtccgtccctgtgatcagacacctgttcgcccctctgaaggagtacttcgcctgcgtgagcagcggcaacagcaacgccaacagccggggccccagcttctctagcggcctggtgccactgtccctgagagggagccacatgggccccatggagatctacaaaaccgtgagcgcctggaagcggcagcctgtgcgcgtgctgagcctgtttcggaatatcgataaagtcctgaaaagcctgggattcctggagagcggctctggctccggcggtggcaccctgaagtacgtggaggatgtgacaaacgtggtcagacgggatgtggagaagtggggccccttcgatctggtgtacggcagcacccaacccctgggcagctcttgtgaccggtgccctggctggtacatgtttcagttccaccggatcctgcagtacgccctgccgagacaggagtcccagcggccattcttttggattttcatggacaacttgctgctgaccgaggatgaccaggaaactaccactcggttcctgcagaccgaagccgtgaccctgcaggacgtgagaggccgggactaccagaacgccatgcgggtgtggtccaacatccctggactgaaaagcaagcacgcacctctgacccctaaagaagaggagtacctgcaggcccaggtgcggagcagaagcaagctggacgcccctaaggtggatctgctggtgaagaattgcctcctgcccctgagagagtacttcaagtatttcagccagaatagtctgcccctgggaggcagcggcggcggcttccagatgcccgtgaccttcgaggaggtggccgtgtacttcacccagggccagggcgccctgctggaccccgcccagagggccctgtacagggacgtgatgcaggacaactacgagatggtgaccagcctgggcttccccatccccaagcccgagctgatcgccaggctggagaggggcgaggagccctgggtgcccgacctgcaggcctgcgaggagaggaggctgcccaggtgcaccaggggcggcccaagcagcggcgcccctcctcccagcggcggcagcccagccggctccccaacctctaccgaggagggcacctctgagtccgccacccccgagagcggccctggcacctccaccgagcccagcgagggcagcgcacccggcagccctgccggcagccccacctccacagaggagggaaccagcaccgagcccagcgaaggcagcgccccaggcaccagcaccgagcctagtgagcaggagattaaacggatcaacaagatcagaagaagacttgtgaaagacagcaacaccaagaaggccggcaagacaggccccatgaaaaccctgctggttagagtgatgacacccgatctgagagagcggctggaaaacctgagaaagaagcctgaaaatatcccccagcccatcagcaatacatctagagccaacctgaataagctgctgaccgattacaccgaaatgaagaaggcgatcctgcatgtgtactgggaagagttccagaaggaccctgtgggcctgatgagccgggtggcccagcctgccagcaagaagatcgatcagaacaagctgaaacctgagatggacgagaagggcaacctgaccaccgccggctttgcctgctctcagtgtggccagcccctgttcgtgtacaagctggagcaggtgtctgagaagggcaaggcttacaccaactacttcggacggtgcaatgtggccgagcacgaaaagctgatcctgctggcccagctgaagcccgagaaggatagcgacgaagccgtgacatatagcctgggaaagtttgggcagagggccctggatttctacagcattcatgtgaccaaggagtccacccaccccgtgaagcccctggcccagatcgccggaaacagatacgcctccggacctgtgggaaaggccctgagcgacgcatgtatgggcacaatcgcctccttcctgtctaagtaccaggacatcatcatcgaacaccagaaggtggtgaagggcaaccagaagagactggagagcctgcgggagctggccggcaaggaaaacctggaataccctagcgtgaccctgccacctcagcctcacaccaaggagggcgttgatgcctacaacgaagtgatcgcccgggtgcgaatgtgggtgaacctgaacctgtggcagaagctgaagctaagcagagatgatgccaagcctctgctgagactgaagggattcccttcctttcctctggtcgagagacaggccaacgaagtggactggtgggacatggtgtgtaacgtgaagaagctgatcaacgagaaaaaggaggatggcaaggtgttttggcagaatctggctggctacaagagacaggaagccctgagaccatacctgagcagcgaggaagatcggaagaagggaaagaaattcgctcggtaccagctgggcgacctgctgctgcacctggaaaagaagcacggcgaggactggggaaaggtgtacgacgaggcctgggagcggattgacaagaaagtggaaggcctgagcaagcacatcaagctggaagaggaacggagaagcgaggacgcccagagcaaggccgccctgaccgactggctgcgggctaaggccagcttcgtgatcgagggcctgaaggaggccgacaaggacgagttctgcagatgcgagctgaagctgcagaagtggtacggggacctgcggggaaagcccttcgccatcgaagccgagaacagcatcctggacatcagcggcttcagcaagcagtacaactgtgccttcatctggcagaaggacggcgtgaagaagctgaacctgtacctgatcatcaactacttcaagggcggcaagctgcggttcaagaagatcaaacctgaagccttcgaagccaacagattctacaccgtgatcaacaaaaagagcggcgagatcgtgcccatggaggtgaacttcaacttcgacgaccccaacctgatcatcctgcctctggcctttggcaagagacagggcagagaattcatctggaacgacctgctgtccctggaaaccggcagcctgaagctggccaacggaagagtgatcgagaagacactgtacaacagaagaacccggcaggatgagcctgccctgttcgtggccctgaccttcgagcggcgggaggtcctggactcctccaatatcaaaccaatgaacctgatcggcgtggcaagaggcgaaaacatccccgccgtgatcgccctgaccgaccccgagggctgcccactgagccggtttaaggatagcctgggaaacccaacccacatcctgagaatcggcgagagctataaggagaagcagcggaccatccaggccaagaaggaggtggagcagcggagagccggcggctacagccggaagtacgccagcaaagccaagaatctggcagacgatatggtgagaaacaccgctagagatctgctgtactacgccgtgacccaggatgccatgctgatcttcgccaacctgagccggggcttcggccggcagggcaagcggaccttcatggccgagagacagtacacacggatggaggactggctgaccgccaagctggcctacgagggcctgagcaagacctacctgtccaagacactggcccagtacacctccaagacatgcagcaactgtgggtttaccatcaccagcgccgactacgacagggtgctggagaagctgaagaagacagcaacaggctggatgaccacaattaacggcaaggagctgaaggtggagggccagattacctactacaacagatacaagagacagaacgtagtcaaggacctgtccgtcgagctggatagactgagcgaagaatctgtgaacaacgacatctcctcctggacaaagggcagaagcggagaagctctgagcctcctgaagaaaagattctcccatagacccgtgcaggagaagttcgtgtgcctgaactgcggcttcgagacacacgcagccgagcaagccgccctgaacatcgccagatcctggctgttcctgcggagccaggagtacaagaaataccagacaaacaagacaaccggcaacaccgataagagagccttcgtcgagacctggcagtccttttaccggaagaagcttaaggaggtgtggaaacctgccgtgcggtctggcggatctggcggaggctccaccagccccaagaaaaagagaaaagtctaagctgccttctgcggggcttgccttctggccatgcccttcttctctcccttgcacctgtacctcttggtctttgaataaagcctgagtaggaaggctagcaaaaaaaaaaaaaaaaaaaaaaaaaaaaaaaaaaaaaaaaaaaaaaaaaaaaaaaaaaaaaaaaaaaaaaaaaaaaaaaa

SEQ ID NO: 12368 - RNA, 5785 nt, synthetic construct
  source 1..5785: mol_type = other RNA
aggaaataagagagaaaagaagagtaagaagaaatataagagccaccatggcccctaagaagaagcgtaaagtgagccggatggaacgcctcgtctacgaggtgcggcagaagtgcagaaacatcgaggacatctgcatctcctgcggatctctgaacgtgaccctggagcacccactgttcatcggcggcatgtgccagaactgtaaaaactgttttctggagtgtgcctatcaatacgacgatgacggctaccagagctactgcaccatctgttgcggcggaagagaggtgctgatgtgtggaaataacaactgctgccggtgcttctgcgtggaatgcgtggacctgctggtgggccccggcgccgcccaggccgctattaaggaagatccttggaactgctacatgtgcggccacaagggcacatacggcctgctgagacggagagaggactggcctagcagactgcagatgttcttcgccaataaccacgaccaggagttcgacccccctaaggtgtaccctcccgtccccgccgagaagagaaagcccatccgggtcctgagcctgttcgatggcatcgccaccggtctgctggtgctgaaggacctgggcatccaggtggataggtacattgcctccgaggtgtgcgaggactccatcaccgtgggaatggtgcgtcatcagggcaagatcatgtacgtgggcgacgtgcggagcgtgacacagaagcatatccaggagtggggccctttcgacctggtgatcggcggcagcccttgcaatgacctgagcatcgtgaacccagcccggaagggcctgtacgagggaaccggcagactgttcttcgagttttacagactgctgcacgacgcccggcctaaggaaggcgacgaccggcccttcttttggctgttcgagaatgtggtggccatgggagtcagcgacaagcgggatattagccggttcctggagagcaaccccgtgatgatcgatgccaaggaagtgagcgccgcccaccgggccagatacttctggggcaatctgcctggcatgaacagacccctggccagcaccgtgaacgacaagctggagctgcaggagtgcctggagcacggccggatcgccaagttcagcaaggtgagaaccatcaccacccgaagcaacagcatcaaacaaggcaaggaccagcactttcctgtgttcatgaacgagaaggaggacatcctgtggtgtaccgagatggagagagtgttcgggttcccagtccactacacagatgtcagcaacatgtctagactggccagacagagactgctgggaagaagctggtccgtccctgtgatcagacacctgttcgcccctctgaaggagtacttcgcctgcgtgagcagcggcaacagcaacgccaacagccggggccccagcttctctagcggcctggtgccactgtccctgagagggagccacatgggccccatggagatctacaaaaccgtgagcgcctggaagcggcagcctgtgcgcgtgctgagcctgtttcggaatatcgataaagtcctgaaaagcctgggattcctggagagcggctctggctccggcggtggcaccctgaagtacgtggaggatgtgacaaacgtggtcagacgggatgtggagaagtggggccccttcgatctggtgtacggcagcacccaacccctgggcagctcttgtgaccggtgccctggctggtacatgtttcagttccaccggatcctgcagtacgccctgccgagacaggagtcccagcggccattcttttggattttcatggacaacttgctgctgaccgaggatgaccaggaaactaccactcggttcctgcagaccgaagccgtgaccctgcaggacgtgagaggccgggactaccagaacgccatgcgggtgtggtccaacatccctggactgaaaagcaagcacgcacctctgacccctaaagaagaggagtacctgcaggcccaggtgcggagcagaagcaagctggacgcccctaaggtggatctgctggtgaagaattgcctcctgcccctgagagagtacttcaagtatttcagccagaatagtctgcccctgggaggcagcggcggcggctgcggcatgttccaggtgagcgtggccttcgaggacgtggccgtgaccttcacccaggaggagtgggccctgctggaccccagccagaagaccctgtacagggacgtgatgcaggagaacttcaggaacctggccagcgtgggcaagaagtggaaggcccagaacatctacgtggagtacaagaacctgaggaggaacctgaggaacctgaggggcaagaggctgttcgagagcaaggaggacggcggcccaagcagcggcgcccctcctcccagcggcggcagcccagccggctccccaacctctaccgaggagggcacctctgagtccgccacccccgagagcggccctggcacctccaccgagcccagcgagggcagcgcacccggcagccctgccggcagccccacctccacagaggagggaaccagcaccgagcccagcgaaggcagcgccccaggcaccagcaccgagcctagtgagcaggagattaaacggatcaacaagatcagaagaagacttgtgaaagacagcaacaccaagaaggccggcaagacaggccccatgaaaaccctgctggttagagtgatgacacccgatctgagagagcggctggaaaacctgagaaagaagcctgaaaatatcccccagcccatcagcaatacatctagagccaacctgaataagctgctgaccgattacaccgaaatgaagaaggcgatcctgcatgtgtactgggaagagttccagaaggaccctgtgggcctgatgagccgggtggcccagcctgccagcaagaagatcgatcagaacaagctgaaacctgagatggacgagaagggcaacctgaccaccgccggctttgcctgctctcagtgtggccagcccctgttcgtgtacaagctggagcaggtgtctgagaagggcaaggcttacaccaactacttcggacggtgcaatgtggccgagcacgaaaagctgatcctgctggcccagctgaagcccgagaaggatagcgacgaagccgtgacatatagcctgggaaagtttgggcagagggccctggatttctacagcattcatgtgaccaaggagtccacccaccccgtgaagcccctggcccagatcgccggaaacagatacgcctccggacctgtgggaaaggccctgagcgacgcatgtatgggcacaatcgcctccttcctgtctaagtaccaggacatcatcatcgaacaccagaaggtggtgaagggcaaccagaagagactggagagcctgcgggagctggccggcaaggaaaacctggaataccctagcgtgaccctgccacctcagcctcacaccaaggagggcgttgatgcctacaacgaagtgatcgcccgggtgcgaatgtgggtgaacctgaacctgtggcagaagctgaagctaagcagagatgatgccaagcctctgctgagactgaagggattcccttcctttcctctggtcgagagacaggccaacgaagtggactggtgggacatggtgtgtaacgtgaagaagctgatcaacgagaaaaaggaggatggcaaggtgttttggcagaatctggctggctacaagagacaggaagccctgagaccatacctgagcagcgaggaagatcggaagaagggaaagaaattcgctcggtaccagctgggcgacctgctgctgcacctggaaaagaagcacggcgaggactggggaaaggtgtacgacgaggcctgggagcggattgacaagaaagtggaaggcctgagcaagcacatcaagctggaagaggaacggagaagcgaggacgcccagagcaaggccgccctgaccgactggctgcgggctaaggccagcttcgtgatcgagggcctgaaggaggccgacaaggacgagttctgcagatgcgagctgaagctgcagaagtggtacggggacctgcggggaaagcccttcgccatcgaagccgagaacagcatcctggacatcagcggcttcagcaagcagtacaactgtgccttcatctggcagaaggacggcgtgaagaagctgaacctgtacctgatcatcaactacttcaagggcggcaagctgcggttcaagaagatcaaacctgaagccttcgaagccaacagattctacaccgtgatcaacaaaaagagcggcgagatcgtgcccatggaggtgaacttcaacttcgacgaccccaacctgatcatcctgcctctggcctttggcaagagacagggcagagaattcatctggaacgacctgctgtccctggaaaccggcagcctgaagctggccaacggaagagtgatcgagaagacactgtacaacagaagaacccggcaggatgagcctgccctgttcgtggccctgaccttcgagcggcgggaggtcctggactcctccaatatcaaaccaatgaacctgatcggcgtggcaagaggcgaaaacatccccgccgtgatcgccctgaccgaccccgagggctgcccactgagccggtttaaggatagcctgggaaacccaacccacatcctgagaatcggcgagagctataaggagaagcagcggaccatccaggccaagaaggaggtggagcagcggagagccggcggctacagccggaagtacgccagcaaagccaagaatctggcagacgatatggtgagaaacaccgctagagatctgctgtactacgccgtgacccaggatgccatgctgatcttcgccaacctgagccggggcttcggccggcagggcaagcggaccttcatggccgagagacagtacacacggatggaggactggctgaccgccaagctggcctacgagggcctgagcaagacctacctgtccaagacactggcccagtacacctccaagacatgcagcaactgtgggtttaccatcaccagcgccgactacgacagggtgctggagaagctgaagaagacagcaacaggctggatgaccacaattaacggcaaggagctgaaggtggagggccagattacctactacaacagatacaagagacagaacgtagtcaaggacctgtccgtcgagctggatagactgagcgaagaatctgtgaacaacgacatctcctcctggacaaagggcagaagcggagaagctctgagcctcctgaagaaaagattctcccatagacccgtgcaggagaagttcgtgtgcctgaactgcggcttcgagacacacgcagccgagcaagccgccctgaacatcgccagatcctggctgttcctgcggagccaggagtacaagaaataccagacaaacaagacaaccggcaacaccgataagagagccttcgtcgagacctggcagtccttttaccggaagaagcttaaggaggtgtggaaacctgccgtgcggtctggcggatctggcggaggctccaccagccccaagaaaaagagaaaagtctaagctgccttctgcggggcttgccttctggccatgcccttcttctctcccttgcacctgtacctcttggtctttgaataaagcctgagtaggaaggctagcaaaaaaaaaaaaaaaaaaaaaaaaaaaaaaaaaaaaaaaaaaaaaaaaaaaaaaaaaaaaaaaaaaaaaaaaaaaaaaaa

SEQ ID NO: 12369 - RNA, 5785 nt, synthetic construct
  source 1..5785: mol_type = other RNA
aggaaataagagagaaaagaagagtaagaagaaatataagagccaccatggcccctaagaagaagcgtaaagtgagccggatggaacgcctcgtctacgaggtgcggcagaagtgcagaaacatcgaggacatctgcatctcctgcggatctctgaacgtgaccctggagcacccactgttcatcggcggcatgtgccagaactgtaaaaactgttttctggagtgtgcctatcaatacgacgatgacggctaccagagctactgcaccatctgttgcggcggaagagaggtgctgatgtgtggaaataacaactgctgccggtgcttctgcgtggaatgcgtggacctgctggtgggccccggcgccgcccaggccgctattaaggaagatccttggaactgctacatgtgcggccacaagggcacatacggcctgctgagacggagagaggactggcctagcagactgcagatgttcttcgccaataaccacgaccaggagttcgacccccctaaggtgtaccctcccgtccccgccgagaagagaaagcccatccgggtcctgagcctgttcgatggcatcgccaccggtctgctggtgctgaaggacctgggcatccaggtggataggtacattgcctccgaggtgtgcgaggactccatcaccgtgggaatggtgcgtcatcagggcaagatcatgtacgtgggcgacgtgcggagcgtgacacagaagcatatccaggagtggggccctttcgacctggtgatcggcggcagcccttgcaatgacctgagcatcgtgaacccagcccggaagggcctgtacgagggaaccggcagactgttcttcgagttttacagactgctgcacgacgcccggcctaaggaaggcgacgaccggcccttcttttggctgttcgagaatgtggtggccatgggagtcagcgacaagcgggatattagccggttcctggagagcaaccccgtgatgatcgatgccaaggaagtgagcgccgcccaccgggccagatacttctggggcaatctgcctggcatgaacagacccctggccagcaccgtgaacgacaagctggagctgcaggagtgcctggagcacggccggatcgccaagttcagcaaggtgagaaccatcaccacccgaagcaacagcatcaaacaaggcaaggaccagcactttcctgtgttcatgaacgagaaggaggacatcctgtggtgtaccgagatggagagagtgttcgggttcccagtccactacacagatgtcagcaacatgtctagactggccagacagagactgctgggaagaagctggtccgtccctgtgatcagacacctgttcgcccctctgaaggagtacttcgcctgcgtgagcagcggcaacagcaacgccaacagccggggccccagcttctctagcggcctggtgccactgtccctgagagggagccacatgggccccatggagatctacaaaaccgtgagcgcctggaagcggcagcctgtgcgcgtgctgagcctgtttcggaatatcgataaagtcctgaaaagcctgggattcctggagagcggctctggctccggcggtggcaccctgaagtacgtggaggatgtgacaaacgtggtcagacgggatgtggagaagtggggccccttcgatctggtgtacggcagcacccaacccctgggcagctcttgtgaccggtgccctggctggtacatgtttcagttccaccggatcctgcagtacgccctgccgagacaggagtcccagcggccattcttttggattttcatggacaacttgctgctgaccgaggatgaccaggaaactaccactcggttcctgcagaccgaagccgtgaccctgcaggacgtgagaggccgggactaccagaacgccatgcgggtgtggtccaacatccctggactgaaaagcaagcacgcacctctgacccctaaagaagaggagtacctgcaggcccaggtgcggagcagaagcaagctggacgcccctaaggtggatctgctggtgaagaattgcctcctgcccctgagagagtacttcaagtatttcagccagaatagtctgcccctgggaggcagcggcggcggcatggccttcgaggacgtggccgtgtacttcagccaggaggagtggggcctgctggacaccgcccagagggccctgtacaggcacgtgatgctggagaacttcaccctggtgaccagcctgggcctgagcaccagcaggccccacgtggtgatccagctggagaggggcgaggagccctgggtgcccagcggcaaggacatgaccctggccaggaacacctacaggaggctgaacgccggcagcggcggcccaagcagcggcgcccctcctcccagcggcggcagcccagccggctccccaacctctaccgaggagggcacctctgagtccgccacccccgagagcggccctggcacctccaccgagcccagcgagggcagcgcacccggcagccctgccggcagccccacctccacagaggagggaaccagcaccgagcccagcgaaggcagcgccccaggcaccagcaccgagcctagtgagcaggagattaaacggatcaacaagatcagaagaagacttgtgaaagacagcaacaccaagaaggccggcaagacaggccccatgaaaaccctgctggttagagtgatgacacccgatctgagagagcggctggaaaacctgagaaagaagcctgaaaatatcccccagcccatcagcaatacatctagagccaacctgaataagctgctgaccgattacaccgaaatgaagaaggcgatcctgcatgtgtactgggaagagttccagaaggaccctgtgggcctgatgagccgggtggcccagcctgccagcaagaagatcgatcagaacaagctgaaacctgagatggacgagaagggcaacctgaccaccgccggctttgcctgctctcagtgtggccagcccctgttcgtgtacaagctggagcaggtgtctgagaagggcaaggcttacaccaactacttcggacggtgcaatgtggccgagcacgaaaagctgatcctgctggcccagctgaagcccgagaaggatagcgacgaagccgtgacatatagcctgggaaagtttgggcagagggccctggatttctacagcattcatgtgaccaaggagtccacccaccccgtgaagcccctggcccagatcgccggaaacagatacgcctccggacctgtgggaaaggccctgagcgacgcatgtatgggcacaatcgcctccttcctgtctaagtaccaggacatcatcatcgaacaccagaaggtggtgaagggcaaccagaagagactggagagcctgcgggagctggccggcaaggaaaacctggaataccctagcgtgaccctgccacctcagcctcacaccaaggagggcgttgatgcctacaacgaagtgatcgcccgggtgcgaatgtgggtgaacctgaacctgtggcagaagctgaagctaagcagagatgatgccaagcctctgctgagactgaagggattcccttcctttcctctggtcgagagacaggccaacgaagtggactggtgggacatggtgtgtaacgtgaagaagctgatcaacgagaaaaaggaggatggcaaggtgttttggcagaatctggctggctacaagagacaggaagccctgagaccatacctgagcagcgaggaagatcggaagaagggaaagaaattcgctcggtaccagctgggcgacctgctgctgcacctggaaaagaagcacggcgaggactggggaaaggtgtacgacgaggcctgggagcggattgacaagaaagtggaaggcctgagcaagcacatcaagctggaagaggaacggagaagcgaggacgcccagagcaaggccgccctgaccgactggctgcgggctaaggccagcttcgtgatcgagggcctgaaggaggccgacaaggacgagttctgcagatgcgagctgaagctgcagaagtggtacggggacctgcggggaaagcccttcgccatcgaagccgagaacagcatcctggacatcagcggcttcagcaagcagtacaactgtgccttcatctggcagaaggacggcgtgaagaagctgaacctgtacctgatcatcaactacttcaagggcggcaagctgcggttcaagaagatcaaacctgaagccttcgaagccaacagattctacaccgtgatcaacaaaaagagcggcgagatcgtgcccatggaggtgaacttcaacttcgacgaccccaacctgatcatcctgcctctggcctttggcaagagacagggcagagaattcatctggaacgacctgctgtccctggaaaccggcagcctgaagctggccaacggaagagtgatcgagaagacactgtacaacagaagaacccggcaggatgagcctgccctgttcgtggccctgaccttcgagcggcgggaggtcctggactcctccaatatcaaaccaatgaacctgatcggcgtggcaagaggcgaaaacatccccgccgtgatcgccctgaccgaccccgagggctgcccactgagccggtttaaggatagcctgggaaacccaacccacatcctgagaatcggcgagagctataaggagaagcagcggaccatccaggccaagaaggaggtggagcagcggagagccggcggctacagccggaagtacgccagcaaagccaagaatctggcagacgatatggtgagaaacaccgctagagatctgctgtactacgccgtgacccaggatgccatgctgatcttcgccaacctgagccggggcttcggccggcagggcaagcggaccttcatggccgagagacagtacacacggatggaggactggctgaccgccaagctggcctacgagggcctgagcaagacctacctgtccaagacactggcccagtacacctccaagacatgcagcaactgtgggtttaccatcaccagcgccgactacgacagggtgctggagaagctgaagaagacagcaacaggctggatgaccacaattaacggcaaggagctgaaggtggagggccagattacctactacaacagatacaagagacagaacgtagtcaaggacctgtccgtcgagctggatagactgagcgaagaatctgtgaacaacgacatctcctcctggacaaagggcagaagcggagaagctctgagcctcctgaagaaaagattctcccatagacccgtgcaggagaagttcgtgtgcctgaactgcggcttcgagacacacgcagccgagcaagccgccctgaacatcgccagatcctggctgttcctgcggagccaggagtacaagaaataccagacaaacaagacaaccggcaacaccgataagagagccttcgtcgagacctggcagtccttttaccggaagaagcttaaggaggtgtggaaacctgccgtgcggtctggcggatctggcggaggctccaccagccccaagaaaaagagaaaagtctaagctgccttctgcggggcttgccttctggccatgcccttcttctctcccttgcacctgtacctcttggtctttgaataaagcctgagtaggaaggctagcaaaaaaaaaaaaaaaaaaaaaaaaaaaaaaaaaaaaaaaaaaaaaaaaaaaaaaaaaaaaaaaaaaaaaaaaaaaaaaaa

SEQ ID NO: 12370 - RNA, 5785 nt, synthetic construct
  source 1..5785: mol_type = other RNA
aggaaataagagagaaaagaagagtaagaagaaatataagagccaccatggcccctaagaagaagcgtaaagtgagccggatggaacgcctcgtctacgaggtgcggcagaagtgcagaaacatcgaggacatctgcatctcctgcggatctctgaacgtgaccctggagcacccactgttcatcggcggcatgtgccagaactgtaaaaactgttttctggagtgtgcctatcaatacgacgatgacggctaccagagctactgcaccatctgttgcggcggaagagaggtgctgatgtgtggaaataacaactgctgccggtgcttctgcgtggaatgcgtggacctgctggtgggccccggcgccgcccaggccgctattaaggaagatccttggaactgctacatgtgcggccacaagggcacatacggcctgctgagacggagagaggactggcctagcagactgcagatgttcttcgccaataaccacgaccaggagttcgacccccctaaggtgtaccctcccgtccccgccgagaagagaaagcccatccgggtcctgagcctgttcgatggcatcgccaccggtctgctggtgctgaaggacctgggcatccaggtggataggtacattgcctccgaggtgtgcgaggactccatcaccgtgggaatggtgcgtcatcagggcaagatcatgtacgtgggcgacgtgcggagcgtgacacagaagcatatccaggagtggggccctttcgacctggtgatcggcggcagcccttgcaatgacctgagcatcgtgaacccagcccggaagggcctgtacgagggaaccggcagactgttcttcgagttttacagactgctgcacgacgcccggcctaaggaaggcgacgaccggcccttcttttggctgttcgagaatgtggtggccatgggagtcagcgacaagcgggatattagccggttcctggagagcaaccccgtgatgatcgatgccaaggaagtgagcgccgcccaccgggccagatacttctggggcaatctgcctggcatgaacagacccctggccagcaccgtgaacgacaagctggagctgcaggagtgcctggagcacggccggatcgccaagttcagcaaggtgagaaccatcaccacccgaagcaacagcatcaaacaaggcaaggaccagcactttcctgtgttcatgaacgagaaggaggacatcctgtggtgtaccgagatggagagagtgttcgggttcccagtccactacacagatgtcagcaacatgtctagactggccagacagagactgctgggaagaagctggtccgtccctgtgatcagacacctgttcgcccctctgaaggagtacttcgcctgcgtgagcagcggcaacagcaacgccaacagccggggccccagcttctctagcggcctggtgccactgtccctgagagggagccacatgggccccatggagatctacaaaaccgtgagcgcctggaagcggcagcctgtgcgcgtgctgagcctgtttcggaatatcgataaagtcctgaaaagcctgggattcctggagagcggctctggctccggcggtggcaccctgaagtacgtggaggatgtgacaaacgtggtcagacgggatgtggagaagtggggccccttcgatctggtgtacggcagcacccaacccctgggcagctcttgtgaccggtgccctggctggtacatgtttcagttccaccggatcctgcagtacgccctgccgagacaggagtcccagcggccattcttttggattttcatggacaacttgctgctgaccgaggatgaccaggaaactaccactcggttcctgcagaccgaagccgtgaccctgcaggacgtgagaggccgggactaccagaacgccatgcgggtgtggtccaacatccctggactgaaaagcaagcacgcacctctgacccctaaagaagaggagtacctgcaggcccaggtgcggagcagaagcaagctggacgcccctaaggtggatctgctggtgaagaattgcctcctgcccctgagagagtacttcaagtatttcagccagaatagtctgcccctgggaggcagcggcggcggcaggagcgaggccctgagcttcgccgacgtgagcgtgagcttcagcagggaggagtggggctgcctgaggcccgcccagaaggccctgtacagggacgtgatgagggagacctgcggcctgctgggcgccctgggcctgagcggccccaagcccgccttcatcagctggctggagggcgagatggaggcctggagccccgaggcccacgagcccgagagggagagcagggccgccgacgccaggggcggcccaagcagcggcgcccctcctcccagcggcggcagcccagccggctccccaacctctaccgaggagggcacctctgagtccgccacccccgagagcggccctggcacctccaccgagcccagcgagggcagcgcacccggcagccctgccggcagccccacctccacagaggagggaaccagcaccgagcccagcgaaggcagcgccccaggcaccagcaccgagcctagtgagcaggagattaaacggatcaacaagatcagaagaagacttgtgaaagacagcaacaccaagaaggccggcaagacaggccccatgaaaaccctgctggttagagtgatgacacccgatctgagagagcggctggaaaacctgagaaagaagcctgaaaatatcccccagcccatcagcaatacatctagagccaacctgaataagctgctgaccgattacaccgaaatgaagaaggcgatcctgcatgtgtactgggaagagttccagaaggaccctgtgggcctgatgagccgggtggcccagcctgccagcaagaagatcgatcagaacaagctgaaacctgagatggacgagaagggcaacctgaccaccgccggctttgcctgctctcagtgtggccagcccctgttcgtgtacaagctggagcaggtgtctgagaagggcaaggcttacaccaactacttcggacggtgcaatgtggccgagcacgaaaagctgatcctgctggcccagctgaagcccgagaaggatagcgacgaagccgtgacatatagcctgggaaagtttgggcagagggccctggatttctacagcattcatgtgaccaaggagtccacccaccccgtgaagcccctggcccagatcgccggaaacagatacgcctccggacctgtgggaaaggccctgagcgacgcatgtatgggcacaatcgcctccttcctgtctaagtaccaggacatcatcatcgaacaccagaaggtggtgaagggcaaccagaagagactggagagcctgcgggagctggccggcaaggaaaacctggaataccctagcgtgaccctgccacctcagcctcacaccaaggagggcgttgatgcctacaacgaagtgatcgcccgggtgcgaatgtgggtgaacctgaacctgtggcagaagctgaagctaagcagagatgatgccaagcctctgctgagactgaagggattcccttcctttcctctggtcgagagacaggccaacgaagtggactggtgggacatggtgtgtaacgtgaagaagctgatcaacgagaaaaaggaggatggcaaggtgttttggcagaatctggctggctacaagagacaggaagccctgagaccatacctgagcagcgaggaagatcggaagaagggaaagaaattcgctcggtaccagctgggcgacctgctgctgcacctggaaaagaagcacggcgaggactggggaaaggtgtacgacgaggcctgggagcggattgacaagaaagtggaaggcctgagcaagcacatcaagctggaagaggaacggagaagcgaggacgcccagagcaaggccgccctgaccgactggctgcgggctaaggccagcttcgtgatcgagggcctgaaggaggccgacaaggacgagttctgcagatgcgagctgaagctgcagaagtggtacggggacctgcggggaaagcccttcgccatcgaagccgagaacagcatcctggacatcagcggcttcagcaagcagtacaactgtgccttcatctggcagaaggacggcgtgaagaagctgaacctgtacctgatcatcaactacttcaagggcggcaagctgcggttcaagaagatcaaacctgaagccttcgaagccaacagattctacaccgtgatcaacaaaaagagcggcgagatcgtgcccatggaggtgaacttcaacttcgacgaccccaacctgatcatcctgcctctggcctttggcaagagacagggcagagaattcatctggaacgacctgctgtccctggaaaccggcagcctgaagctggccaacggaagagtgatcgagaagacactgtacaacagaagaacccggcaggatgagcctgccctgttcgtggccctgaccttcgagcggcgggaggtcctggactcctccaatatcaaaccaatgaacctgatcggcgtggcaagaggcgaaaacatccccgccgtgatcgccctgaccgaccccgagggctgcccactgagccggtttaaggatagcctgggaaacccaacccacatcctgagaatcggcgagagctataaggagaagcagcggaccatccaggccaagaaggaggtggagcagcggagagccggcggctacagccggaagtacgccagcaaagccaagaatctggcagacgatatggtgagaaacaccgctagagatctgctgtactacgccgtgacccaggatgccatgctgatcttcgccaacctgagccggggcttcggccggcagggcaagcggaccttcatggccgagagacagtacacacggatggaggactggctgaccgccaagctggcctacgagggcctgagcaagacctacctgtccaagacactggcccagtacacctccaagacatgcagcaactgtgggtttaccatcaccagcgccgactacgacagggtgctggagaagctgaagaagacagcaacaggctggatgaccacaattaacggcaaggagctgaaggtggagggccagattacctactacaacagatacaagagacagaacgtagtcaaggacctgtccgtcgagctggatagactgagcgaagaatctgtgaacaacgacatctcctcctggacaaagggcagaagcggagaagctctgagcctcctgaagaaaagattctcccatagacccgtgcaggagaagttcgtgtgcctgaactgcggcttcgagacacacgcagccgagcaagccgccctgaacatcgccagatcctggctgttcctgcggagccaggagtacaagaaataccagacaaacaagacaaccggcaacaccgataagagagccttcgtcgagacctggcagtccttttaccggaagaagcttaaggaggtgtggaaacctgccgtgcggtctggcggatctggcggaggctccaccagccccaagaaaaagagaaaagtctaagctgccttctgcggggcttgccttctggccatgcccttcttctctcccttgcacctgtacctcttggtctttgaataaagcctgagtaggaaggctagcaaaaaaaaaaaaaaaaaaaaaaaaaaaaaaaaaaaaaaaaaaaaaaaaaaaaaaaaaaaaaaaaaaaaaaaaaaaaaaaa

SEQ ID NO: 12371 - RNA, 5803 nt, synthetic construct
  source 1..5803: mol_type = other RNA
aggaaataagagagaaaagaagagtaagaagaaatataagagccaccatggcccctaagaagaagcgtaaagtgagccggatggaacgcctcgtctacgaggtgcggcagaagtgcagaaacatcgaggacatctgcatctcctgcggatctctgaacgtgaccctggagcacccactgttcatcggcggcatgtgccagaactgtaaaaactgttttctggagtgtgcctatcaatacgacgatgacggctaccagagctactgcaccatctgttgcggcggaagagaggtgctgatgtgtggaaataacaactgctgccggtgcttctgcgtggaatgcgtggacctgctggtgggccccggcgccgcccaggccgctattaaggaagatccttggaactgctacatgtgcggccacaagggcacatacggcctgctgagacggagagaggactggcctagcagactgcagatgttcttcgccaataaccacgaccaggagttcgacccccctaaggtgtaccctcccgtccccgccgagaagagaaagcccatccgggtcctgagcctgttcgatggcatcgccaccggtctgctggtgctgaaggacctgggcatccaggtggataggtacattgcctccgaggtgtgcgaggactccatcaccgtgggaatggtgcgtcatcagggcaagatcatgtacgtgggcgacgtgcggagcgtgacacagaagcatatccaggagtggggccctttcgacctggtgatcggcggcagcccttgcaatgacctgagcatcgtgaacccagcccggaagggcctgtacgagggaaccggcagactgttcttcgagttttacagactgctgcacgacgcccggcctaaggaaggcgacgaccggcccttcttttggctgttcgagaatgtggtggccatgggagtcagcgacaagcgggatattagccggttcctggagagcaaccccgtgatgatcgatgccaaggaagtgagcgccgcccaccgggccagatacttctggggcaatctgcctggcatgaacagacccctggccagcaccgtgaacgacaagctggagctgcaggagtgcctggagcacggccggatcgccaagttcagcaaggtgagaaccatcaccacccgaagcaacagcatcaaacaaggcaaggaccagcactttcctgtgttcatgaacgagaaggaggacatcctgtggtgtaccgagatggagagagtgttcgggttcccagtccactacacagatgtcagcaacatgtctagactggccagacagagactgctgggaagaagctggtccgtccctgtgatcagacacctgttcgcccctctgaaggagtacttcgcctgcgtgagcagcggcaacagcaacgccaacagccggggccccagcttctctagcggcctggtgccactgtccctgagagggagccacatgggccccatggagatctacaaaaccgtgagcgcctggaagcggcagcctgtgcgcgtgctgagcctgtttcggaatatcgataaagtcctgaaaagcctgggattcctggagagcggctctggctccggcggtggcaccctgaagtacgtggaggatgtgacaaacgtggtcagacgggatgtggagaagtggggccccttcgatctggtgtacggcagcacccaacccctgggcagctcttgtgaccggtgccctggctggtacatgtttcagttccaccggatcctgcagtacgccctgccgagacaggagtcccagcggccattcttttggattttcatggacaacttgctgctgaccgaggatgaccaggaaactaccactcggttcctgcagaccgaagccgtgaccctgcaggacgtgagaggccgggactaccagaacgccatgcgggtgtggtccaacatccctggactgaaaagcaagcacgcacctctgacccctaaagaagaggagtacctgcaggcccaggtgcggagcagaagcaagctggacgcccctaaggtggatctgctggtgaagaattgcctcctgcccctgagagagtacttcaagtatttcagccagaatagtctgcccctgggaggcagcggcggcggcgtgaccttcgaggacgtggccgtgaacttcaccctggaggagtgggccctgctggaccccagccagaagaagctgtacagggacgtgatgagggagaccctgaggaacctggccagcgtgggcgagaagtgggaggaccacgacatcgaggaccagtacaagaaccagggcaggaagctgaggagccacgtgctggagaggctgtgcgagagcaaggagggcagccagtgcggcgagaacttcagcctgatccccaacctgggcggcccaagcagcggcgcccctcctcccagcggcggcagcccagccggctccccaacctctaccgaggagggcacctctgagtccgccacccccgagagcggccctggcacctccaccgagcccagcgagggcagcgcacccggcagccctgccggcagccccacctccacagaggagggaaccagcaccgagcccagcgaaggcagcgccccaggcaccagcaccgagcctagtgagcaggagattaaacggatcaacaagatcagaagaagacttgtgaaagacagcaacaccaagaaggccggcaagacaggccccatgaaaaccctgctggttagagtgatgacacccgatctgagagagcggctggaaaacctgagaaagaagcctgaaaatatcccccagcccatcagcaatacatctagagccaacctgaataagctgctgaccgattacaccgaaatgaagaaggcgatcctgcatgtgtactgggaagagttccagaaggaccctgtgggcctgatgagccgggtggcccagcctgccagcaagaagatcgatcagaacaagctgaaacctgagatggacgagaagggcaacctgaccaccgccggctttgcctgctctcagtgtggccagcccctgttcgtgtacaagctggagcaggtgtctgagaagggcaaggcttacaccaactacttcggacggtgcaatgtggccgagcacgaaaagctgatcctgctggcccagctgaagcccgagaaggatagcgacgaagccgtgacatatagcctgggaaagtttgggcagagggccctggatttctacagcattcatgtgaccaaggagtccacccaccccgtgaagcccctggcccagatcgccggaaacagatacgcctccggacctgtgggaaaggccctgagcgacgcatgtatgggcacaatcgcctccttcctgtctaagtaccaggacatcatcatcgaacaccagaaggtggtgaagggcaaccagaagagactggagagcctgcgggagctggccggcaaggaaaacctggaataccctagcgtgaccctgccacctcagcctcacaccaaggagggcgttgatgcctacaacgaagtgatcgcccgggtgcgaatgtgggtgaacctgaacctgtggcagaagctgaagctaagcagagatgatgccaagcctctgctgagactgaagggattcccttcctttcctctggtcgagagacaggccaacgaagtggactggtgggacatggtgtgtaacgtgaagaagctgatcaacgagaaaaaggaggatggcaaggtgttttggcagaatctggctggctacaagagacaggaagccctgagaccatacctgagcagcgaggaagatcggaagaagggaaagaaattcgctcggtaccagctgggcgacctgctgctgcacctggaaaagaagcacggcgaggactggggaaaggtgtacgacgaggcctgggagcggattgacaagaaagtggaaggcctgagcaagcacatcaagctggaagaggaacggagaagcgaggacgcccagagcaaggccgccctgaccgactggctgcgggctaaggccagcttcgtgatcgagggcctgaaggaggccgacaaggacgagttctgcagatgcgagctgaagctgcagaagtggtacggggacctgcggggaaagcccttcgccatcgaagccgagaacagcatcctggacatcagcggcttcagcaagcagtacaactgtgccttcatctggcagaaggacggcgtgaagaagctgaacctgtacctgatcatcaactacttcaagggcggcaagctgcggttcaagaagatcaaacctgaagccttcgaagccaacagattctacaccgtgatcaacaaaaagagcggcgagatcgtgcccatggaggtgaacttcaacttcgacgaccccaacctgatcatcctgcctctggcctttggcaagagacagggcagagaattcatctggaacgacctgctgtccctggaaaccggcagcctgaagctggccaacggaagagtgatcgagaagacactgtacaacagaagaacccggcaggatgagcctgccctgttcgtggccctgaccttcgagcggcgggaggtcctggactcctccaatatcaaaccaatgaacctgatcggcgtggcaagaggcgaaaacatccccgccgtgatcgccctgaccgaccccgagggctgcccactgagccggtttaaggatagcctgggaaacccaacccacatcctgagaatcggcgagagctataaggagaagcagcggaccatccaggccaagaaggaggtggagcagcggagagccggcggctacagccggaagtacgccagcaaagccaagaatctggcagacgatatggtgagaaacaccgctagagatctgctgtactacgccgtgacccaggatgccatgctgatcttcgccaacctgagccggggcttcggccggcagggcaagcggaccttcatggccgagagacagtacacacggatggaggactggctgaccgccaagctggcctacgagggcctgagcaagacctacctgtccaagacactggcccagtacacctccaagacatgcagcaactgtgggtttaccatcaccagcgccgactacgacagggtgctggagaagctgaagaagacagcaacaggctggatgaccacaattaacggcaaggagctgaaggtggagggccagattacctactacaacagatacaagagacagaacgtagtcaaggacctgtccgtcgagctggatagactgagcgaagaatctgtgaacaacgacatctcctcctggacaaagggcagaagcggagaagctctgagcctcctgaagaaaagattctcccatagacccgtgcaggagaagttcgtgtgcctgaactgcggcttcgagacacacgcagccgagcaagccgccctgaacatcgccagatcctggctgttcctgcggagccaggagtacaagaaataccagacaaacaagacaaccggcaacaccgataagagagccttcgtcgagacctggcagtccttttaccggaagaagcttaaggaggtgtggaaacctgccgtgcggtctggcggatctggcggaggctccaccagccccaagaaaaagagaaaagtctaagctgccttctgcggggcttgccttctggccatgcccttcttctctcccttgcacctgtacctcttggtctttgaataaagcctgagtaggaaggctagcaaaaaaaaaaaaaaaaaaaaaaaaaaaaaaaaaaaaaaaaaaaaaaaaaaaaaaaaaaaaaaaaaaaaaaaaaaaaaaaa

SEQ ID NO: 12372 - RNA, 5785 nt, synthetic construct
  source 1..5785: mol_type = other RNA
aggaaataagagagaaaagaagagtaagaagaaatataagagccaccatggcccctaagaagaagcgtaaagtgagccggatggaacgcctcgtctacgaggtgcggcagaagtgcagaaacatcgaggacatctgcatctcctgcggatctctgaacgtgaccctggagcacccactgttcatcggcggcatgtgccagaactgtaaaaactgttttctggagtgtgcctatcaatacgacgatgacggctaccagagctactgcaccatctgttgcggcggaagagaggtgctgatgtgtggaaataacaactgctgccggtgcttctgcgtggaatgcgtggacctgctggtgggccccggcgccgcccaggccgctattaaggaagatccttggaactgctacatgtgcggccacaagggcacatacggcctgctgagacggagagaggactggcctagcagactgcagatgttcttcgccaataaccacgaccaggagttcgacccccctaaggtgtaccctcccgtccccgccgagaagagaaagcccatccgggtcctgagcctgttcgatggcatcgccaccggtctgctggtgctgaaggacctgggcatccaggtggataggtacattgcctccgaggtgtgcgaggactccatcaccgtgggaatggtgcgtcatcagggcaagatcatgtacgtgggcgacgtgcggagcgtgacacagaagcatatccaggagtggggccctttcgacctggtgatcggcggcagcccttgcaatgacctgagcatcgtgaacccagcccggaagggcctgtacgagggaaccggcagactgttcttcgagttttacagactgctgcacgacgcccggcctaaggaaggcgacgaccggcccttcttttggctgttcgagaatgtggtggccatgggagtcagcgacaagcgggatattagccggttcctggagagcaaccccgtgatgatcgatgccaaggaagtgagcgccgcccaccgggccagatacttctggggcaatctgcctggcatgaacagacccctggccagcaccgtgaacgacaagctggagctgcaggagtgcctggagcacggccggatcgccaagttcagcaaggtgagaaccatcaccacccgaagcaacagcatcaaacaaggcaaggaccagcactttcctgtgttcatgaacgagaaggaggacatcctgtggtgtaccgagatggagagagtgttcgggttcccagtccactacacagatgtcagcaacatgtctagactggccagacagagactgctgggaagaagctggtccgtccctgtgatcagacacctgttcgcccctctgaaggagtacttcgcctgcgtgagcagcggcaacagcaacgccaacagccggggccccagcttctctagcggcctggtgccactgtccctgagagggagccacatgggccccatggagatctacaaaaccgtgagcgcctggaagcggcagcctgtgcgcgtgctgagcctgtttcggaatatcgataaagtcctgaaaagcctgggattcctggagagcggctctggctccggcggtggcaccctgaagtacgtggaggatgtgacaaacgtggtcagacgggatgtggagaagtggggccccttcgatctggtgtacggcagcacccaacccctgggcagctcttgtgaccggtgccctggctggtacatgtttcagttccaccggatcctgcagtacgccctgccgagacaggagtcccagcggccattcttttggattttcatggacaacttgctgctgaccgaggatgaccaggaaactaccactcggttcctgcagaccgaagccgtgaccctgcaggacgtgagaggccgggactaccagaacgccatgcgggtgtggtccaacatccctggactgaaaagcaagcacgcacctctgacccctaaagaagaggagtacctgcaggcccaggtgcggagcagaagcaagctggacgcccctaaggtggatctgctggtgaagaattgcctcctgcccctgagagagtacttcaagtatttcagccagaatagtctgcccctgggaggcagcggcggcggcaagcccgagctggtgagcttcgaggacgtggccgtgtacttcagcccccacgagtggggctgcctgaggcccgcccagagggccctgtacagggaggtgatgagggagacctacggcctgctgggcgccctgggcttccccggccccaagcccgccctgatcagctggatggagcaggagagcgaggcctggagccccgccgcccaggaccccgccgagggcgagagcctgggcggcgccctgggcggcccaagcagcggcgcccctcctcccagcggcggcagcccagccggctccccaacctctaccgaggagggcacctctgagtccgccacccccgagagcggccctggcacctccaccgagcccagcgagggcagcgcacccggcagccctgccggcagccccacctccacagaggagggaaccagcaccgagcccagcgaaggcagcgccccaggcaccagcaccgagcctagtgagcaggagattaaacggatcaacaagatcagaagaagacttgtgaaagacagcaacaccaagaaggccggcaagacaggccccatgaaaaccctgctggttagagtgatgacacccgatctgagagagcggctggaaaacctgagaaagaagcctgaaaatatcccccagcccatcagcaatacatctagagccaacctgaataagctgctgaccgattacaccgaaatgaagaaggcgatcctgcatgtgtactgggaagagttccagaaggaccctgtgggcctgatgagccgggtggcccagcctgccagcaagaagatcgatcagaacaagctgaaacctgagatggacgagaagggcaacctgaccaccgccggctttgcctgctctcagtgtggccagcccctgttcgtgtacaagctggagcaggtgtctgagaagggcaaggcttacaccaactacttcggacggtgcaatgtggccgagcacgaaaagctgatcctgctggcccagctgaagcccgagaaggatagcgacgaagccgtgacatatagcctgggaaagtttgggcagagggccctggatttctacagcattcatgtgaccaaggagtccacccaccccgtgaagcccctggcccagatcgccggaaacagatacgcctccggacctgtgggaaaggccctgagcgacgcatgtatgggcacaatcgcctccttcctgtctaagtaccaggacatcatcatcgaacaccagaaggtggtgaagggcaaccagaagagactggagagcctgcgggagctggccggcaaggaaaacctggaataccctagcgtgaccctgccacctcagcctcacaccaaggagggcgttgatgcctacaacgaagtgatcgcccgggtgcgaatgtgggtgaacctgaacctgtggcagaagctgaagctaagcagagatgatgccaagcctctgctgagactgaagggattcccttcctttcctctggtcgagagacaggccaacgaagtggactggtgggacatggtgtgtaacgtgaagaagctgatcaacgagaaaaaggaggatggcaaggtgttttggcagaatctggctggctacaagagacaggaagccctgagaccatacctgagcagcgaggaagatcggaagaagggaaagaaattcgctcggtaccagctgggcgacctgctgctgcacctggaaaagaagcacggcgaggactggggaaaggtgtacgacgaggcctgggagcggattgacaagaaagtggaaggcctgagcaagcacatcaagctggaagaggaacggagaagcgaggacgcccagagcaaggccgccctgaccgactggctgcgggctaaggccagcttcgtgatcgagggcctgaaggaggccgacaaggacgagttctgcagatgcgagctgaagctgcagaagtggtacggggacctgcggggaaagcccttcgccatcgaagccgagaacagcatcctggacatcagcggcttcagcaagcagtacaactgtgccttcatctggcagaaggacggcgtgaagaagctgaacctgtacctgatcatcaactacttcaagggcggcaagctgcggttcaagaagatcaaacctgaagccttcgaagccaacagattctacaccgtgatcaacaaaaagagcggcgagatcgtgcccatggaggtgaacttcaacttcgacgaccccaacctgatcatcctgcctctggcctttggcaagagacagggcagagaattcatctggaacgacctgctgtccctggaaaccggcagcctgaagctggccaacggaagagtgatcgagaagacactgtacaacagaagaacccggcaggatgagcctgccctgttcgtggccctgaccttcgagcggcgggaggtcctggactcctccaatatcaaaccaatgaacctgatcggcgtggcaagaggcgaaaacatccccgccgtgatcgccctgaccgaccccgagggctgcccactgagccggtttaaggatagcctgggaaacccaacccacatcctgagaatcggcgagagctataaggagaagcagcggaccatccaggccaagaaggaggtggagcagcggagagccggcggctacagccggaagtacgccagcaaagccaagaatctggcagacgatatggtgagaaacaccgctagagatctgctgtactacgccgtgacccaggatgccatgctgatcttcgccaacctgagccggggcttcggccggcagggcaagcggaccttcatggccgagagacagtacacacggatggaggactggctgaccgccaagctggcctacgagggcctgagcaagacctacctgtccaagacactggcccagtacacctccaagacatgcagcaactgtgggtttaccatcaccagcgccgactacgacagggtgctggagaagctgaagaagacagcaacaggctggatgaccacaattaacggcaaggagctgaaggtggagggccagattacctactacaacagatacaagagacagaacgtagtcaaggacctgtccgtcgagctggatagactgagcgaagaatctgtgaacaacgacatctcctcctggacaaagggcagaagcggagaagctctgagcctcctgaagaaaagattctcccatagacccgtgcaggagaagttcgtgtgcctgaactgcggcttcgagacacacgcagccgagcaagccgccctgaacatcgccagatcctggctgttcctgcggagccaggagtacaagaaataccagacaaacaagacaaccggcaacaccgataagagagccttcgtcgagacctggcagtccttttaccggaagaagcttaaggaggtgtggaaacctgccgtgcggtctggcggatctggcggaggctccaccagccccaagaaaaagagaaaagtctaagctgccttctgcggggcttgccttctggccatgcccttcttctctcccttgcacctgtacctcttggtctttgaataaagcctgagtaggaaggctagcaaaaaaaaaaaaaaaaaaaaaaaaaaaaaaaaaaaaaaaaaaaaaaaaaaaaaaaaaaaaaaaaaaaaaaaaaaaaaaaa

SEQ ID NO: 12373 - RNA, 5785 nt, synthetic construct
  source 1..5785: mol_type = other RNA
aggaaataagagagaaaagaagagtaagaagaaatataagagccaccatggcccctaagaagaagcgtaaagtgagccggatggaacgcctcgtctacgaggtgcggcagaagtgcagaaacatcgaggacatctgcatctcctgcggatctctgaacgtgaccctggagcacccactgttcatcggcggcatgtgccagaactgtaaaaactgttttctggagtgtgcctatcaatacgacgatgacggctaccagagctactgcaccatctgttgcggcggaagagaggtgctgatgtgtggaaataacaactgctgccggtgcttctgcgtggaatgcgtggacctgctggtgggccccggcgccgcccaggccgctattaaggaagatccttggaactgctacatgtgcggccacaagggcacatacggcctgctgagacggagagaggactggcctagcagactgcagatgttcttcgccaataaccacgaccaggagttcgacccccctaaggtgtaccctcccgtccccgccgagaagagaaagcccatccgggtcctgagcctgttcgatggcatcgccaccggtctgctggtgctgaaggacctgggcatccaggtggataggtacattgcctccgaggtgtgcgaggactccatcaccgtgggaatggtgcgtcatcagggcaagatcatgtacgtgggcgacgtgcggagcgtgacacagaagcatatccaggagtggggccctttcgacctggtgatcggcggcagcccttgcaatgacctgagcatcgtgaacccagcccggaagggcctgtacgagggaaccggcagactgttcttcgagttttacagactgctgcacgacgcccggcctaaggaaggcgacgaccggcccttcttttggctgttcgagaatgtggtggccatgggagtcagcgacaagcgggatattagccggttcctggagagcaaccccgtgatgatcgatgccaaggaagtgagcgccgcccaccgggccagatacttctggggcaatctgcctggcatgaacagacccctggccagcaccgtgaacgacaagctggagctgcaggagtgcctggagcacggccggatcgccaagttcagcaaggtgagaaccatcaccacccgaagcaacagcatcaaacaaggcaaggaccagcactttcctgtgttcatgaacgagaaggaggacatcctgtggtgtaccgagatggagagagtgttcgggttcccagtccactacacagatgtcagcaacatgtctagactggccagacagagactgctgggaagaagctggtccgtccctgtgatcagacacctgttcgcccctctgaaggagtacttcgcctgcgtgagcagcggcaacagcaacgccaacagccggggccccagcttctctagcggcctggtgccactgtccctgagagggagccacatgggccccatggagatctacaaaaccgtgagcgcctggaagcggcagcctgtgcgcgtgctgagcctgtttcggaatatcgataaagtcctgaaaagcctgggattcctggagagcggctctggctccggcggtggcaccctgaagtacgtggaggatgtgacaaacgtggtcagacgggatgtggagaagtggggccccttcgatctggtgtacggcagcacccaacccctgggcagctcttgtgaccggtgccctggctggtacatgtttcagttccaccggatcctgcagtacgccctgccgagacaggagtcccagcggccattcttttggattttcatggacaacttgctgctgaccgaggatgaccaggaaactaccactcggttcctgcagaccgaagccgtgaccctgcaggacgtgagaggccgggactaccagaacgccatgcgggtgtggtccaacatccctggactgaaaagcaagcacgcacctctgacccctaaagaagaggagtacctgcaggcccaggtgcggagcagaagcaagctggacgcccctaaggtggatctgctggtgaagaattgcctcctgcccctgagagagtacttcaagtatttcagccagaatagtctgcccctgggaggcagcggcggcggcgcccccgcccccgtgagcttcagggacgtggccgtggacttcaccaggcaggagtggcagctgctggcccccgcccagagggccctgtacagggaggtgatgctggagaactacaggaacgtggccagcctgggccaccccgtgagcaagcccaacgtgatcttccagctggagcagagcgaggccccctggatgcccgagggcgaggccgccaggagcctgccccccgactgggaggccaggggcggcccaagcagcggcgcccctcctcccagcggcggcagcccagccggctccccaacctctaccgaggagggcacctctgagtccgccacccccgagagcggccctggcacctccaccgagcccagcgagggcagcgcacccggcagccctgccggcagccccacctccacagaggagggaaccagcaccgagcccagcgaaggcagcgccccaggcaccagcaccgagcctagtgagcaggagattaaacggatcaacaagatcagaagaagacttgtgaaagacagcaacaccaagaaggccggcaagacaggccccatgaaaaccctgctggttagagtgatgacacccgatctgagagagcggctggaaaacctgagaaagaagcctgaaaatatcccccagcccatcagcaatacatctagagccaacctgaataagctgctgaccgattacaccgaaatgaagaaggcgatcctgcatgtgtactgggaagagttccagaaggaccctgtgggcctgatgagccgggtggcccagcctgccagcaagaagatcgatcagaacaagctgaaacctgagatggacgagaagggcaacctgaccaccgccggctttgcctgctctcagtgtggccagcccctgttcgtgtacaagctggagcaggtgtctgagaagggcaaggcttacaccaactacttcggacggtgcaatgtggccgagcacgaaaagctgatcctgctggcccagctgaagcccgagaaggatagcgacgaagccgtgacatatagcctgggaaagtttgggcagagggccctggatttctacagcattcatgtgaccaaggagtccacccaccccgtgaagcccctggcccagatcgccggaaacagatacgcctccggacctgtgggaaaggccctgagcgacgcatgtatgggcacaatcgcctccttcctgtctaagtaccaggacatcatcatcgaacaccagaaggtggtgaagggcaaccagaagagactggagagcctgcgggagctggccggcaaggaaaacctggaataccctagcgtgaccctgccacctcagcctcacaccaaggagggcgttgatgcctacaacgaagtgatcgcccgggtgcgaatgtgggtgaacctgaacctgtggcagaagctgaagctaagcagagatgatgccaagcctctgctgagactgaagggattcccttcctttcctctggtcgagagacaggccaacgaagtggactggtgggacatggtgtgtaacgtgaagaagctgatcaacgagaaaaaggaggatggcaaggtgttttggcagaatctggctggctacaagagacaggaagccctgagaccatacctgagcagcgaggaagatcggaagaagggaaagaaattcgctcggtaccagctgggcgacctgctgctgcacctggaaaagaagcacggcgaggactggggaaaggtgtacgacgaggcctgggagcggattgacaagaaagtggaaggcctgagcaagcacatcaagctggaagaggaacggagaagcgaggacgcccagagcaaggccgccctgaccgactggctgcgggctaaggccagcttcgtgatcgagggcctgaaggaggccgacaaggacgagttctgcagatgcgagctgaagctgcagaagtggtacggggacctgcggggaaagcccttcgccatcgaagccgagaacagcatcctggacatcagcggcttcagcaagcagtacaactgtgccttcatctggcagaaggacggcgtgaagaagctgaacctgtacctgatcatcaactacttcaagggcggcaagctgcggttcaagaagatcaaacctgaagccttcgaagccaacagattctacaccgtgatcaacaaaaagagcggcgagatcgtgcccatggaggtgaacttcaacttcgacgaccccaacctgatcatcctgcctctggcctttggcaagagacagggcagagaattcatctggaacgacctgctgtccctggaaaccggcagcctgaagctggccaacggaagagtgatcgagaagacactgtacaacagaagaacccggcaggatgagcctgccctgttcgtggccctgaccttcgagcggcgggaggtcctggactcctccaatatcaaaccaatgaacctgatcggcgtggcaagaggcgaaaacatccccgccgtgatcgccctgaccgaccccgagggctgcccactgagccggtttaaggatagcctgggaaacccaacccacatcctgagaatcggcgagagctataaggagaagcagcggaccatccaggccaagaaggaggtggagcagcggagagccggcggctacagccggaagtacgccagcaaagccaagaatctggcagacgatatggtgagaaacaccgctagagatctgctgtactacgccgtgacccaggatgccatgctgatcttcgccaacctgagccggggcttcggccggcagggcaagcggaccttcatggccgagagacagtacacacggatggaggactggctgaccgccaagctggcctacgagggcctgagcaagacctacctgtccaagacactggcccagtacacctccaagacatgcagcaactgtgggtttaccatcaccagcgccgactacgacagggtgctggagaagctgaagaagacagcaacaggctggatgaccacaattaacggcaaggagctgaaggtggagggccagattacctactacaacagatacaagagacagaacgtagtcaaggacctgtccgtcgagctggatagactgagcgaagaatctgtgaacaacgacatctcctcctggacaaagggcagaagcggagaagctctgagcctcctgaagaaaagattctcccatagacccgtgcaggagaagttcgtgtgcctgaactgcggcttcgagacacacgcagccgagcaagccgccctgaacatcgccagatcctggctgttcctgcggagccaggagtacaagaaataccagacaaacaagacaaccggcaacaccgataagagagccttcgtcgagacctggcagtccttttaccggaagaagcttaaggaggtgtggaaacctgccgtgcggtctggcggatctggcggaggctccaccagccccaagaaaaagagaaaagtctaagctgccttctgcggggcttgccttctggccatgcccttcttctctcccttgcacctgtacctcttggtctttgaataaagcctgagtaggaaggctagcaaaaaaaaaaaaaaaaaaaaaaaaaaaaaaaaaaaaaaaaaaaaaaaaaaaaaaaaaaaaaaaaaaaaaaaaaaaaaaaa

SEQ ID NO: 12374 - RNA, 5785 nt, synthetic construct
  source 1..5785: mol_type = other RNA
aggaaataagagagaaaagaagagtaagaagaaatataagagccaccatggcccctaagaagaagcgtaaagtgagccggatggaacgcctcgtctacgaggtgcggcagaagtgcagaaacatcgaggacatctgcatctcctgcggatctctgaacgtgaccctggagcacccactgttcatcggcggcatgtgccagaactgtaaaaactgttttctggagtgtgcctatcaatacgacgatgacggctaccagagctactgcaccatctgttgcggcggaagagaggtgctgatgtgtggaaataacaactgctgccggtgcttctgcgtggaatgcgtggacctgctggtgggccccggcgccgcccaggccgctattaaggaagatccttggaactgctacatgtgcggccacaagggcacatacggcctgctgagacggagagaggactggcctagcagactgcagatgttcttcgccaataaccacgaccaggagttcgacccccctaaggtgtaccctcccgtccccgccgagaagagaaagcccatccgggtcctgagcctgttcgatggcatcgccaccggtctgctggtgctgaaggacctgggcatccaggtggataggtacattgcctccgaggtgtgcgaggactccatcaccgtgggaatggtgcgtcatcagggcaagatcatgtacgtgggcgacgtgcggagcgtgacacagaagcatatccaggagtggggccctttcgacctggtgatcggcggcagcccttgcaatgacctgagcatcgtgaacccagcccggaagggcctgtacgagggaaccggcagactgttcttcgagttttacagactgctgcacgacgcccggcctaaggaaggcgacgaccggcccttcttttggctgttcgagaatgtggtggccatgggagtcagcgacaagcgggatattagccggttcctggagagcaaccccgtgatgatcgatgccaaggaagtgagcgccgcccaccgggccagatacttctggggcaatctgcctggcatgaacagacccctggccagcaccgtgaacgacaagctggagctgcaggagtgcctggagcacggccggatcgccaagttcagcaaggtgagaaccatcaccacccgaagcaacagcatcaaacaaggcaaggaccagcactttcctgtgttcatgaacgagaaggaggacatcctgtggtgtaccgagatggagagagtgttcgggttcccagtccactacacagatgtcagcaacatgtctagactggccagacagagactgctgggaagaagctggtccgtccctgtgatcagacacctgttcgcccctctgaaggagtacttcgcctgcgtgagcagcggcaacagcaacgccaacagccggggccccagcttctctagcggcctggtgccactgtccctgagagggagccacatgggccccatggagatctacaaaaccgtgagcgcctggaagcggcagcctgtgcgcgtgctgagcctgtttcggaatatcgataaagtcctgaaaagcctgggattcctggagagcggctctggctccggcggtggcaccctgaagtacgtggaggatgtgacaaacgtggtcagacgggatgtggagaagtggggccccttcgatctggtgtacggcagcacccaacccctgggcagctcttgtgaccggtgccctggctggtacatgtttcagttccaccggatcctgcagtacgccctgccgagacaggagtcccagcggccattcttttggattttcatggacaacttgctgctgaccgaggatgaccaggaaactaccactcggttcctgcagaccgaagccgtgaccctgcaggacgtgagaggccgggactaccagaacgccatgcgggtgtggtccaacatccctggactgaaaagcaagcacgcacctctgacccctaaagaagaggagtacctgcaggcccaggtgcggagcagaagcaagctggacgcccctaaggtggatctgctggtgaagaattgcctcctgcccctgagagagtacttcaagtatttcagccagaatagtctgcccctgggaggcagcggcggcggcagcgtgatgttcaacgacatcagcatcgtgttcagccaggaggagtgggagtacctggacctggagcagaaggacctgtacaaggacgtgatgctggagaactacggcaacctggtgagcctgggctgcttcatcgccaagcccgacgtgatcagcctgctggagcagggcaaggagccctggaaggtgatcaggaagggcaggaggggctaccccgacctggagaccaggtacgagaccaagggcggcccaagcagcggcgcccctcctcccagcggcggcagcccagccggctccccaacctctaccgaggagggcacctctgagtccgccacccccgagagcggccctggcacctccaccgagcccagcgagggcagcgcacccggcagccctgccggcagccccacctccacagaggagggaaccagcaccgagcccagcgaaggcagcgccccaggcaccagcaccgagcctagtgagcaggagattaaacggatcaacaagatcagaagaagacttgtgaaagacagcaacaccaagaaggccggcaagacaggccccatgaaaaccctgctggttagagtgatgacacccgatctgagagagcggctggaaaacctgagaaagaagcctgaaaatatcccccagcccatcagcaatacatctagagccaacctgaataagctgctgaccgattacaccgaaatgaagaaggcgatcctgcatgtgtactgggaagagttccagaaggaccctgtgggcctgatgagccgggtggcccagcctgccagcaagaagatcgatcagaacaagctgaaacctgagatggacgagaagggcaacctgaccaccgccggctttgcctgctctcagtgtggccagcccctgttcgtgtacaagctggagcaggtgtctgagaagggcaaggcttacaccaactacttcggacggtgcaatgtggccgagcacgaaaagctgatcctgctggcccagctgaagcccgagaaggatagcgacgaagccgtgacatatagcctgggaaagtttgggcagagggccctggatttctacagcattcatgtgaccaaggagtccacccaccccgtgaagcccctggcccagatcgccggaaacagatacgcctccggacctgtgggaaaggccctgagcgacgcatgtatgggcacaatcgcctccttcctgtctaagtaccaggacatcatcatcgaacaccagaaggtggtgaagggcaaccagaagagactggagagcctgcgggagctggccggcaaggaaaacctggaataccctagcgtgaccctgccacctcagcctcacaccaaggagggcgttgatgcctacaacgaagtgatcgcccgggtgcgaatgtgggtgaacctgaacctgtggcagaagctgaagctaagcagagatgatgccaagcctctgctgagactgaagggattcccttcctttcctctggtcgagagacaggccaacgaagtggactggtgggacatggtgtgtaacgtgaagaagctgatcaacgagaaaaaggaggatggcaaggtgttttggcagaatctggctggctacaagagacaggaagccctgagaccatacctgagcagcgaggaagatcggaagaagggaaagaaattcgctcggtaccagctgggcgacctgctgctgcacctggaaaagaagcacggcgaggactggggaaaggtgtacgacgaggcctgggagcggattgacaagaaagtggaaggcctgagcaagcacatcaagctggaagaggaacggagaagcgaggacgcccagagcaaggccgccctgaccgactggctgcgggctaaggccagcttcgtgatcgagggcctgaaggaggccgacaaggacgagttctgcagatgcgagctgaagctgcagaagtggtacggggacctgcggggaaagcccttcgccatcgaagccgagaacagcatcctggacatcagcggcttcagcaagcagtacaactgtgccttcatctggcagaaggacggcgtgaagaagctgaacctgtacctgatcatcaactacttcaagggcggcaagctgcggttcaagaagatcaaacctgaagccttcgaagccaacagattctacaccgtgatcaacaaaaagagcggcgagatcgtgcccatggaggtgaacttcaacttcgacgaccccaacctgatcatcctgcctctggcctttggcaagagacagggcagagaattcatctggaacgacctgctgtccctggaaaccggcagcctgaagctggccaacggaagagtgatcgagaagacactgtacaacagaagaacccggcaggatgagcctgccctgttcgtggccctgaccttcgagcggcgggaggtcctggactcctccaatatcaaaccaatgaacctgatcggcgtggcaagaggcgaaaacatccccgccgtgatcgccctgaccgaccccgagggctgcccactgagccggtttaaggatagcctgggaaacccaacccacatcctgagaatcggcgagagctataaggagaagcagcggaccatccaggccaagaaggaggtggagcagcggagagccggcggctacagccggaagtacgccagcaaagccaagaatctggcagacgatatggtgagaaacaccgctagagatctgctgtactacgccgtgacccaggatgccatgctgatcttcgccaacctgagccggggcttcggccggcagggcaagcggaccttcatggccgagagacagtacacacggatggaggactggctgaccgccaagctggcctacgagggcctgagcaagacctacctgtccaagacactggcccagtacacctccaagacatgcagcaactgtgggtttaccatcaccagcgccgactacgacagggtgctggagaagctgaagaagacagcaacaggctggatgaccacaattaacggcaaggagctgaaggtggagggccagattacctactacaacagatacaagagacagaacgtagtcaaggacctgtccgtcgagctggatagactgagcgaagaatctgtgaacaacgacatctcctcctggacaaagggcagaagcggagaagctctgagcctcctgaagaaaagattctcccatagacccgtgcaggagaagttcgtgtgcctgaactgcggcttcgagacacacgcagccgagcaagccgccctgaacatcgccagatcctggctgttcctgcggagccaggagtacaagaaataccagacaaacaagacaaccggcaacaccgataagagagccttcgtcgagacctggcagtccttttaccggaagaagcttaaggaggtgtggaaacctgccgtgcggtctggcggatctggcggaggctccaccagccccaagaaaaagagaaaagtctaagctgccttctgcggggcttgccttctggccatgcccttcttctctcccttgcacctgtacctcttggtctttgaataaagcctgagtaggaaggctagcaaaaaaaaaaaaaaaaaaaaaaaaaaaaaaaaaaaaaaaaaaaaaaaaaaaaaaaaaaaaaaaaaaaaaaaaaaaaaaaa

SEQ ID NO: 12375 - RNA, 5785 nt, synthetic construct
  source 1..5785: mol_type = other RNA
aggaaataagagagaaaagaagagtaagaagaaatataagagccaccatggcccctaagaagaagcgtaaagtgagccggatggaacgcctcgtctacgaggtgcggcagaagtgcagaaacatcgaggacatctgcatctcctgcggatctctgaacgtgaccctggagcacccactgttcatcggcggcatgtgccagaactgtaaaaactgttttctggagtgtgcctatcaatacgacgatgacggctaccagagctactgcaccatctgttgcggcggaagagaggtgctgatgtgtggaaataacaactgctgccggtgcttctgcgtggaatgcgtggacctgctggtgggccccggcgccgcccaggccgctattaaggaagatccttggaactgctacatgtgcggccacaagggcacatacggcctgctgagacggagagaggactggcctagcagactgcagatgttcttcgccaataaccacgaccaggagttcgacccccctaaggtgtaccctcccgtccccgccgagaagagaaagcccatccgggtcctgagcctgttcgatggcatcgccaccggtctgctggtgctgaaggacctgggcatccaggtggataggtacattgcctccgaggtgtgcgaggactccatcaccgtgggaatggtgcgtcatcagggcaagatcatgtacgtgggcgacgtgcggagcgtgacacagaagcatatccaggagtggggccctttcgacctggtgatcggcggcagcccttgcaatgacctgagcatcgtgaacccagcccggaagggcctgtacgagggaaccggcagactgttcttcgagttttacagactgctgcacgacgcccggcctaaggaaggcgacgaccggcccttcttttggctgttcgagaatgtggtggccatgggagtcagcgacaagcgggatattagccggttcctggagagcaaccccgtgatgatcgatgccaaggaagtgagcgccgcccaccgggccagatacttctggggcaatctgcctggcatgaacagacccctggccagcaccgtgaacgacaagctggagctgcaggagtgcctggagcacggccggatcgccaagttcagcaaggtgagaaccatcaccacccgaagcaacagcatcaaacaaggcaaggaccagcactttcctgtgttcatgaacgagaaggaggacatcctgtggtgtaccgagatggagagagtgttcgggttcccagtccactacacagatgtcagcaacatgtctagactggccagacagagactgctgggaagaagctggtccgtccctgtgatcagacacctgttcgcccctctgaaggagtacttcgcctgcgtgagcagcggcaacagcaacgccaacagccggggccccagcttctctagcggcctggtgccactgtccctgagagggagccacatgggccccatggagatctacaaaaccgtgagcgcctggaagcggcagcctgtgcgcgtgctgagcctgtttcggaatatcgataaagtcctgaaaagcctgggattcctggagagcggctctggctccggcggtggcaccctgaagtacgtggaggatgtgacaaacgtggtcagacgggatgtggagaagtggggccccttcgatctggtgtacggcagcacccaacccctgggcagctcttgtgaccggtgccctggctggtacatgtttcagttccaccggatcctgcagtacgccctgccgagacaggagtcccagcggccattcttttggattttcatggacaacttgctgctgaccgaggatgaccaggaaactaccactcggttcctgcagaccgaagccgtgaccctgcaggacgtgagaggccgggactaccagaacgccatgcgggtgtggtccaacatccctggactgaaaagcaagcacgcacctctgacccctaaagaagaggagtacctgcaggcccaggtgcggagcagaagcaagctggacgcccctaaggtggatctgctggtgaagaattgcctcctgcccctgagagagtacttcaagtatttcagccagaatagtctgcccctgggaggcagcggcggcggcatgatcaactaccagacccccgtgagcttcagggacgtggtggtgggcttcacccaggaggagtggcacaggctgaaccccacccagagggccctgtacagggacgtgatgctggagacctacagcaacctggtgagcgtgggctacgagggcaccaagcccgacgtgatcctgaggctggagcaggaggaggccccctggatcggcgaggccgcctgcctgggctgccactgctggggcaagggcggcccaagcagcggcgcccctcctcccagcggcggcagcccagccggctccccaacctctaccgaggagggcacctctgagtccgccacccccgagagcggccctggcacctccaccgagcccagcgagggcagcgcacccggcagccctgccggcagccccacctccacagaggagggaaccagcaccgagcccagcgaaggcagcgccccaggcaccagcaccgagcctagtgagcaggagattaaacggatcaacaagatcagaagaagacttgtgaaagacagcaacaccaagaaggccggcaagacaggccccatgaaaaccctgctggttagagtgatgacacccgatctgagagagcggctggaaaacctgagaaagaagcctgaaaatatcccccagcccatcagcaatacatctagagccaacctgaataagctgctgaccgattacaccgaaatgaagaaggcgatcctgcatgtgtactgggaagagttccagaaggaccctgtgggcctgatgagccgggtggcccagcctgccagcaagaagatcgatcagaacaagctgaaacctgagatggacgagaagggcaacctgaccaccgccggctttgcctgctctcagtgtggccagcccctgttcgtgtacaagctggagcaggtgtctgagaagggcaaggcttacaccaactacttcggacggtgcaatgtggccgagcacgaaaagctgatcctgctggcccagctgaagcccgagaaggatagcgacgaagccgtgacatatagcctgggaaagtttgggcagagggccctggatttctacagcattcatgtgaccaaggagtccacccaccccgtgaagcccctggcccagatcgccggaaacagatacgcctccggacctgtgggaaaggccctgagcgacgcatgtatgggcacaatcgcctccttcctgtctaagtaccaggacatcatcatcgaacaccagaaggtggtgaagggcaaccagaagagactggagagcctgcgggagctggccggcaaggaaaacctggaataccctagcgtgaccctgccacctcagcctcacaccaaggagggcgttgatgcctacaacgaagtgatcgcccgggtgcgaatgtgggtgaacctgaacctgtggcagaagctgaagctaagcagagatgatgccaagcctctgctgagactgaagggattcccttcctttcctctggtcgagagacaggccaacgaagtggactggtgggacatggtgtgtaacgtgaagaagctgatcaacgagaaaaaggaggatggcaaggtgttttggcagaatctggctggctacaagagacaggaagccctgagaccatacctgagcagcgaggaagatcggaagaagggaaagaaattcgctcggtaccagctgggcgacctgctgctgcacctggaaaagaagcacggcgaggactggggaaaggtgtacgacgaggcctgggagcggattgacaagaaagtggaaggcctgagcaagcacatcaagctggaagaggaacggagaagcgaggacgcccagagcaaggccgccctgaccgactggctgcgggctaaggccagcttcgtgatcgagggcctgaaggaggccgacaaggacgagttctgcagatgcgagctgaagctgcagaagtggtacggggacctgcggggaaagcccttcgccatcgaagccgagaacagcatcctggacatcagcggcttcagcaagcagtacaactgtgccttcatctggcagaaggacggcgtgaagaagctgaacctgtacctgatcatcaactacttcaagggcggcaagctgcggttcaagaagatcaaacctgaagccttcgaagccaacagattctacaccgtgatcaacaaaaagagcggcgagatcgtgcccatggaggtgaacttcaacttcgacgaccccaacctgatcatcctgcctctggcctttggcaagagacagggcagagaattcatctggaacgacctgctgtccctggaaaccggcagcctgaagctggccaacggaagagtgatcgagaagacactgtacaacagaagaacccggcaggatgagcctgccctgttcgtggccctgaccttcgagcggcgggaggtcctggactcctccaatatcaaaccaatgaacctgatcggcgtggcaagaggcgaaaacatccccgccgtgatcgccctgaccgaccccgagggctgcccactgagccggtttaaggatagcctgggaaacccaacccacatcctgagaatcggcgagagctataaggagaagcagcggaccatccaggccaagaaggaggtggagcagcggagagccggcggctacagccggaagtacgccagcaaagccaagaatctggcagacgatatggtgagaaacaccgctagagatctgctgtactacgccgtgacccaggatgccatgctgatcttcgccaacctgagccggggcttcggccggcagggcaagcggaccttcatggccgagagacagtacacacggatggaggactggctgaccgccaagctggcctacgagggcctgagcaagacctacctgtccaagacactggcccagtacacctccaagacatgcagcaactgtgggtttaccatcaccagcgccgactacgacagggtgctggagaagctgaagaagacagcaacaggctggatgaccacaattaacggcaaggagctgaaggtggagggccagattacctactacaacagatacaagagacagaacgtagtcaaggacctgtccgtcgagctggatagactgagcgaagaatctgtgaacaacgacatctcctcctggacaaagggcagaagcggagaagctctgagcctcctgaagaaaagattctcccatagacccgtgcaggagaagttcgtgtgcctgaactgcggcttcgagacacacgcagccgagcaagccgccctgaacatcgccagatcctggctgttcctgcggagccaggagtacaagaaataccagacaaacaagacaaccggcaacaccgataagagagccttcgtcgagacctggcagtccttttaccggaagaagcttaaggaggtgtggaaacctgccgtgcggtctggcggatctggcggaggctccaccagccccaagaaaaagagaaaagtctaagctgccttctgcggggcttgccttctggccatgcccttcttctctcccttgcacctgtacctcttggtctttgaataaagcctgagtaggaaggctagcaaaaaaaaaaaaaaaaaaaaaaaaaaaaaaaaaaaaaaaaaaaaaaaaaaaaaaaaaaaaaaaaaaaaaaaaaaaaaaaa

SEQ ID NO: 12376 - RNA, 5785 nt, synthetic construct
  source 1..5785: mol_type = other RNA
aggaaataagagagaaaagaagagtaagaagaaatataagagccaccatggcccctaagaagaagcgtaaagtgagccggatggaacgcctcgtctacgaggtgcggcagaagtgcagaaacatcgaggacatctgcatctcctgcggatctctgaacgtgaccctggagcacccactgttcatcggcggcatgtgccagaactgtaaaaactgttttctggagtgtgcctatcaatacgacgatgacggctaccagagctactgcaccatctgttgcggcggaagagaggtgctgatgtgtggaaataacaactgctgccggtgcttctgcgtggaatgcgtggacctgctggtgggccccggcgccgcccaggccgctattaaggaagatccttggaactgctacatgtgcggccacaagggcacatacggcctgctgagacggagagaggactggcctagcagactgcagatgttcttcgccaataaccacgaccaggagttcgacccccctaaggtgtaccctcccgtccccgccgagaagagaaagcccatccgggtcctgagcctgttcgatggcatcgccaccggtctgctggtgctgaaggacctgggcatccaggtggataggtacattgcctccgaggtgtgcgaggactccatcaccgtgggaatggtgcgtcatcagggcaagatcatgtacgtgggcgacgtgcggagcgtgacacagaagcatatccaggagtggggccctttcgacctggtgatcggcggcagcccttgcaatgacctgagcatcgtgaacccagcccggaagggcctgtacgagggaaccggcagactgttcttcgagttttacagactgctgcacgacgcccggcctaaggaaggcgacgaccggcccttcttttggctgttcgagaatgtggtggccatgggagtcagcgacaagcgggatattagccggttcctggagagcaaccccgtgatgatcgatgccaaggaagtgagcgccgcccaccgggccagatacttctggggcaatctgcctggcatgaacagacccctggccagcaccgtgaacgacaagctggagctgcaggagtgcctggagcacggccggatcgccaagttcagcaaggtgagaaccatcaccacccgaagcaacagcatcaaacaaggcaaggaccagcactttcctgtgttcatgaacgagaaggaggacatcctgtggtgtaccgagatggagagagtgttcgggttcccagtccactacacagatgtcagcaacatgtctagactggccagacagagactgctgggaagaagctggtccgtccctgtgatcagacacctgttcgcccctctgaaggagtacttcgcctgcgtgagcagcggcaacagcaacgccaacagccggggccccagcttctctagcggcctggtgccactgtccctgagagggagccacatgggccccatggagatctacaaaaccgtgagcgcctggaagcggcagcctgtgcgcgtgctgagcctgtttcggaatatcgataaagtcctgaaaagcctgggattcctggagagcggctctggctccggcggtggcaccctgaagtacgtggaggatgtgacaaacgtggtcagacgggatgtggagaagtggggccccttcgatctggtgtacggcagcacccaacccctgggcagctcttgtgaccggtgccctggctggtacatgtttcagttccaccggatcctgcagtacgccctgccgagacaggagtcccagcggccattcttttggattttcatggacaacttgctgctgaccgaggatgaccaggaaactaccactcggttcctgcagaccgaagccgtgaccctgcaggacgtgagaggccgggactaccagaacgccatgcgggtgtggtccaacatccctggactgaaaagcaagcacgcacctctgacccctaaagaagaggagtacctgcaggcccaggtgcggagcagaagcaagctggacgcccctaaggtggatctgctggtgaagaattgcctcctgcccctgagagagtacttcaagtatttcagccagaatagtctgcccctgggaggcagcggcggcggcggcctgctgagcttcgaggacgtggccctgtacttcaccagggaggagtgggacaccctggactgggcccagaaggccctgtacagggacgtgatgctggacaactacaggcacatcgtgagcctgggcttccccttccccaagcccgaggtgatctgccagctggagcagtgggaggagccctggatcctggacctgcccagggccggcaccaggaaggccagcggcagcgcctgccccgacggcggcccaagcagcggcgcccctcctcccagcggcggcagcccagccggctccccaacctctaccgaggagggcacctctgagtccgccacccccgagagcggccctggcacctccaccgagcccagcgagggcagcgcacccggcagccctgccggcagccccacctccacagaggagggaaccagcaccgagcccagcgaaggcagcgccccaggcaccagcaccgagcctagtgagcaggagattaaacggatcaacaagatcagaagaagacttgtgaaagacagcaacaccaagaaggccggcaagacaggccccatgaaaaccctgctggttagagtgatgacacccgatctgagagagcggctggaaaacctgagaaagaagcctgaaaatatcccccagcccatcagcaatacatctagagccaacctgaataagctgctgaccgattacaccgaaatgaagaaggcgatcctgcatgtgtactgggaagagttccagaaggaccctgtgggcctgatgagccgggtggcccagcctgccagcaagaagatcgatcagaacaagctgaaacctgagatggacgagaagggcaacctgaccaccgccggctttgcctgctctcagtgtggccagcccctgttcgtgtacaagctggagcaggtgtctgagaagggcaaggcttacaccaactacttcggacggtgcaatgtggccgagcacgaaaagctgatcctgctggcccagctgaagcccgagaaggatagcgacgaagccgtgacatatagcctgggaaagtttgggcagagggccctggatttctacagcattcatgtgaccaaggagtccacccaccccgtgaagcccctggcccagatcgccggaaacagatacgcctccggacctgtgggaaaggccctgagcgacgcatgtatgggcacaatcgcctccttcctgtctaagtaccaggacatcatcatcgaacaccagaaggtggtgaagggcaaccagaagagactggagagcctgcgggagctggccggcaaggaaaacctggaataccctagcgtgaccctgccacctcagcctcacaccaaggagggcgttgatgcctacaacgaagtgatcgcccgggtgcgaatgtgggtgaacctgaacctgtggcagaagctgaagctaagcagagatgatgccaagcctctgctgagactgaagggattcccttcctttcctctggtcgagagacaggccaacgaagtggactggtgggacatggtgtgtaacgtgaagaagctgatcaacgagaaaaaggaggatggcaaggtgttttggcagaatctggctggctacaagagacaggaagccctgagaccatacctgagcagcgaggaagatcggaagaagggaaagaaattcgctcggtaccagctgggcgacctgctgctgcacctggaaaagaagcacggcgaggactggggaaaggtgtacgacgaggcctgggagcggattgacaagaaagtggaaggcctgagcaagcacatcaagctggaagaggaacggagaagcgaggacgcccagagcaaggccgccctgaccgactggctgcgggctaaggccagcttcgtgatcgagggcctgaaggaggccgacaaggacgagttctgcagatgcgagctgaagctgcagaagtggtacggggacctgcggggaaagcccttcgccatcgaagccgagaacagcatcctggacatcagcggcttcagcaagcagtacaactgtgccttcatctggcagaaggacggcgtgaagaagctgaacctgtacctgatcatcaactacttcaagggcggcaagctgcggttcaagaagatcaaacctgaagccttcgaagccaacagattctacaccgtgatcaacaaaaagagcggcgagatcgtgcccatggaggtgaacttcaacttcgacgaccccaacctgatcatcctgcctctggcctttggcaagagacagggcagagaattcatctggaacgacctgctgtccctggaaaccggcagcctgaagctggccaacggaagagtgatcgagaagacactgtacaacagaagaacccggcaggatgagcctgccctgttcgtggccctgaccttcgagcggcgggaggtcctggactcctccaatatcaaaccaatgaacctgatcggcgtggcaagaggcgaaaacatccccgccgtgatcgccctgaccgaccccgagggctgcccactgagccggtttaaggatagcctgggaaacccaacccacatcctgagaatcggcgagagctataaggagaagcagcggaccatccaggccaagaaggaggtggagcagcggagagccggcggctacagccggaagtacgccagcaaagccaagaatctggcagacgatatggtgagaaacaccgctagagatctgctgtactacgccgtgacccaggatgccatgctgatcttcgccaacctgagccggggcttcggccggcagggcaagcggaccttcatggccgagagacagtacacacggatggaggactggctgaccgccaagctggcctacgagggcctgagcaagacctacctgtccaagacactggcccagtacacctccaagacatgcagcaactgtgggtttaccatcaccagcgccgactacgacagggtgctggagaagctgaagaagacagcaacaggctggatgaccacaattaacggcaaggagctgaaggtggagggccagattacctactacaacagatacaagagacagaacgtagtcaaggacctgtccgtcgagctggatagactgagcgaagaatctgtgaacaacgacatctcctcctggacaaagggcagaagcggagaagctctgagcctcctgaagaaaagattctcccatagacccgtgcaggagaagttcgtgtgcctgaactgcggcttcgagacacacgcagccgagcaagccgccctgaacatcgccagatcctggctgttcctgcggagccaggagtacaagaaataccagacaaacaagacaaccggcaacaccgataagagagccttcgtcgagacctggcagtccttttaccggaagaagcttaaggaggtgtggaaacctgccgtgcggtctggcggatctggcggaggctccaccagccccaagaaaaagagaaaagtctaagctgccttctgcggggcttgccttctggccatgcccttcttctctcccttgcacctgtacctcttggtctttgaataaagcctgagtaggaaggctagcaaaaaaaaaaaaaaaaaaaaaaaaaaaaaaaaaaaaaaaaaaaaaaaaaaaaaaaaaaaaaaaaaaaaaaaaaaaaaaaa

SEQ ID NO: 12377 - RNA, 5785 nt, synthetic construct
  source 1..5785: mol_type = other RNA
aggaaataagagagaaaagaagagtaagaagaaatataagagccaccatggcccctaagaagaagcgtaaagtgagccggatggaacgcctcgtctacgaggtgcggcagaagtgcagaaacatcgaggacatctgcatctcctgcggatctctgaacgtgaccctggagcacccactgttcatcggcggcatgtgccagaactgtaaaaactgttttctggagtgtgcctatcaatacgacgatgacggctaccagagctactgcaccatctgttgcggcggaagagaggtgctgatgtgtggaaataacaactgctgccggtgcttctgcgtggaatgcgtggacctgctggtgggccccggcgccgcccaggccgctattaaggaagatccttggaactgctacatgtgcggccacaagggcacatacggcctgctgagacggagagaggactggcctagcagactgcagatgttcttcgccaataaccacgaccaggagttcgacccccctaaggtgtaccctcccgtccccgccgagaagagaaagcccatccgggtcctgagcctgttcgatggcatcgccaccggtctgctggtgctgaaggacctgggcatccaggtggataggtacattgcctccgaggtgtgcgaggactccatcaccgtgggaatggtgcgtcatcagggcaagatcatgtacgtgggcgacgtgcggagcgtgacacagaagcatatccaggagtggggccctttcgacctggtgatcggcggcagcccttgcaatgacctgagcatcgtgaacccagcccggaagggcctgtacgagggaaccggcagactgttcttcgagttttacagactgctgcacgacgcccggcctaaggaaggcgacgaccggcccttcttttggctgttcgagaatgtggtggccatgggagtcagcgacaagcgggatattagccggttcctggagagcaaccccgtgatgatcgatgccaaggaagtgagcgccgcccaccgggccagatacttctggggcaatctgcctggcatgaacagacccctggccagcaccgtgaacgacaagctggagctgcaggagtgcctggagcacggccggatcgccaagttcagcaaggtgagaaccatcaccacccgaagcaacagcatcaaacaaggcaaggaccagcactttcctgtgttcatgaacgagaaggaggacatcctgtggtgtaccgagatggagagagtgttcgggttcccagtccactacacagatgtcagcaacatgtctagactggccagacagagactgctgggaagaagctggtccgtccctgtgatcagacacctgttcgcccctctgaaggagtacttcgcctgcgtgagcagcggcaacagcaacgccaacagccggggccccagcttctctagcggcctggtgccactgtccctgagagggagccacatgggccccatggagatctacaaaaccgtgagcgcctggaagcggcagcctgtgcgcgtgctgagcctgtttcggaatatcgataaagtcctgaaaagcctgggattcctggagagcggctctggctccggcggtggcaccctgaagtacgtggaggatgtgacaaacgtggtcagacgggatgtggagaagtggggccccttcgatctggtgtacggcagcacccaacccctgggcagctcttgtgaccggtgccctggctggtacatgtttcagttccaccggatcctgcagtacgccctgccgagacaggagtcccagcggccattcttttggattttcatggacaacttgctgctgaccgaggatgaccaggaaactaccactcggttcctgcagaccgaagccgtgaccctgcaggacgtgagaggccgggactaccagaacgccatgcgggtgtggtccaacatccctggactgaaaagcaagcacgcacctctgacccctaaagaagaggagtacctgcaggcccaggtgcggagcagaagcaagctggacgcccctaaggtggatctgctggtgaagaattgcctcctgcccctgagagagtacttcaagtatttcagccagaatagtctgcccctgggaggcagcggcggcggcgtgttccagggcagcctgagcttcgaggacgtgaccgtggacttcagcagggaggagtggaggctgctggacctggcccagaagagcctgtacagggacgtgatgctggagaactacttcaacctgatcagcgtgggctgccaggtgcccaagcaggaggtgctgttcagcctggagcaggaggagcccaggatgctggacggcgagatcagcagccacaactgcctgggcggcgacatcggcggcggcccaagcagcggcgcccctcctcccagcggcggcagcccagccggctccccaacctctaccgaggagggcacctctgagtccgccacccccgagagcggccctggcacctccaccgagcccagcgagggcagcgcacccggcagccctgccggcagccccacctccacagaggagggaaccagcaccgagcccagcgaaggcagcgccccaggcaccagcaccgagcctagtgagcaggagattaaacggatcaacaagatcagaagaagacttgtgaaagacagcaacaccaagaaggccggcaagacaggccccatgaaaaccctgctggttagagtgatgacacccgatctgagagagcggctggaaaacctgagaaagaagcctgaaaatatcccccagcccatcagcaatacatctagagccaacctgaataagctgctgaccgattacaccgaaatgaagaaggcgatcctgcatgtgtactgggaagagttccagaaggaccctgtgggcctgatgagccgggtggcccagcctgccagcaagaagatcgatcagaacaagctgaaacctgagatggacgagaagggcaacctgaccaccgccggctttgcctgctctcagtgtggccagcccctgttcgtgtacaagctggagcaggtgtctgagaagggcaaggcttacaccaactacttcggacggtgcaatgtggccgagcacgaaaagctgatcctgctggcccagctgaagcccgagaaggatagcgacgaagccgtgacatatagcctgggaaagtttgggcagagggccctggatttctacagcattcatgtgaccaaggagtccacccaccccgtgaagcccctggcccagatcgccggaaacagatacgcctccggacctgtgggaaaggccctgagcgacgcatgtatgggcacaatcgcctccttcctgtctaagtaccaggacatcatcatcgaacaccagaaggtggtgaagggcaaccagaagagactggagagcctgcgggagctggccggcaaggaaaacctggaataccctagcgtgaccctgccacctcagcctcacaccaaggagggcgttgatgcctacaacgaagtgatcgcccgggtgcgaatgtgggtgaacctgaacctgtggcagaagctgaagctaagcagagatgatgccaagcctctgctgagactgaagggattcccttcctttcctctggtcgagagacaggccaacgaagtggactggtgggacatggtgtgtaacgtgaagaagctgatcaacgagaaaaaggaggatggcaaggtgttttggcagaatctggctggctacaagagacaggaagccctgagaccatacctgagcagcgaggaagatcggaagaagggaaagaaattcgctcggtaccagctgggcgacctgctgctgcacctggaaaagaagcacggcgaggactggggaaaggtgtacgacgaggcctgggagcggattgacaagaaagtggaaggcctgagcaagcacatcaagctggaagaggaacggagaagcgaggacgcccagagcaaggccgccctgaccgactggctgcgggctaaggccagcttcgtgatcgagggcctgaaggaggccgacaaggacgagttctgcagatgcgagctgaagctgcagaagtggtacggggacctgcggggaaagcccttcgccatcgaagccgagaacagcatcctggacatcagcggcttcagcaagcagtacaactgtgccttcatctggcagaaggacggcgtgaagaagctgaacctgtacctgatcatcaactacttcaagggcggcaagctgcggttcaagaagatcaaacctgaagccttcgaagccaacagattctacaccgtgatcaacaaaaagagcggcgagatcgtgcccatggaggtgaacttcaacttcgacgaccccaacctgatcatcctgcctctggcctttggcaagagacagggcagagaattcatctggaacgacctgctgtccctggaaaccggcagcctgaagctggccaacggaagagtgatcgagaagacactgtacaacagaagaacccggcaggatgagcctgccctgttcgtggccctgaccttcgagcggcgggaggtcctggactcctccaatatcaaaccaatgaacctgatcggcgtggcaagaggcgaaaacatccccgccgtgatcgccctgaccgaccccgagggctgcccactgagccggtttaaggatagcctgggaaacccaacccacatcctgagaatcggcgagagctataaggagaagcagcggaccatccaggccaagaaggaggtggagcagcggagagccggcggctacagccggaagtacgccagcaaagccaagaatctggcagacgatatggtgagaaacaccgctagagatctgctgtactacgccgtgacccaggatgccatgctgatcttcgccaacctgagccggggcttcggccggcagggcaagcggaccttcatggccgagagacagtacacacggatggaggactggctgaccgccaagctggcctacgagggcctgagcaagacctacctgtccaagacactggcccagtacacctccaagacatgcagcaactgtgggtttaccatcaccagcgccgactacgacagggtgctggagaagctgaagaagacagcaacaggctggatgaccacaattaacggcaaggagctgaaggtggagggccagattacctactacaacagatacaagagacagaacgtagtcaaggacctgtccgtcgagctggatagactgagcgaagaatctgtgaacaacgacatctcctcctggacaaagggcagaagcggagaagctctgagcctcctgaagaaaagattctcccatagacccgtgcaggagaagttcgtgtgcctgaactgcggcttcgagacacacgcagccgagcaagccgccctgaacatcgccagatcctggctgttcctgcggagccaggagtacaagaaataccagacaaacaagacaaccggcaacaccgataagagagccttcgtcgagacctggcagtccttttaccggaagaagcttaaggaggtgtggaaacctgccgtgcggtctggcggatctggcggaggctccaccagccccaagaaaaagagaaaagtctaagctgccttctgcggggcttgccttctggccatgcccttcttctctcccttgcacctgtacctcttggtctttgaataaagcctgagtaggaaggctagcaaaaaaaaaaaaaaaaaaaaaaaaaaaaaaaaaaaaaaaaaaaaaaaaaaaaaaaaaaaaaaaaaaaaaaaaaaaaaaaa

SEQ ID NO: 12378 - RNA, 5785 nt, synthetic construct
  source 1..5785: mol_type = other RNA
aggaaataagagagaaaagaagagtaagaagaaatataagagccaccatggcccctaagaagaagcgtaaagtgagccggatggaacgcctcgtctacgaggtgcggcagaagtgcagaaacatcgaggacatctgcatctcctgcggatctctgaacgtgaccctggagcacccactgttcatcggcggcatgtgccagaactgtaaaaactgttttctggagtgtgcctatcaatacgacgatgacggctaccagagctactgcaccatctgttgcggcggaagagaggtgctgatgtgtggaaataacaactgctgccggtgcttctgcgtggaatgcgtggacctgctggtgggccccggcgccgcccaggccgctattaaggaagatccttggaactgctacatgtgcggccacaagggcacatacggcctgctgagacggagagaggactggcctagcagactgcagatgttcttcgccaataaccacgaccaggagttcgacccccctaaggtgtaccctcccgtccccgccgagaagagaaagcccatccgggtcctgagcctgttcgatggcatcgccaccggtctgctggtgctgaaggacctgggcatccaggtggataggtacattgcctccgaggtgtgcgaggactccatcaccgtgggaatggtgcgtcatcagggcaagatcatgtacgtgggcgacgtgcggagcgtgacacagaagcatatccaggagtggggccctttcgacctggtgatcggcggcagcccttgcaatgacctgagcatcgtgaacccagcccggaagggcctgtacgagggaaccggcagactgttcttcgagttttacagactgctgcacgacgcccggcctaaggaaggcgacgaccggcccttcttttggctgttcgagaatgtggtggccatgggagtcagcgacaagcgggatattagccggttcctggagagcaaccccgtgatgatcgatgccaaggaagtgagcgccgcccaccgggccagatacttctggggcaatctgcctggcatgaacagacccctggccagcaccgtgaacgacaagctggagctgcaggagtgcctggagcacggccggatcgccaagttcagcaaggtgagaaccatcaccacccgaagcaacagcatcaaacaaggcaaggaccagcactttcctgtgttcatgaacgagaaggaggacatcctgtggtgtaccgagatggagagagtgttcgggttcccagtccactacacagatgtcagcaacatgtctagactggccagacagagactgctgggaagaagctggtccgtccctgtgatcagacacctgttcgcccctctgaaggagtacttcgcctgcgtgagcagcggcaacagcaacgccaacagccggggccccagcttctctagcggcctggtgccactgtccctgagagggagccacatgggccccatggagatctacaaaaccgtgagcgcctggaagcggcagcctgtgcgcgtgctgagcctgtttcggaatatcgataaagtcctgaaaagcctgggattcctggagagcggctctggctccggcggtggcaccctgaagtacgtggaggatgtgacaaacgtggtcagacgggatgtggagaagtggggccccttcgatctggtgtacggcagcacccaacccctgggcagctcttgtgaccggtgccctggctggtacatgtttcagttccaccggatcctgcagtacgccctgccgagacaggagtcccagcggccattcttttggattttcatggacaacttgctgctgaccgaggatgaccaggaaactaccactcggttcctgcagaccgaagccgtgaccctgcaggacgtgagaggccgggactaccagaacgccatgcgggtgtggtccaacatccctggactgaaaagcaagcacgcacctctgacccctaaagaagaggagtacctgcaggcccaggtgcggagcagaagcaagctggacgcccctaaggtggatctgctggtgaagaattgcctcctgcccctgagagagtacttcaagtatttcagccagaatagtctgcccctgggaggcagcggcggcggcatgcccgtgaccttcgaggaggtggccgtgtacttcacccagggccagggcgccctgctggaccccgcccagagggccctgtacagggacgtgatgcaggagaactacgagaccgtgaccagcctgggcttccccatccccaagcccgagctgatcgccaggctggagaggggcgaggagccctgggtgcccgacctgcaggcctgcaaggagaggaggctgcccaggtgcaccaggaccggcggcggcccaagcagcggcgcccctcctcccagcggcggcagcccagccggctccccaacctctaccgaggagggcacctctgagtccgccacccccgagagcggccctggcacctccaccgagcccagcgagggcagcgcacccggcagccctgccggcagccccacctccacagaggagggaaccagcaccgagcccagcgaaggcagcgccccaggcaccagcaccgagcctagtgagcaggagattaaacggatcaacaagatcagaagaagacttgtgaaagacagcaacaccaagaaggccggcaagacaggccccatgaaaaccctgctggttagagtgatgacacccgatctgagagagcggctggaaaacctgagaaagaagcctgaaaatatcccccagcccatcagcaatacatctagagccaacctgaataagctgctgaccgattacaccgaaatgaagaaggcgatcctgcatgtgtactgggaagagttccagaaggaccctgtgggcctgatgagccgggtggcccagcctgccagcaagaagatcgatcagaacaagctgaaacctgagatggacgagaagggcaacctgaccaccgccggctttgcctgctctcagtgtggccagcccctgttcgtgtacaagctggagcaggtgtctgagaagggcaaggcttacaccaactacttcggacggtgcaatgtggccgagcacgaaaagctgatcctgctggcccagctgaagcccgagaaggatagcgacgaagccgtgacatatagcctgggaaagtttgggcagagggccctggatttctacagcattcatgtgaccaaggagtccacccaccccgtgaagcccctggcccagatcgccggaaacagatacgcctccggacctgtgggaaaggccctgagcgacgcatgtatgggcacaatcgcctccttcctgtctaagtaccaggacatcatcatcgaacaccagaaggtggtgaagggcaaccagaagagactggagagcctgcgggagctggccggcaaggaaaacctggaataccctagcgtgaccctgccacctcagcctcacaccaaggagggcgttgatgcctacaacgaagtgatcgcccgggtgcgaatgtgggtgaacctgaacctgtggcagaagctgaagctaagcagagatgatgccaagcctctgctgagactgaagggattcccttcctttcctctggtcgagagacaggccaacgaagtggactggtgggacatggtgtgtaacgtgaagaagctgatcaacgagaaaaaggaggatggcaaggtgttttggcagaatctggctggctacaagagacaggaagccctgagaccatacctgagcagcgaggaagatcggaagaagggaaagaaattcgctcggtaccagctgggcgacctgctgctgcacctggaaaagaagcacggcgaggactggggaaaggtgtacgacgaggcctgggagcggattgacaagaaagtggaaggcctgagcaagcacatcaagctggaagaggaacggagaagcgaggacgcccagagcaaggccgccctgaccgactggctgcgggctaaggccagcttcgtgatcgagggcctgaaggaggccgacaaggacgagttctgcagatgcgagctgaagctgcagaagtggtacggggacctgcggggaaagcccttcgccatcgaagccgagaacagcatcctggacatcagcggcttcagcaagcagtacaactgtgccttcatctggcagaaggacggcgtgaagaagctgaacctgtacctgatcatcaactacttcaagggcggcaagctgcggttcaagaagatcaaacctgaagccttcgaagccaacagattctacaccgtgatcaacaaaaagagcggcgagatcgtgcccatggaggtgaacttcaacttcgacgaccccaacctgatcatcctgcctctggcctttggcaagagacagggcagagaattcatctggaacgacctgctgtccctggaaaccggcagcctgaagctggccaacggaagagtgatcgagaagacactgtacaacagaagaacccggcaggatgagcctgccctgttcgtggccctgaccttcgagcggcgggaggtcctggactcctccaatatcaaaccaatgaacctgatcggcgtggcaagaggcgaaaacatccccgccgtgatcgccctgaccgaccccgagggctgcccactgagccggtttaaggatagcctgggaaacccaacccacatcctgagaatcggcgagagctataaggagaagcagcggaccatccaggccaagaaggaggtggagcagcggagagccggcggctacagccggaagtacgccagcaaagccaagaatctggcagacgatatggtgagaaacaccgctagagatctgctgtactacgccgtgacccaggatgccatgctgatcttcgccaacctgagccggggcttcggccggcagggcaagcggaccttcatggccgagagacagtacacacggatggaggactggctgaccgccaagctggcctacgagggcctgagcaagacctacctgtccaagacactggcccagtacacctccaagacatgcagcaactgtgggtttaccatcaccagcgccgactacgacagggtgctggagaagctgaagaagacagcaacaggctggatgaccacaattaacggcaaggagctgaaggtggagggccagattacctactacaacagatacaagagacagaacgtagtcaaggacctgtccgtcgagctggatagactgagcgaagaatctgtgaacaacgacatctcctcctggacaaagggcagaagcggagaagctctgagcctcctgaagaaaagattctcccatagacccgtgcaggagaagttcgtgtgcctgaactgcggcttcgagacacacgcagccgagcaagccgccctgaacatcgccagatcctggctgttcctgcggagccaggagtacaagaaataccagacaaacaagacaaccggcaacaccgataagagagccttcgtcgagacctggcagtccttttaccggaagaagcttaaggaggtgtggaaacctgccgtgcggtctggcggatctggcggaggctccaccagccccaagaaaaagagaaaagtctaagctgccttctgcggggcttgccttctggccatgcccttcttctctcccttgcacctgtacctcttggtctttgaataaagcctgagtaggaaggctagcaaaaaaaaaaaaaaaaaaaaaaaaaaaaaaaaaaaaaaaaaaaaaaaaaaaaaaaaaaaaaaaaaaaaaaaaaaaaaaaa

SEQ ID NO: 12379 - RNA, 5785 nt, synthetic construct
  source 1..5785: mol_type = other RNA
aggaaataagagagaaaagaagagtaagaagaaatataagagccaccatggcccctaagaagaagcgtaaagtgagccggatggaacgcctcgtctacgaggtgcggcagaagtgcagaaacatcgaggacatctgcatctcctgcggatctctgaacgtgaccctggagcacccactgttcatcggcggcatgtgccagaactgtaaaaactgttttctggagtgtgcctatcaatacgacgatgacggctaccagagctactgcaccatctgttgcggcggaagagaggtgctgatgtgtggaaataacaactgctgccggtgcttctgcgtggaatgcgtggacctgctggtgggccccggcgccgcccaggccgctattaaggaagatccttggaactgctacatgtgcggccacaagggcacatacggcctgctgagacggagagaggactggcctagcagactgcagatgttcttcgccaataaccacgaccaggagttcgacccccctaaggtgtaccctcccgtccccgccgagaagagaaagcccatccgggtcctgagcctgttcgatggcatcgccaccggtctgctggtgctgaaggacctgggcatccaggtggataggtacattgcctccgaggtgtgcgaggactccatcaccgtgggaatggtgcgtcatcagggcaagatcatgtacgtgggcgacgtgcggagcgtgacacagaagcatatccaggagtggggccctttcgacctggtgatcggcggcagcccttgcaatgacctgagcatcgtgaacccagcccggaagggcctgtacgagggaaccggcagactgttcttcgagttttacagactgctgcacgacgcccggcctaaggaaggcgacgaccggcccttcttttggctgttcgagaatgtggtggccatgggagtcagcgacaagcgggatattagccggttcctggagagcaaccccgtgatgatcgatgccaaggaagtgagcgccgcccaccgggccagatacttctggggcaatctgcctggcatgaacagacccctggccagcaccgtgaacgacaagctggagctgcaggagtgcctggagcacggccggatcgccaagttcagcaaggtgagaaccatcaccacccgaagcaacagcatcaaacaaggcaaggaccagcactttcctgtgttcatgaacgagaaggaggacatcctgtggtgtaccgagatggagagagtgttcgggttcccagtccactacacagatgtcagcaacatgtctagactggccagacagagactgctgggaagaagctggtccgtccctgtgatcagacacctgttcgcccctctgaaggagtacttcgcctgcgtgagcagcggcaacagcaacgccaacagccggggccccagcttctctagcggcctggtgccactgtccctgagagggagccacatgggccccatggagatctacaaaaccgtgagcgcctggaagcggcagcctgtgcgcgtgctgagcctgtttcggaatatcgataaagtcctgaaaagcctgggattcctggagagcggctctggctccggcggtggcaccctgaagtacgtggaggatgtgacaaacgtggtcagacgggatgtggagaagtggggccccttcgatctggtgtacggcagcacccaacccctgggcagctcttgtgaccggtgccctggctggtacatgtttcagttccaccggatcctgcagtacgccctgccgagacaggagtcccagcggccattcttttggattttcatggacaacttgctgctgaccgaggatgaccaggaaactaccactcggttcctgcagaccgaagccgtgaccctgcaggacgtgagaggccgggactaccagaacgccatgcgggtgtggtccaacatccctggactgaaaagcaagcacgcacctctgacccctaaagaagaggagtacctgcaggcccaggtgcggagcagaagcaagctggacgcccctaaggtggatctgctggtgaagaattgcctcctgcccctgagagagtacttcaagtatttcagccagaatagtctgcccctgggaggcagcggcggcggcagccagagcctggtgaccttcggcgacgtggccgtgaacttcagccaggaggagtgggagtggctgaacagcgcccagaggaacctgtacaggagcgtgatgctggagaactacaggaacctggtgagcctgggcctgtgcgtgagcaagcccgacatgatcagcagcctggagcagaggaaggagccctggatggtgaagaggaagctgaccaggggcaggtgccccgacctgaaggccgtgggcggcccaagcagcggcgcccctcctcccagcggcggcagcccagccggctccccaacctctaccgaggagggcacctctgagtccgccacccccgagagcggccctggcacctccaccgagcccagcgagggcagcgcacccggcagccctgccggcagccccacctccacagaggagggaaccagcaccgagcccagcgaaggcagcgccccaggcaccagcaccgagcctagtgagcaggagattaaacggatcaacaagatcagaagaagacttgtgaaagacagcaacaccaagaaggccggcaagacaggccccatgaaaaccctgctggttagagtgatgacacccgatctgagagagcggctggaaaacctgagaaagaagcctgaaaatatcccccagcccatcagcaatacatctagagccaacctgaataagctgctgaccgattacaccgaaatgaagaaggcgatcctgcatgtgtactgggaagagttccagaaggaccctgtgggcctgatgagccgggtggcccagcctgccagcaagaagatcgatcagaacaagctgaaacctgagatggacgagaagggcaacctgaccaccgccggctttgcctgctctcagtgtggccagcccctgttcgtgtacaagctggagcaggtgtctgagaagggcaaggcttacaccaactacttcggacggtgcaatgtggccgagcacgaaaagctgatcctgctggcccagctgaagcccgagaaggatagcgacgaagccgtgacatatagcctgggaaagtttgggcagagggccctggatttctacagcattcatgtgaccaaggagtccacccaccccgtgaagcccctggcccagatcgccggaaacagatacgcctccggacctgtgggaaaggccctgagcgacgcatgtatgggcacaatcgcctccttcctgtctaagtaccaggacatcatcatcgaacaccagaaggtggtgaagggcaaccagaagagactggagagcctgcgggagctggccggcaaggaaaacctggaataccctagcgtgaccctgccacctcagcctcacaccaaggagggcgttgatgcctacaacgaagtgatcgcccgggtgcgaatgtgggtgaacctgaacctgtggcagaagctgaagctaagcagagatgatgccaagcctctgctgagactgaagggattcccttcctttcctctggtcgagagacaggccaacgaagtggactggtgggacatggtgtgtaacgtgaagaagctgatcaacgagaaaaaggaggatggcaaggtgttttggcagaatctggctggctacaagagacaggaagccctgagaccatacctgagcagcgaggaagatcggaagaagggaaagaaattcgctcggtaccagctgggcgacctgctgctgcacctggaaaagaagcacggcgaggactggggaaaggtgtacgacgaggcctgggagcggattgacaagaaagtggaaggcctgagcaagcacatcaagctggaagaggaacggagaagcgaggacgcccagagcaaggccgccctgaccgactggctgcgggctaaggccagcttcgtgatcgagggcctgaaggaggccgacaaggacgagttctgcagatgcgagctgaagctgcagaagtggtacggggacctgcggggaaagcccttcgccatcgaagccgagaacagcatcctggacatcagcggcttcagcaagcagtacaactgtgccttcatctggcagaaggacggcgtgaagaagctgaacctgtacctgatcatcaactacttcaagggcggcaagctgcggttcaagaagatcaaacctgaagccttcgaagccaacagattctacaccgtgatcaacaaaaagagcggcgagatcgtgcccatggaggtgaacttcaacttcgacgaccccaacctgatcatcctgcctctggcctttggcaagagacagggcagagaattcatctggaacgacctgctgtccctggaaaccggcagcctgaagctggccaacggaagagtgatcgagaagacactgtacaacagaagaacccggcaggatgagcctgccctgttcgtggccctgaccttcgagcggcgggaggtcctggactcctccaatatcaaaccaatgaacctgatcggcgtggcaagaggcgaaaacatccccgccgtgatcgccctgaccgaccccgagggctgcccactgagccggtttaaggatagcctgggaaacccaacccacatcctgagaatcggcgagagctataaggagaagcagcggaccatccaggccaagaaggaggtggagcagcggagagccggcggctacagccggaagtacgccagcaaagccaagaatctggcagacgatatggtgagaaacaccgctagagatctgctgtactacgccgtgacccaggatgccatgctgatcttcgccaacctgagccggggcttcggccggcagggcaagcggaccttcatggccgagagacagtacacacggatggaggactggctgaccgccaagctggcctacgagggcctgagcaagacctacctgtccaagacactggcccagtacacctccaagacatgcagcaactgtgggtttaccatcaccagcgccgactacgacagggtgctggagaagctgaagaagacagcaacaggctggatgaccacaattaacggcaaggagctgaaggtggagggccagattacctactacaacagatacaagagacagaacgtagtcaaggacctgtccgtcgagctggatagactgagcgaagaatctgtgaacaacgacatctcctcctggacaaagggcagaagcggagaagctctgagcctcctgaagaaaagattctcccatagacccgtgcaggagaagttcgtgtgcctgaactgcggcttcgagacacacgcagccgagcaagccgccctgaacatcgccagatcctggctgttcctgcggagccaggagtacaagaaataccagacaaacaagacaaccggcaacaccgataagagagccttcgtcgagacctggcagtccttttaccggaagaagcttaaggaggtgtggaaacctgccgtgcggtctggcggatctggcggaggctccaccagccccaagaaaaagagaaaagtctaagctgccttctgcggggcttgccttctggccatgcccttcttctctcccttgcacctgtacctcttggtctttgaataaagcctgagtaggaaggctagcaaaaaaaaaaaaaaaaaaaaaaaaaaaaaaaaaaaaaaaaaaaaaaaaaaaaaaaaaaaaaaaaaaaaaaaaaaaaaaaa

SEQ ID NO: 12380 - RNA, 5785 nt, synthetic construct
  source 1..5785: mol_type = other RNA
aggaaataagagagaaaagaagagtaagaagaaatataagagccaccatggcccctaagaagaagcgtaaagtgagccggatggaacgcctcgtctacgaggtgcggcagaagtgcagaaacatcgaggacatctgcatctcctgcggatctctgaacgtgaccctggagcacccactgttcatcggcggcatgtgccagaactgtaaaaactgttttctggagtgtgcctatcaatacgacgatgacggctaccagagctactgcaccatctgttgcggcggaagagaggtgctgatgtgtggaaataacaactgctgccggtgcttctgcgtggaatgcgtggacctgctggtgggccccggcgccgcccaggccgctattaaggaagatccttggaactgctacatgtgcggccacaagggcacatacggcctgctgagacggagagaggactggcctagcagactgcagatgttcttcgccaataaccacgaccaggagttcgacccccctaaggtgtaccctcccgtccccgccgagaagagaaagcccatccgggtcctgagcctgttcgatggcatcgccaccggtctgctggtgctgaaggacctgggcatccaggtggataggtacattgcctccgaggtgtgcgaggactccatcaccgtgggaatggtgcgtcatcagggcaagatcatgtacgtgggcgacgtgcggagcgtgacacagaagcatatccaggagtggggccctttcgacctggtgatcggcggcagcccttgcaatgacctgagcatcgtgaacccagcccggaagggcctgtacgagggaaccggcagactgttcttcgagttttacagactgctgcacgacgcccggcctaaggaaggcgacgaccggcccttcttttggctgttcgagaatgtggtggccatgggagtcagcgacaagcgggatattagccggttcctggagagcaaccccgtgatgatcgatgccaaggaagtgagcgccgcccaccgggccagatacttctggggcaatctgcctggcatgaacagacccctggccagcaccgtgaacgacaagctggagctgcaggagtgcctggagcacggccggatcgccaagttcagcaaggtgagaaccatcaccacccgaagcaacagcatcaaacaaggcaaggaccagcactttcctgtgttcatgaacgagaaggaggacatcctgtggtgtaccgagatggagagagtgttcgggttcccagtccactacacagatgtcagcaacatgtctagactggccagacagagactgctgggaagaagctggtccgtccctgtgatcagacacctgttcgcccctctgaaggagtacttcgcctgcgtgagcagcggcaacagcaacgccaacagccggggccccagcttctctagcggcctggtgccactgtccctgagagggagccacatgggccccatggagatctacaaaaccgtgagcgcctggaagcggcagcctgtgcgcgtgctgagcctgtttcggaatatcgataaagtcctgaaaagcctgggattcctggagagcggctctggctccggcggtggcaccctgaagtacgtggaggatgtgacaaacgtggtcagacgggatgtggagaagtggggccccttcgatctggtgtacggcagcacccaacccctgggcagctcttgtgaccggtgccctggctggtacatgtttcagttccaccggatcctgcagtacgccctgccgagacaggagtcccagcggccattcttttggattttcatggacaacttgctgctgaccgaggatgaccaggaaactaccactcggttcctgcagaccgaagccgtgaccctgcaggacgtgagaggccgggactaccagaacgccatgcgggtgtggtccaacatccctggactgaaaagcaagcacgcacctctgacccctaaagaagaggagtacctgcaggcccaggtgcggagcagaagcaagctggacgcccctaaggtggatctgctggtgaagaattgcctcctgcccctgagagagtacttcaagtatttcagccagaatagtctgcccctgggaggcagcggcggcggcgaggagctgcccgtggtgttcgaggacgtggccgtgtacttcaccagggaggagtggggcatgctggtgaagaggcagaaggagctgtacagggacgtgatgaggatgaactacgagctgctggccgccctgggccccgccgccgccaagcccgacctgatcagcaagctggagaggagggccgccccctggatcaaggaccccaacaggcccaagtggggcaagggcaggcccctgggcaagggcggcccaagcagcggcgcccctcctcccagcggcggcagcccagccggctccccaacctctaccgaggagggcacctctgagtccgccacccccgagagcggccctggcacctccaccgagcccagcgagggcagcgcacccggcagccctgccggcagccccacctccacagaggagggaaccagcaccgagcccagcgaaggcagcgccccaggcaccagcaccgagcctagtgagcaggagattaaacggatcaacaagatcagaagaagacttgtgaaagacagcaacaccaagaaggccggcaagacaggccccatgaaaaccctgctggttagagtgatgacacccgatctgagagagcggctggaaaacctgagaaagaagcctgaaaatatcccccagcccatcagcaatacatctagagccaacctgaataagctgctgaccgattacaccgaaatgaagaaggcgatcctgcatgtgtactgggaagagttccagaaggaccctgtgggcctgatgagccgggtggcccagcctgccagcaagaagatcgatcagaacaagctgaaacctgagatggacgagaagggcaacctgaccaccgccggctttgcctgctctcagtgtggccagcccctgttcgtgtacaagctggagcaggtgtctgagaagggcaaggcttacaccaactacttcggacggtgcaatgtggccgagcacgaaaagctgatcctgctggcccagctgaagcccgagaaggatagcgacgaagccgtgacatatagcctgggaaagtttgggcagagggccctggatttctacagcattcatgtgaccaaggagtccacccaccccgtgaagcccctggcccagatcgccggaaacagatacgcctccggacctgtgggaaaggccctgagcgacgcatgtatgggcacaatcgcctccttcctgtctaagtaccaggacatcatcatcgaacaccagaaggtggtgaagggcaaccagaagagactggagagcctgcgggagctggccggcaaggaaaacctggaataccctagcgtgaccctgccacctcagcctcacaccaaggagggcgttgatgcctacaacgaagtgatcgcccgggtgcgaatgtgggtgaacctgaacctgtggcagaagctgaagctaagcagagatgatgccaagcctctgctgagactgaagggattcccttcctttcctctggtcgagagacaggccaacgaagtggactggtgggacatggtgtgtaacgtgaagaagctgatcaacgagaaaaaggaggatggcaaggtgttttggcagaatctggctggctacaagagacaggaagccctgagaccatacctgagcagcgaggaagatcggaagaagggaaagaaattcgctcggtaccagctgggcgacctgctgctgcacctggaaaagaagcacggcgaggactggggaaaggtgtacgacgaggcctgggagcggattgacaagaaagtggaaggcctgagcaagcacatcaagctggaagaggaacggagaagcgaggacgcccagagcaaggccgccctgaccgactggctgcgggctaaggccagcttcgtgatcgagggcctgaaggaggccgacaaggacgagttctgcagatgcgagctgaagctgcagaagtggtacggggacctgcggggaaagcccttcgccatcgaagccgagaacagcatcctggacatcagcggcttcagcaagcagtacaactgtgccttcatctggcagaaggacggcgtgaagaagctgaacctgtacctgatcatcaactacttcaagggcggcaagctgcggttcaagaagatcaaacctgaagccttcgaagccaacagattctacaccgtgatcaacaaaaagagcggcgagatcgtgcccatggaggtgaacttcaacttcgacgaccccaacctgatcatcctgcctctggcctttggcaagagacagggcagagaattcatctggaacgacctgctgtccctggaaaccggcagcctgaagctggccaacggaagagtgatcgagaagacactgtacaacagaagaacccggcaggatgagcctgccctgttcgtggccctgaccttcgagcggcgggaggtcctggactcctccaatatcaaaccaatgaacctgatcggcgtggcaagaggcgaaaacatccccgccgtgatcgccctgaccgaccccgagggctgcccactgagccggtttaaggatagcctgggaaacccaacccacatcctgagaatcggcgagagctataaggagaagcagcggaccatccaggccaagaaggaggtggagcagcggagagccggcggctacagccggaagtacgccagcaaagccaagaatctggcagacgatatggtgagaaacaccgctagagatctgctgtactacgccgtgacccaggatgccatgctgatcttcgccaacctgagccggggcttcggccggcagggcaagcggaccttcatggccgagagacagtacacacggatggaggactggctgaccgccaagctggcctacgagggcctgagcaagacctacctgtccaagacactggcccagtacacctccaagacatgcagcaactgtgggtttaccatcaccagcgccgactacgacagggtgctggagaagctgaagaagacagcaacaggctggatgaccacaattaacggcaaggagctgaaggtggagggccagattacctactacaacagatacaagagacagaacgtagtcaaggacctgtccgtcgagctggatagactgagcgaagaatctgtgaacaacgacatctcctcctggacaaagggcagaagcggagaagctctgagcctcctgaagaaaagattctcccatagacccgtgcaggagaagttcgtgtgcctgaactgcggcttcgagacacacgcagccgagcaagccgccctgaacatcgccagatcctggctgttcctgcggagccaggagtacaagaaataccagacaaacaagacaaccggcaacaccgataagagagccttcgtcgagacctggcagtccttttaccggaagaagcttaaggaggtgtggaaacctgccgtgcggtctggcggatctggcggaggctccaccagccccaagaaaaagagaaaagtctaagctgccttctgcggggcttgccttctggccatgcccttcttctctcccttgcacctgtacctcttggtctttgaataaagcctgagtaggaaggctagcaaaaaaaaaaaaaaaaaaaaaaaaaaaaaaaaaaaaaaaaaaaaaaaaaaaaaaaaaaaaaaaaaaaaaaaaaaaaaaaa

SEQ ID NO: 12381 - RNA, 5785 nt, synthetic construct
  source 1..5785: mol_type = other RNA
aggaaataagagagaaaagaagagtaagaagaaatataagagccaccatggcccctaagaagaagcgtaaagtgagccggatggaacgcctcgtctacgaggtgcggcagaagtgcagaaacatcgaggacatctgcatctcctgcggatctctgaacgtgaccctggagcacccactgttcatcggcggcatgtgccagaactgtaaaaactgttttctggagtgtgcctatcaatacgacgatgacggctaccagagctactgcaccatctgttgcggcggaagagaggtgctgatgtgtggaaataacaactgctgccggtgcttctgcgtggaatgcgtggacctgctggtgggccccggcgccgcccaggccgctattaaggaagatccttggaactgctacatgtgcggccacaagggcacatacggcctgctgagacggagagaggactggcctagcagactgcagatgttcttcgccaataaccacgaccaggagttcgacccccctaaggtgtaccctcccgtccccgccgagaagagaaagcccatccgggtcctgagcctgttcgatggcatcgccaccggtctgctggtgctgaaggacctgggcatccaggtggataggtacattgcctccgaggtgtgcgaggactccatcaccgtgggaatggtgcgtcatcagggcaagatcatgtacgtgggcgacgtgcggagcgtgacacagaagcatatccaggagtggggccctttcgacctggtgatcggcggcagcccttgcaatgacctgagcatcgtgaacccagcccggaagggcctgtacgagggaaccggcagactgttcttcgagttttacagactgctgcacgacgcccggcctaaggaaggcgacgaccggcccttcttttggctgttcgagaatgtggtggccatgggagtcagcgacaagcgggatattagccggttcctggagagcaaccccgtgatgatcgatgccaaggaagtgagcgccgcccaccgggccagatacttctggggcaatctgcctggcatgaacagacccctggccagcaccgtgaacgacaagctggagctgcaggagtgcctggagcacggccggatcgccaagttcagcaaggtgagaaccatcaccacccgaagcaacagcatcaaacaaggcaaggaccagcactttcctgtgttcatgaacgagaaggaggacatcctgtggtgtaccgagatggagagagtgttcgggttcccagtccactacacagatgtcagcaacatgtctagactggccagacagagactgctgggaagaagctggtccgtccctgtgatcagacacctgttcgcccctctgaaggagtacttcgcctgcgtgagcagcggcaacagcaacgccaacagccggggccccagcttctctagcggcctggtgccactgtccctgagagggagccacatgggccccatggagatctacaaaaccgtgagcgcctggaagcggcagcctgtgcgcgtgctgagcctgtttcggaatatcgataaagtcctgaaaagcctgggattcctggagagcggctctggctccggcggtggcaccctgaagtacgtggaggatgtgacaaacgtggtcagacgggatgtggagaagtggggccccttcgatctggtgtacggcagcacccaacccctgggcagctcttgtgaccggtgccctggctggtacatgtttcagttccaccggatcctgcagtacgccctgccgagacaggagtcccagcggccattcttttggattttcatggacaacttgctgctgaccgaggatgaccaggaaactaccactcggttcctgcagaccgaagccgtgaccctgcaggacgtgagaggccgggactaccagaacgccatgcgggtgtggtccaacatccctggactgaaaagcaagcacgcacctctgacccctaaagaagaggagtacctgcaggcccaggtgcggagcagaagcaagctggacgcccctaaggtggatctgctggtgaagaattgcctcctgcccctgagagagtacttcaagtatttcagccagaatagtctgcccctgggaggcagcggcggcggcccccagaagagcgtgaccttcgaggacgtggccgtgtacttcacccagaccgagtgggacggcctgagccccgcccagagggccctgtacagggacgtgatgctggagaactacggcaacgtggccagcctgggcttcagcctgctgaagcccgccgtgatcagccagctggagggcgccggcgagctgggcaggcccagccccctggtggccggcaccgagatcggcctgcagggcctgtggggcggcccaagcagcggcgcccctcctcccagcggcggcagcccagccggctccccaacctctaccgaggagggcacctctgagtccgccacccccgagagcggccctggcacctccaccgagcccagcgagggcagcgcacccggcagccctgccggcagccccacctccacagaggagggaaccagcaccgagcccagcgaaggcagcgccccaggcaccagcaccgagcctagtgagcaggagattaaacggatcaacaagatcagaagaagacttgtgaaagacagcaacaccaagaaggccggcaagacaggccccatgaaaaccctgctggttagagtgatgacacccgatctgagagagcggctggaaaacctgagaaagaagcctgaaaatatcccccagcccatcagcaatacatctagagccaacctgaataagctgctgaccgattacaccgaaatgaagaaggcgatcctgcatgtgtactgggaagagttccagaaggaccctgtgggcctgatgagccgggtggcccagcctgccagcaagaagatcgatcagaacaagctgaaacctgagatggacgagaagggcaacctgaccaccgccggctttgcctgctctcagtgtggccagcccctgttcgtgtacaagctggagcaggtgtctgagaagggcaaggcttacaccaactacttcggacggtgcaatgtggccgagcacgaaaagctgatcctgctggcccagctgaagcccgagaaggatagcgacgaagccgtgacatatagcctgggaaagtttgggcagagggccctggatttctacagcattcatgtgaccaaggagtccacccaccccgtgaagcccctggcccagatcgccggaaacagatacgcctccggacctgtgggaaaggccctgagcgacgcatgtatgggcacaatcgcctccttcctgtctaagtaccaggacatcatcatcgaacaccagaaggtggtgaagggcaaccagaagagactggagagcctgcgggagctggccggcaaggaaaacctggaataccctagcgtgaccctgccacctcagcctcacaccaaggagggcgttgatgcctacaacgaagtgatcgcccgggtgcgaatgtgggtgaacctgaacctgtggcagaagctgaagctaagcagagatgatgccaagcctctgctgagactgaagggattcccttcctttcctctggtcgagagacaggccaacgaagtggactggtgggacatggtgtgtaacgtgaagaagctgatcaacgagaaaaaggaggatggcaaggtgttttggcagaatctggctggctacaagagacaggaagccctgagaccatacctgagcagcgaggaagatcggaagaagggaaagaaattcgctcggtaccagctgggcgacctgctgctgcacctggaaaagaagcacggcgaggactggggaaaggtgtacgacgaggcctgggagcggattgacaagaaagtggaaggcctgagcaagcacatcaagctggaagaggaacggagaagcgaggacgcccagagcaaggccgccctgaccgactggctgcgggctaaggccagcttcgtgatcgagggcctgaaggaggccgacaaggacgagttctgcagatgcgagctgaagctgcagaagtggtacggggacctgcggggaaagcccttcgccatcgaagccgagaacagcatcctggacatcagcggcttcagcaagcagtacaactgtgccttcatctggcagaaggacggcgtgaagaagctgaacctgtacctgatcatcaactacttcaagggcggcaagctgcggttcaagaagatcaaacctgaagccttcgaagccaacagattctacaccgtgatcaacaaaaagagcggcgagatcgtgcccatggaggtgaacttcaacttcgacgaccccaacctgatcatcctgcctctggcctttggcaagagacagggcagagaattcatctggaacgacctgctgtccctggaaaccggcagcctgaagctggccaacggaagagtgatcgagaagacactgtacaacagaagaacccggcaggatgagcctgccctgttcgtggccctgaccttcgagcggcgggaggtcctggactcctccaatatcaaaccaatgaacctgatcggcgtggcaagaggcgaaaacatccccgccgtgatcgccctgaccgaccccgagggctgcccactgagccggtttaaggatagcctgggaaacccaacccacatcctgagaatcggcgagagctataaggagaagcagcggaccatccaggccaagaaggaggtggagcagcggagagccggcggctacagccggaagtacgccagcaaagccaagaatctggcagacgatatggtgagaaacaccgctagagatctgctgtactacgccgtgacccaggatgccatgctgatcttcgccaacctgagccggggcttcggccggcagggcaagcggaccttcatggccgagagacagtacacacggatggaggactggctgaccgccaagctggcctacgagggcctgagcaagacctacctgtccaagacactggcccagtacacctccaagacatgcagcaactgtgggtttaccatcaccagcgccgactacgacagggtgctggagaagctgaagaagacagcaacaggctggatgaccacaattaacggcaaggagctgaaggtggagggccagattacctactacaacagatacaagagacagaacgtagtcaaggacctgtccgtcgagctggatagactgagcgaagaatctgtgaacaacgacatctcctcctggacaaagggcagaagcggagaagctctgagcctcctgaagaaaagattctcccatagacccgtgcaggagaagttcgtgtgcctgaactgcggcttcgagacacacgcagccgagcaagccgccctgaacatcgccagatcctggctgttcctgcggagccaggagtacaagaaataccagacaaacaagacaaccggcaacaccgataagagagccttcgtcgagacctggcagtccttttaccggaagaagcttaaggaggtgtggaaacctgccgtgcggtctggcggatctggcggaggctccaccagccccaagaaaaagagaaaagtctaagctgccttctgcggggcttgccttctggccatgcccttcttctctcccttgcacctgtacctcttggtctttgaataaagcctgagtaggaaggctagcaaaaaaaaaaaaaaaaaaaaaaaaaaaaaaaaaaaaaaaaaaaaaaaaaaaaaaaaaaaaaaaaaaaaaaaaaaaaaaaa

SEQ ID NO: 12382 - RNA, 5785 nt, synthetic construct
  source 1..5785: mol_type = other RNA
aggaaataagagagaaaagaagagtaagaagaaatataagagccaccatggcccctaagaagaagcgtaaagtgagccggatggaacgcctcgtctacgaggtgcggcagaagtgcagaaacatcgaggacatctgcatctcctgcggatctctgaacgtgaccctggagcacccactgttcatcggcggcatgtgccagaactgtaaaaactgttttctggagtgtgcctatcaatacgacgatgacggctaccagagctactgcaccatctgttgcggcggaagagaggtgctgatgtgtggaaataacaactgctgccggtgcttctgcgtggaatgcgtggacctgctggtgggccccggcgccgcccaggccgctattaaggaagatccttggaactgctacatgtgcggccacaagggcacatacggcctgctgagacggagagaggactggcctagcagactgcagatgttcttcgccaataaccacgaccaggagttcgacccccctaaggtgtaccctcccgtccccgccgagaagagaaagcccatccgggtcctgagcctgttcgatggcatcgccaccggtctgctggtgctgaaggacctgggcatccaggtggataggtacattgcctccgaggtgtgcgaggactccatcaccgtgggaatggtgcgtcatcagggcaagatcatgtacgtgggcgacgtgcggagcgtgacacagaagcatatccaggagtggggccctttcgacctggtgatcggcggcagcccttgcaatgacctgagcatcgtgaacccagcccggaagggcctgtacgagggaaccggcagactgttcttcgagttttacagactgctgcacgacgcccggcctaaggaaggcgacgaccggcccttcttttggctgttcgagaatgtggtggccatgggagtcagcgacaagcgggatattagccggttcctggagagcaaccccgtgatgatcgatgccaaggaagtgagcgccgcccaccgggccagatacttctggggcaatctgcctggcatgaacagacccctggccagcaccgtgaacgacaagctggagctgcaggagtgcctggagcacggccggatcgccaagttcagcaaggtgagaaccatcaccacccgaagcaacagcatcaaacaaggcaaggaccagcactttcctgtgttcatgaacgagaaggaggacatcctgtggtgtaccgagatggagagagtgttcgggttcccagtccactacacagatgtcagcaacatgtctagactggccagacagagactgctgggaagaagctggtccgtccctgtgatcagacacctgttcgcccctctgaaggagtacttcgcctgcgtgagcagcggcaacagcaacgccaacagccggggccccagcttctctagcggcctggtgccactgtccctgagagggagccacatgggccccatggagatctacaaaaccgtgagcgcctggaagcggcagcctgtgcgcgtgctgagcctgtttcggaatatcgataaagtcctgaaaagcctgggattcctggagagcggctctggctccggcggtggcaccctgaagtacgtggaggatgtgacaaacgtggtcagacgggatgtggagaagtggggccccttcgatctggtgtacggcagcacccaacccctgggcagctcttgtgaccggtgccctggctggtacatgtttcagttccaccggatcctgcagtacgccctgccgagacaggagtcccagcggccattcttttggattttcatggacaacttgctgctgaccgaggatgaccaggaaactaccactcggttcctgcagaccgaagccgtgaccctgcaggacgtgagaggccgggactaccagaacgccatgcgggtgtggtccaacatccctggactgaaaagcaagcacgcacctctgacccctaaagaagaggagtacctgcaggcccaggtgcggagcagaagcaagctggacgcccctaaggtggatctgctggtgaagaattgcctcctgcccctgagagagtacttcaagtatttcagccagaatagtctgcccctgggaggcagcggcggcggcgcccaggaggtggtgagcttcaaggacgtggccgtggacttcaccagggaggagtggaggctgctgagccccccccagaaggagctgtacaaggaggtgatgctggagaacgccaggaacctgctgagcgtgggcctgcccgcccccagcgaggaggtgatcagctacctggagcagagggaggccccctggatcctggagcaggagggcctgaggaactgctgcagcgagggcgagatcaggggcggcccaagcagcggcgcccctcctcccagcggcggcagcccagccggctccccaacctctaccgaggagggcacctctgagtccgccacccccgagagcggccctggcacctccaccgagcccagcgagggcagcgcacccggcagccctgccggcagccccacctccacagaggagggaaccagcaccgagcccagcgaaggcagcgccccaggcaccagcaccgagcctagtgagcaggagattaaacggatcaacaagatcagaagaagacttgtgaaagacagcaacaccaagaaggccggcaagacaggccccatgaaaaccctgctggttagagtgatgacacccgatctgagagagcggctggaaaacctgagaaagaagcctgaaaatatcccccagcccatcagcaatacatctagagccaacctgaataagctgctgaccgattacaccgaaatgaagaaggcgatcctgcatgtgtactgggaagagttccagaaggaccctgtgggcctgatgagccgggtggcccagcctgccagcaagaagatcgatcagaacaagctgaaacctgagatggacgagaagggcaacctgaccaccgccggctttgcctgctctcagtgtggccagcccctgttcgtgtacaagctggagcaggtgtctgagaagggcaaggcttacaccaactacttcggacggtgcaatgtggccgagcacgaaaagctgatcctgctggcccagctgaagcccgagaaggatagcgacgaagccgtgacatatagcctgggaaagtttgggcagagggccctggatttctacagcattcatgtgaccaaggagtccacccaccccgtgaagcccctggcccagatcgccggaaacagatacgcctccggacctgtgggaaaggccctgagcgacgcatgtatgggcacaatcgcctccttcctgtctaagtaccaggacatcatcatcgaacaccagaaggtggtgaagggcaaccagaagagactggagagcctgcgggagctggccggcaaggaaaacctggaataccctagcgtgaccctgccacctcagcctcacaccaaggagggcgttgatgcctacaacgaagtgatcgcccgggtgcgaatgtgggtgaacctgaacctgtggcagaagctgaagctaagcagagatgatgccaagcctctgctgagactgaagggattcccttcctttcctctggtcgagagacaggccaacgaagtggactggtgggacatggtgtgtaacgtgaagaagctgatcaacgagaaaaaggaggatggcaaggtgttttggcagaatctggctggctacaagagacaggaagccctgagaccatacctgagcagcgaggaagatcggaagaagggaaagaaattcgctcggtaccagctgggcgacctgctgctgcacctggaaaagaagcacggcgaggactggggaaaggtgtacgacgaggcctgggagcggattgacaagaaagtggaaggcctgagcaagcacatcaagctggaagaggaacggagaagcgaggacgcccagagcaaggccgccctgaccgactggctgcgggctaaggccagcttcgtgatcgagggcctgaaggaggccgacaaggacgagttctgcagatgcgagctgaagctgcagaagtggtacggggacctgcggggaaagcccttcgccatcgaagccgagaacagcatcctggacatcagcggcttcagcaagcagtacaactgtgccttcatctggcagaaggacggcgtgaagaagctgaacctgtacctgatcatcaactacttcaagggcggcaagctgcggttcaagaagatcaaacctgaagccttcgaagccaacagattctacaccgtgatcaacaaaaagagcggcgagatcgtgcccatggaggtgaacttcaacttcgacgaccccaacctgatcatcctgcctctggcctttggcaagagacagggcagagaattcatctggaacgacctgctgtccctggaaaccggcagcctgaagctggccaacggaagagtgatcgagaagacactgtacaacagaagaacccggcaggatgagcctgccctgttcgtggccctgaccttcgagcggcgggaggtcctggactcctccaatatcaaaccaatgaacctgatcggcgtggcaagaggcgaaaacatccccgccgtgatcgccctgaccgaccccgagggctgcccactgagccggtttaaggatagcctgggaaacccaacccacatcctgagaatcggcgagagctataaggagaagcagcggaccatccaggccaagaaggaggtggagcagcggagagccggcggctacagccggaagtacgccagcaaagccaagaatctggcagacgatatggtgagaaacaccgctagagatctgctgtactacgccgtgacccaggatgccatgctgatcttcgccaacctgagccggggcttcggccggcagggcaagcggaccttcatggccgagagacagtacacacggatggaggactggctgaccgccaagctggcctacgagggcctgagcaagacctacctgtccaagacactggcccagtacacctccaagacatgcagcaactgtgggtttaccatcaccagcgccgactacgacagggtgctggagaagctgaagaagacagcaacaggctggatgaccacaattaacggcaaggagctgaaggtggagggccagattacctactacaacagatacaagagacagaacgtagtcaaggacctgtccgtcgagctggatagactgagcgaagaatctgtgaacaacgacatctcctcctggacaaagggcagaagcggagaagctctgagcctcctgaagaaaagattctcccatagacccgtgcaggagaagttcgtgtgcctgaactgcggcttcgagacacacgcagccgagcaagccgccctgaacatcgccagatcctggctgttcctgcggagccaggagtacaagaaataccagacaaacaagacaaccggcaacaccgataagagagccttcgtcgagacctggcagtccttttaccggaagaagcttaaggaggtgtggaaacctgccgtgcggtctggcggatctggcggaggctccaccagccccaagaaaaagagaaaagtctaagctgccttctgcggggcttgccttctggccatgcccttcttctctcccttgcacctgtacctcttggtctttgaataaagcctgagtaggaaggctagcaaaaaaaaaaaaaaaaaaaaaaaaaaaaaaaaaaaaaaaaaaaaaaaaaaaaaaaaaaaaaaaaaaaaaaaaaaaaaaaa

SEQ ID NO: 12383 - RNA, 5785 nt, synthetic construct
  source 1..5785: mol_type = other RNA
aggaaataagagagaaaagaagagtaagaagaaatataagagccaccatggcccctaagaagaagcgtaaagtgagccggatggaacgcctcgtctacgaggtgcggcagaagtgcagaaacatcgaggacatctgcatctcctgcggatctctgaacgtgaccctggagcacccactgttcatcggcggcatgtgccagaactgtaaaaactgttttctggagtgtgcctatcaatacgacgatgacggctaccagagctactgcaccatctgttgcggcggaagagaggtgctgatgtgtggaaataacaactgctgccggtgcttctgcgtggaatgcgtggacctgctggtgggccccggcgccgcccaggccgctattaaggaagatccttggaactgctacatgtgcggccacaagggcacatacggcctgctgagacggagagaggactggcctagcagactgcagatgttcttcgccaataaccacgaccaggagttcgacccccctaaggtgtaccctcccgtccccgccgagaagagaaagcccatccgggtcctgagcctgttcgatggcatcgccaccggtctgctggtgctgaaggacctgggcatccaggtggataggtacattgcctccgaggtgtgcgaggactccatcaccgtgggaatggtgcgtcatcagggcaagatcatgtacgtgggcgacgtgcggagcgtgacacagaagcatatccaggagtggggccctttcgacctggtgatcggcggcagcccttgcaatgacctgagcatcgtgaacccagcccggaagggcctgtacgagggaaccggcagactgttcttcgagttttacagactgctgcacgacgcccggcctaaggaaggcgacgaccggcccttcttttggctgttcgagaatgtggtggccatgggagtcagcgacaagcgggatattagccggttcctggagagcaaccccgtgatgatcgatgccaaggaagtgagcgccgcccaccgggccagatacttctggggcaatctgcctggcatgaacagacccctggccagcaccgtgaacgacaagctggagctgcaggagtgcctggagcacggccggatcgccaagttcagcaaggtgagaaccatcaccacccgaagcaacagcatcaaacaaggcaaggaccagcactttcctgtgttcatgaacgagaaggaggacatcctgtggtgtaccgagatggagagagtgttcgggttcccagtccactacacagatgtcagcaacatgtctagactggccagacagagactgctgggaagaagctggtccgtccctgtgatcagacacctgttcgcccctctgaaggagtacttcgcctgcgtgagcagcggcaacagcaacgccaacagccggggccccagcttctctagcggcctggtgccactgtccctgagagggagccacatgggccccatggagatctacaaaaccgtgagcgcctggaagcggcagcctgtgcgcgtgctgagcctgtttcggaatatcgataaagtcctgaaaagcctgggattcctggagagcggctctggctccggcggtggcaccctgaagtacgtggaggatgtgacaaacgtggtcagacgggatgtggagaagtggggccccttcgatctggtgtacggcagcacccaacccctgggcagctcttgtgaccggtgccctggctggtacatgtttcagttccaccggatcctgcagtacgccctgccgagacaggagtcccagcggccattcttttggattttcatggacaacttgctgctgaccgaggatgaccaggaaactaccactcggttcctgcagaccgaagccgtgaccctgcaggacgtgagaggccgggactaccagaacgccatgcgggtgtggtccaacatccctggactgaaaagcaagcacgcacctctgacccctaaagaagaggagtacctgcaggcccaggtgcggagcagaagcaagctggacgcccctaaggtggatctgctggtgaagaattgcctcctgcccctgagagagtacttcaagtatttcagccagaatagtctgcccctgggaggcagcggcggcggcatggccttcgaggacgtggccgtgtacttcagcagggaggagtgggagctgctggacaccgcccagagggccctgtacaggcacgtgatgctggagaacttcgccctggtggccagcctgggcttcagccccagcaggccctgcgtggtgatccagctggagagcggcaaggagccctggctgcacagcggcatggacaccaccatgagcaggcacgcccacaagaggcccagcagcggcagcggcggcccaagcagcggcgcccctcctcccagcggcggcagcccagccggctccccaacctctaccgaggagggcacctctgagtccgccacccccgagagcggccctggcacctccaccgagcccagcgagggcagcgcacccggcagccctgccggcagccccacctccacagaggagggaaccagcaccgagcccagcgaaggcagcgccccaggcaccagcaccgagcctagtgagcaggagattaaacggatcaacaagatcagaagaagacttgtgaaagacagcaacaccaagaaggccggcaagacaggccccatgaaaaccctgctggttagagtgatgacacccgatctgagagagcggctggaaaacctgagaaagaagcctgaaaatatcccccagcccatcagcaatacatctagagccaacctgaataagctgctgaccgattacaccgaaatgaagaaggcgatcctgcatgtgtactgggaagagttccagaaggaccctgtgggcctgatgagccgggtggcccagcctgccagcaagaagatcgatcagaacaagctgaaacctgagatggacgagaagggcaacctgaccaccgccggctttgcctgctctcagtgtggccagcccctgttcgtgtacaagctggagcaggtgtctgagaagggcaaggcttacaccaactacttcggacggtgcaatgtggccgagcacgaaaagctgatcctgctggcccagctgaagcccgagaaggatagcgacgaagccgtgacatatagcctgggaaagtttgggcagagggccctggatttctacagcattcatgtgaccaaggagtccacccaccccgtgaagcccctggcccagatcgccggaaacagatacgcctccggacctgtgggaaaggccctgagcgacgcatgtatgggcacaatcgcctccttcctgtctaagtaccaggacatcatcatcgaacaccagaaggtggtgaagggcaaccagaagagactggagagcctgcgggagctggccggcaaggaaaacctggaataccctagcgtgaccctgccacctcagcctcacaccaaggagggcgttgatgcctacaacgaagtgatcgcccgggtgcgaatgtgggtgaacctgaacctgtggcagaagctgaagctaagcagagatgatgccaagcctctgctgagactgaagggattcccttcctttcctctggtcgagagacaggccaacgaagtggactggtgggacatggtgtgtaacgtgaagaagctgatcaacgagaaaaaggaggatggcaaggtgttttggcagaatctggctggctacaagagacaggaagccctgagaccatacctgagcagcgaggaagatcggaagaagggaaagaaattcgctcggtaccagctgggcgacctgctgctgcacctggaaaagaagcacggcgaggactggggaaaggtgtacgacgaggcctgggagcggattgacaagaaagtggaaggcctgagcaagcacatcaagctggaagaggaacggagaagcgaggacgcccagagcaaggccgccctgaccgactggctgcgggctaaggccagcttcgtgatcgagggcctgaaggaggccgacaaggacgagttctgcagatgcgagctgaagctgcagaagtggtacggggacctgcggggaaagcccttcgccatcgaagccgagaacagcatcctggacatcagcggcttcagcaagcagtacaactgtgccttcatctggcagaaggacggcgtgaagaagctgaacctgtacctgatcatcaactacttcaagggcggcaagctgcggttcaagaagatcaaacctgaagccttcgaagccaacagattctacaccgtgatcaacaaaaagagcggcgagatcgtgcccatggaggtgaacttcaacttcgacgaccccaacctgatcatcctgcctctggcctttggcaagagacagggcagagaattcatctggaacgacctgctgtccctggaaaccggcagcctgaagctggccaacggaagagtgatcgagaagacactgtacaacagaagaacccggcaggatgagcctgccctgttcgtggccctgaccttcgagcggcgggaggtcctggactcctccaatatcaaaccaatgaacctgatcggcgtggcaagaggcgaaaacatccccgccgtgatcgccctgaccgaccccgagggctgcccactgagccggtttaaggatagcctgggaaacccaacccacatcctgagaatcggcgagagctataaggagaagcagcggaccatccaggccaagaaggaggtggagcagcggagagccggcggctacagccggaagtacgccagcaaagccaagaatctggcagacgatatggtgagaaacaccgctagagatctgctgtactacgccgtgacccaggatgccatgctgatcttcgccaacctgagccggggcttcggccggcagggcaagcggaccttcatggccgagagacagtacacacggatggaggactggctgaccgccaagctggcctacgagggcctgagcaagacctacctgtccaagacactggcccagtacacctccaagacatgcagcaactgtgggtttaccatcaccagcgccgactacgacagggtgctggagaagctgaagaagacagcaacaggctggatgaccacaattaacggcaaggagctgaaggtggagggccagattacctactacaacagatacaagagacagaacgtagtcaaggacctgtccgtcgagctggatagactgagcgaagaatctgtgaacaacgacatctcctcctggacaaagggcagaagcggagaagctctgagcctcctgaagaaaagattctcccatagacccgtgcaggagaagttcgtgtgcctgaactgcggcttcgagacacacgcagccgagcaagccgccctgaacatcgccagatcctggctgttcctgcggagccaggagtacaagaaataccagacaaacaagacaaccggcaacaccgataagagagccttcgtcgagacctggcagtccttttaccggaagaagcttaaggaggtgtggaaacctgccgtgcggtctggcggatctggcggaggctccaccagccccaagaaaaagagaaaagtctaagctgccttctgcggggcttgccttctggccatgcccttcttctctcccttgcacctgtacctcttggtctttgaataaagcctgagtaggaaggctagcaaaaaaaaaaaaaaaaaaaaaaaaaaaaaaaaaaaaaaaaaaaaaaaaaaaaaaaaaaaaaaaaaaaaaaaaaaaaaaaa

SEQ ID NO: 12384 - RNA, 5785 nt, synthetic construct
  source 1..5785: mol_type = other RNA
aggaaataagagagaaaagaagagtaagaagaaatataagagccaccatggcccctaagaagaagcgtaaagtgagccggatggaacgcctcgtctacgaggtgcggcagaagtgcagaaacatcgaggacatctgcatctcctgcggatctctgaacgtgaccctggagcacccactgttcatcggcggcatgtgccagaactgtaaaaactgttttctggagtgtgcctatcaatacgacgatgacggctaccagagctactgcaccatctgttgcggcggaagagaggtgctgatgtgtggaaataacaactgctgccggtgcttctgcgtggaatgcgtggacctgctggtgggccccggcgccgcccaggccgctattaaggaagatccttggaactgctacatgtgcggccacaagggcacatacggcctgctgagacggagagaggactggcctagcagactgcagatgttcttcgccaataaccacgaccaggagttcgacccccctaaggtgtaccctcccgtccccgccgagaagagaaagcccatccgggtcctgagcctgttcgatggcatcgccaccggtctgctggtgctgaaggacctgggcatccaggtggataggtacattgcctccgaggtgtgcgaggactccatcaccgtgggaatggtgcgtcatcagggcaagatcatgtacgtgggcgacgtgcggagcgtgacacagaagcatatccaggagtggggccctttcgacctggtgatcggcggcagcccttgcaatgacctgagcatcgtgaacccagcccggaagggcctgtacgagggaaccggcagactgttcttcgagttttacagactgctgcacgacgcccggcctaaggaaggcgacgaccggcccttcttttggctgttcgagaatgtggtggccatgggagtcagcgacaagcgggatattagccggttcctggagagcaaccccgtgatgatcgatgccaaggaagtgagcgccgcccaccgggccagatacttctggggcaatctgcctggcatgaacagacccctggccagcaccgtgaacgacaagctggagctgcaggagtgcctggagcacggccggatcgccaagttcagcaaggtgagaaccatcaccacccgaagcaacagcatcaaacaaggcaaggaccagcactttcctgtgttcatgaacgagaaggaggacatcctgtggtgtaccgagatggagagagtgttcgggttcccagtccactacacagatgtcagcaacatgtctagactggccagacagagactgctgggaagaagctggtccgtccctgtgatcagacacctgttcgcccctctgaaggagtacttcgcctgcgtgagcagcggcaacagcaacgccaacagccggggccccagcttctctagcggcctggtgccactgtccctgagagggagccacatgggccccatggagatctacaaaaccgtgagcgcctggaagcggcagcctgtgcgcgtgctgagcctgtttcggaatatcgataaagtcctgaaaagcctgggattcctggagagcggctctggctccggcggtggcaccctgaagtacgtggaggatgtgacaaacgtggtcagacgggatgtggagaagtggggccccttcgatctggtgtacggcagcacccaacccctgggcagctcttgtgaccggtgccctggctggtacatgtttcagttccaccggatcctgcagtacgccctgccgagacaggagtcccagcggccattcttttggattttcatggacaacttgctgctgaccgaggatgaccaggaaactaccactcggttcctgcagaccgaagccgtgaccctgcaggacgtgagaggccgggactaccagaacgccatgcgggtgtggtccaacatccctggactgaaaagcaagcacgcacctctgacccctaaagaagaggagtacctgcaggcccaggtgcggagcagaagcaagctggacgcccctaaggtggatctgctggtgaagaattgcctcctgcccctgagagagtacttcaagtatttcagccagaatagtctgcccctgggaggcagcggcggcggcatgatcgagtaccagatccccgtgagcttcaaggacgtggtggtgggcttcacccaggaggagtggcaccagctgagccccgcccagagggccctgtacagggacgtgatgctggagacctacagcaacctggtgagcgtgggctacgagggcaccaagcccgacgtgatcctgaggctggagcaggaggaggccccctggatcggcgaggccgcctgccccggctgccactgctggggcatcggcggcccaagcagcggcgcccctcctcccagcggcggcagcccagccggctccccaacctctaccgaggagggcacctctgagtccgccacccccgagagcggccctggcacctccaccgagcccagcgagggcagcgcacccggcagccctgccggcagccccacctccacagaggagggaaccagcaccgagcccagcgaaggcagcgccccaggcaccagcaccgagcctagtgagcaggagattaaacggatcaacaagatcagaagaagacttgtgaaagacagcaacaccaagaaggccggcaagacaggccccatgaaaaccctgctggttagagtgatgacacccgatctgagagagcggctggaaaacctgagaaagaagcctgaaaatatcccccagcccatcagcaatacatctagagccaacctgaataagctgctgaccgattacaccgaaatgaagaaggcgatcctgcatgtgtactgggaagagttccagaaggaccctgtgggcctgatgagccgggtggcccagcctgccagcaagaagatcgatcagaacaagctgaaacctgagatggacgagaagggcaacctgaccaccgccggctttgcctgctctcagtgtggccagcccctgttcgtgtacaagctggagcaggtgtctgagaagggcaaggcttacaccaactacttcggacggtgcaatgtggccgagcacgaaaagctgatcctgctggcccagctgaagcccgagaaggatagcgacgaagccgtgacatatagcctgggaaagtttgggcagagggccctggatttctacagcattcatgtgaccaaggagtccacccaccccgtgaagcccctggcccagatcgccggaaacagatacgcctccggacctgtgggaaaggccctgagcgacgcatgtatgggcacaatcgcctccttcctgtctaagtaccaggacatcatcatcgaacaccagaaggtggtgaagggcaaccagaagagactggagagcctgcgggagctggccggcaaggaaaacctggaataccctagcgtgaccctgccacctcagcctcacaccaaggagggcgttgatgcctacaacgaagtgatcgcccgggtgcgaatgtgggtgaacctgaacctgtggcagaagctgaagctaagcagagatgatgccaagcctctgctgagactgaagggattcccttcctttcctctggtcgagagacaggccaacgaagtggactggtgggacatggtgtgtaacgtgaagaagctgatcaacgagaaaaaggaggatggcaaggtgttttggcagaatctggctggctacaagagacaggaagccctgagaccatacctgagcagcgaggaagatcggaagaagggaaagaaattcgctcggtaccagctgggcgacctgctgctgcacctggaaaagaagcacggcgaggactggggaaaggtgtacgacgaggcctgggagcggattgacaagaaagtggaaggcctgagcaagcacatcaagctggaagaggaacggagaagcgaggacgcccagagcaaggccgccctgaccgactggctgcgggctaaggccagcttcgtgatcgagggcctgaaggaggccgacaaggacgagttctgcagatgcgagctgaagctgcagaagtggtacggggacctgcggggaaagcccttcgccatcgaagccgagaacagcatcctggacatcagcggcttcagcaagcagtacaactgtgccttcatctggcagaaggacggcgtgaagaagctgaacctgtacctgatcatcaactacttcaagggcggcaagctgcggttcaagaagatcaaacctgaagccttcgaagccaacagattctacaccgtgatcaacaaaaagagcggcgagatcgtgcccatggaggtgaacttcaacttcgacgaccccaacctgatcatcctgcctctggcctttggcaagagacagggcagagaattcatctggaacgacctgctgtccctggaaaccggcagcctgaagctggccaacggaagagtgatcgagaagacactgtacaacagaagaacccggcaggatgagcctgccctgttcgtggccctgaccttcgagcggcgggaggtcctggactcctccaatatcaaaccaatgaacctgatcggcgtggcaagaggcgaaaacatccccgccgtgatcgccctgaccgaccccgagggctgcccactgagccggtttaaggatagcctgggaaacccaacccacatcctgagaatcggcgagagctataaggagaagcagcggaccatccaggccaagaaggaggtggagcagcggagagccggcggctacagccggaagtacgccagcaaagccaagaatctggcagacgatatggtgagaaacaccgctagagatctgctgtactacgccgtgacccaggatgccatgctgatcttcgccaacctgagccggggcttcggccggcagggcaagcggaccttcatggccgagagacagtacacacggatggaggactggctgaccgccaagctggcctacgagggcctgagcaagacctacctgtccaagacactggcccagtacacctccaagacatgcagcaactgtgggtttaccatcaccagcgccgactacgacagggtgctggagaagctgaagaagacagcaacaggctggatgaccacaattaacggcaaggagctgaaggtggagggccagattacctactacaacagatacaagagacagaacgtagtcaaggacctgtccgtcgagctggatagactgagcgaagaatctgtgaacaacgacatctcctcctggacaaagggcagaagcggagaagctctgagcctcctgaagaaaagattctcccatagacccgtgcaggagaagttcgtgtgcctgaactgcggcttcgagacacacgcagccgagcaagccgccctgaacatcgccagatcctggctgttcctgcggagccaggagtacaagaaataccagacaaacaagacaaccggcaacaccgataagagagccttcgtcgagacctggcagtccttttaccggaagaagcttaaggaggtgtggaaacctgccgtgcggtctggcggatctggcggaggctccaccagccccaagaaaaagagaaaagtctaagctgccttctgcggggcttgccttctggccatgcccttcttctctcccttgcacctgtacctcttggtctttgaataaagcctgagtaggaaggctagcaaaaaaaaaaaaaaaaaaaaaaaaaaaaaaaaaaaaaaaaaaaaaaaaaaaaaaaaaaaaaaaaaaaaaaaaaaaaaaaa

SEQ ID NO: 12385 - RNA, 5785 nt, synthetic construct
  source 1..5785: mol_type = other RNA
aggaaataagagagaaaagaagagtaagaagaaatataagagccaccatggcccctaagaagaagcgtaaagtgagccggatggaacgcctcgtctacgaggtgcggcagaagtgcagaaacatcgaggacatctgcatctcctgcggatctctgaacgtgaccctggagcacccactgttcatcggcggcatgtgccagaactgtaaaaactgttttctggagtgtgcctatcaatacgacgatgacggctaccagagctactgcaccatctgttgcggcggaagagaggtgctgatgtgtggaaataacaactgctgccggtgcttctgcgtggaatgcgtggacctgctggtgggccccggcgccgcccaggccgctattaaggaagatccttggaactgctacatgtgcggccacaagggcacatacggcctgctgagacggagagaggactggcctagcagactgcagatgttcttcgccaataaccacgaccaggagttcgacccccctaaggtgtaccctcccgtccccgccgagaagagaaagcccatccgggtcctgagcctgttcgatggcatcgccaccggtctgctggtgctgaaggacctgggcatccaggtggataggtacattgcctccgaggtgtgcgaggactccatcaccgtgggaatggtgcgtcatcagggcaagatcatgtacgtgggcgacgtgcggagcgtgacacagaagcatatccaggagtggggccctttcgacctggtgatcggcggcagcccttgcaatgacctgagcatcgtgaacccagcccggaagggcctgtacgagggaaccggcagactgttcttcgagttttacagactgctgcacgacgcccggcctaaggaaggcgacgaccggcccttcttttggctgttcgagaatgtggtggccatgggagtcagcgacaagcgggatattagccggttcctggagagcaaccccgtgatgatcgatgccaaggaagtgagcgccgcccaccgggccagatacttctggggcaatctgcctggcatgaacagacccctggccagcaccgtgaacgacaagctggagctgcaggagtgcctggagcacggccggatcgccaagttcagcaaggtgagaaccatcaccacccgaagcaacagcatcaaacaaggcaaggaccagcactttcctgtgttcatgaacgagaaggaggacatcctgtggtgtaccgagatggagagagtgttcgggttcccagtccactacacagatgtcagcaacatgtctagactggccagacagagactgctgggaagaagctggtccgtccctgtgatcagacacctgttcgcccctctgaaggagtacttcgcctgcgtgagcagcggcaacagcaacgccaacagccggggccccagcttctctagcggcctggtgccactgtccctgagagggagccacatgggccccatggagatctacaaaaccgtgagcgcctggaagcggcagcctgtgcgcgtgctgagcctgtttcggaatatcgataaagtcctgaaaagcctgggattcctggagagcggctctggctccggcggtggcaccctgaagtacgtggaggatgtgacaaacgtggtcagacgggatgtggagaagtggggccccttcgatctggtgtacggcagcacccaacccctgggcagctcttgtgaccggtgccctggctggtacatgtttcagttccaccggatcctgcagtacgccctgccgagacaggagtcccagcggccattcttttggattttcatggacaacttgctgctgaccgaggatgaccaggaaactaccactcggttcctgcagaccgaagccgtgaccctgcaggacgtgagaggccgggactaccagaacgccatgcgggtgtggtccaacatccctggactgaaaagcaagcacgcacctctgacccctaaagaagaggagtacctgcaggcccaggtgcggagcagaagcaagctggacgcccctaaggtggatctgctggtgaagaattgcctcctgcccctgagagagtacttcaagtatttcagccagaatagtctgcccctgggaggcagcggcggcggcgcccaggtgcccgtgaccttcgaggacgtggccgtgtacttcagcagggaggagtgggccgccctggacggcaggcagaaggagctgtacagggacgtgatgaggggcaactacgagctggtggccagcctgggctgccccgccgccaagcccgacctgatctgccagatcgagagggacgaggagctgggcgtgggcgagccccagggcaggcccgtgaggaggcagccccagaggaggagcggcggcccaagcagcggcgcccctcctcccagcggcggcagcccagccggctccccaacctctaccgaggagggcacctctgagtccgccacccccgagagcggccctggcacctccaccgagcccagcgagggcagcgcacccggcagccctgccggcagccccacctccacagaggagggaaccagcaccgagcccagcgaaggcagcgccccaggcaccagcaccgagcctagtgagcaggagattaaacggatcaacaagatcagaagaagacttgtgaaagacagcaacaccaagaaggccggcaagacaggccccatgaaaaccctgctggttagagtgatgacacccgatctgagagagcggctggaaaacctgagaaagaagcctgaaaatatcccccagcccatcagcaatacatctagagccaacctgaataagctgctgaccgattacaccgaaatgaagaaggcgatcctgcatgtgtactgggaagagttccagaaggaccctgtgggcctgatgagccgggtggcccagcctgccagcaagaagatcgatcagaacaagctgaaacctgagatggacgagaagggcaacctgaccaccgccggctttgcctgctctcagtgtggccagcccctgttcgtgtacaagctggagcaggtgtctgagaagggcaaggcttacaccaactacttcggacggtgcaatgtggccgagcacgaaaagctgatcctgctggcccagctgaagcccgagaaggatagcgacgaagccgtgacatatagcctgggaaagtttgggcagagggccctggatttctacagcattcatgtgaccaaggagtccacccaccccgtgaagcccctggcccagatcgccggaaacagatacgcctccggacctgtgggaaaggccctgagcgacgcatgtatgggcacaatcgcctccttcctgtctaagtaccaggacatcatcatcgaacaccagaaggtggtgaagggcaaccagaagagactggagagcctgcgggagctggccggcaaggaaaacctggaataccctagcgtgaccctgccacctcagcctcacaccaaggagggcgttgatgcctacaacgaagtgatcgcccgggtgcgaatgtgggtgaacctgaacctgtggcagaagctgaagctaagcagagatgatgccaagcctctgctgagactgaagggattcccttcctttcctctggtcgagagacaggccaacgaagtggactggtgggacatggtgtgtaacgtgaagaagctgatcaacgagaaaaaggaggatggcaaggtgttttggcagaatctggctggctacaagagacaggaagccctgagaccatacctgagcagcgaggaagatcggaagaagggaaagaaattcgctcggtaccagctgggcgacctgctgctgcacctggaaaagaagcacggcgaggactggggaaaggtgtacgacgaggcctgggagcggattgacaagaaagtggaaggcctgagcaagcacatcaagctggaagaggaacggagaagcgaggacgcccagagcaaggccgccctgaccgactggctgcgggctaaggccagcttcgtgatcgagggcctgaaggaggccgacaaggacgagttctgcagatgcgagctgaagctgcagaagtggtacggggacctgcggggaaagcccttcgccatcgaagccgagaacagcatcctggacatcagcggcttcagcaagcagtacaactgtgccttcatctggcagaaggacggcgtgaagaagctgaacctgtacctgatcatcaactacttcaagggcggcaagctgcggttcaagaagatcaaacctgaagccttcgaagccaacagattctacaccgtgatcaacaaaaagagcggcgagatcgtgcccatggaggtgaacttcaacttcgacgaccccaacctgatcatcctgcctctggcctttggcaagagacagggcagagaattcatctggaacgacctgctgtccctggaaaccggcagcctgaagctggccaacggaagagtgatcgagaagacactgtacaacagaagaacccggcaggatgagcctgccctgttcgtggccctgaccttcgagcggcgggaggtcctggactcctccaatatcaaaccaatgaacctgatcggcgtggcaagaggcgaaaacatccccgccgtgatcgccctgaccgaccccgagggctgcccactgagccggtttaaggatagcctgggaaacccaacccacatcctgagaatcggcgagagctataaggagaagcagcggaccatccaggccaagaaggaggtggagcagcggagagccggcggctacagccggaagtacgccagcaaagccaagaatctggcagacgatatggtgagaaacaccgctagagatctgctgtactacgccgtgacccaggatgccatgctgatcttcgccaacctgagccggggcttcggccggcagggcaagcggaccttcatggccgagagacagtacacacggatggaggactggctgaccgccaagctggcctacgagggcctgagcaagacctacctgtccaagacactggcccagtacacctccaagacatgcagcaactgtgggtttaccatcaccagcgccgactacgacagggtgctggagaagctgaagaagacagcaacaggctggatgaccacaattaacggcaaggagctgaaggtggagggccagattacctactacaacagatacaagagacagaacgtagtcaaggacctgtccgtcgagctggatagactgagcgaagaatctgtgaacaacgacatctcctcctggacaaagggcagaagcggagaagctctgagcctcctgaagaaaagattctcccatagacccgtgcaggagaagttcgtgtgcctgaactgcggcttcgagacacacgcagccgagcaagccgccctgaacatcgccagatcctggctgttcctgcggagccaggagtacaagaaataccagacaaacaagacaaccggcaacaccgataagagagccttcgtcgagacctggcagtccttttaccggaagaagcttaaggaggtgtggaaacctgccgtgcggtctggcggatctggcggaggctccaccagccccaagaaaaagagaaaagtctaagctgccttctgcggggcttgccttctggccatgcccttcttctctcccttgcacctgtacctcttggtctttgaataaagcctgagtaggaaggctagcaaaaaaaaaaaaaaaaaaaaaaaaaaaaaaaaaaaaaaaaaaaaaaaaaaaaaaaaaaaaaaaaaaaaaaaaaaaaaaaa

SEQ ID NO: 12386 - RNA, 5785 nt, synthetic construct
  source 1..5785: mol_type = other RNA
aggaaataagagagaaaagaagagtaagaagaaatataagagccaccatggcccctaagaagaagcgtaaagtgagccggatggaacgcctcgtctacgaggtgcggcagaagtgcagaaacatcgaggacatctgcatctcctgcggatctctgaacgtgaccctggagcacccactgttcatcggcggcatgtgccagaactgtaaaaactgttttctggagtgtgcctatcaatacgacgatgacggctaccagagctactgcaccatctgttgcggcggaagagaggtgctgatgtgtggaaataacaactgctgccggtgcttctgcgtggaatgcgtggacctgctggtgggccccggcgccgcccaggccgctattaaggaagatccttggaactgctacatgtgcggccacaagggcacatacggcctgctgagacggagagaggactggcctagcagactgcagatgttcttcgccaataaccacgaccaggagttcgacccccctaaggtgtaccctcccgtccccgccgagaagagaaagcccatccgggtcctgagcctgttcgatggcatcgccaccggtctgctggtgctgaaggacctgggcatccaggtggataggtacattgcctccgaggtgtgcgaggactccatcaccgtgggaatggtgcgtcatcagggcaagatcatgtacgtgggcgacgtgcggagcgtgacacagaagcatatccaggagtggggccctttcgacctggtgatcggcggcagcccttgcaatgacctgagcatcgtgaacccagcccggaagggcctgtacgagggaaccggcagactgttcttcgagttttacagactgctgcacgacgcccggcctaaggaaggcgacgaccggcccttcttttggctgttcgagaatgtggtggccatgggagtcagcgacaagcgggatattagccggttcctggagagcaaccccgtgatgatcgatgccaaggaagtgagcgccgcccaccgggccagatacttctggggcaatctgcctggcatgaacagacccctggccagcaccgtgaacgacaagctggagctgcaggagtgcctggagcacggccggatcgccaagttcagcaaggtgagaaccatcaccacccgaagcaacagcatcaaacaaggcaaggaccagcactttcctgtgttcatgaacgagaaggaggacatcctgtggtgtaccgagatggagagagtgttcgggttcccagtccactacacagatgtcagcaacatgtctagactggccagacagagactgctgggaagaagctggtccgtccctgtgatcagacacctgttcgcccctctgaaggagtacttcgcctgcgtgagcagcggcaacagcaacgccaacagccggggccccagcttctctagcggcctggtgccactgtccctgagagggagccacatgggccccatggagatctacaaaaccgtgagcgcctggaagcggcagcctgtgcgcgtgctgagcctgtttcggaatatcgataaagtcctgaaaagcctgggattcctggagagcggctctggctccggcggtggcaccctgaagtacgtggaggatgtgacaaacgtggtcagacgggatgtggagaagtggggccccttcgatctggtgtacggcagcacccaacccctgggcagctcttgtgaccggtgccctggctggtacatgtttcagttccaccggatcctgcagtacgccctgccgagacaggagtcccagcggccattcttttggattttcatggacaacttgctgctgaccgaggatgaccaggaaactaccactcggttcctgcagaccgaagccgtgaccctgcaggacgtgagaggccgggactaccagaacgccatgcgggtgtggtccaacatccctggactgaaaagcaagcacgcacctctgacccctaaagaagaggagtacctgcaggcccaggtgcggagcagaagcaagctggacgcccctaaggtggatctgctggtgaagaattgcctcctgcccctgagagagtacttcaagtatttcagccagaatagtctgcccctgggaggcagcggcggcggcgcccagggcagcgtgatgttcaacgacgtgagcatcgtgttcagccaggaggagtgggagtacctggacctggagcagaaggacctgtacagggacgtgatgctggagaactacagcaacctggtgagcctgggctgcttcatcagcaagcccgacgtgatcagcctgctggagcagggcaaggagccctggaaggtggtgaggaagggcaggaggaggtacctggacctggagaacaggtacggcggcccaagcagcggcgcccctcctcccagcggcggcagcccagccggctccccaacctctaccgaggagggcacctctgagtccgccacccccgagagcggccctggcacctccaccgagcccagcgagggcagcgcacccggcagccctgccggcagccccacctccacagaggagggaaccagcaccgagcccagcgaaggcagcgccccaggcaccagcaccgagcctagtgagcaggagattaaacggatcaacaagatcagaagaagacttgtgaaagacagcaacaccaagaaggccggcaagacaggccccatgaaaaccctgctggttagagtgatgacacccgatctgagagagcggctggaaaacctgagaaagaagcctgaaaatatcccccagcccatcagcaatacatctagagccaacctgaataagctgctgaccgattacaccgaaatgaagaaggcgatcctgcatgtgtactgggaagagttccagaaggaccctgtgggcctgatgagccgggtggcccagcctgccagcaagaagatcgatcagaacaagctgaaacctgagatggacgagaagggcaacctgaccaccgccggctttgcctgctctcagtgtggccagcccctgttcgtgtacaagctggagcaggtgtctgagaagggcaaggcttacaccaactacttcggacggtgcaatgtggccgagcacgaaaagctgatcctgctggcccagctgaagcccgagaaggatagcgacgaagccgtgacatatagcctgggaaagtttgggcagagggccctggatttctacagcattcatgtgaccaaggagtccacccaccccgtgaagcccctggcccagatcgccggaaacagatacgcctccggacctgtgggaaaggccctgagcgacgcatgtatgggcacaatcgcctccttcctgtctaagtaccaggacatcatcatcgaacaccagaaggtggtgaagggcaaccagaagagactggagagcctgcgggagctggccggcaaggaaaacctggaataccctagcgtgaccctgccacctcagcctcacaccaaggagggcgttgatgcctacaacgaagtgatcgcccgggtgcgaatgtgggtgaacctgaacctgtggcagaagctgaagctaagcagagatgatgccaagcctctgctgagactgaagggattcccttcctttcctctggtcgagagacaggccaacgaagtggactggtgggacatggtgtgtaacgtgaagaagctgatcaacgagaaaaaggaggatggcaaggtgttttggcagaatctggctggctacaagagacaggaagccctgagaccatacctgagcagcgaggaagatcggaagaagggaaagaaattcgctcggtaccagctgggcgacctgctgctgcacctggaaaagaagcacggcgaggactggggaaaggtgtacgacgaggcctgggagcggattgacaagaaagtggaaggcctgagcaagcacatcaagctggaagaggaacggagaagcgaggacgcccagagcaaggccgccctgaccgactggctgcgggctaaggccagcttcgtgatcgagggcctgaaggaggccgacaaggacgagttctgcagatgcgagctgaagctgcagaagtggtacggggacctgcggggaaagcccttcgccatcgaagccgagaacagcatcctggacatcagcggcttcagcaagcagtacaactgtgccttcatctggcagaaggacggcgtgaagaagctgaacctgtacctgatcatcaactacttcaagggcggcaagctgcggttcaagaagatcaaacctgaagccttcgaagccaacagattctacaccgtgatcaacaaaaagagcggcgagatcgtgcccatggaggtgaacttcaacttcgacgaccccaacctgatcatcctgcctctggcctttggcaagagacagggcagagaattcatctggaacgacctgctgtccctggaaaccggcagcctgaagctggccaacggaagagtgatcgagaagacactgtacaacagaagaacccggcaggatgagcctgccctgttcgtggccctgaccttcgagcggcgggaggtcctggactcctccaatatcaaaccaatgaacctgatcggcgtggcaagaggcgaaaacatccccgccgtgatcgccctgaccgaccccgagggctgcccactgagccggtttaaggatagcctgggaaacccaacccacatcctgagaatcggcgagagctataaggagaagcagcggaccatccaggccaagaaggaggtggagcagcggagagccggcggctacagccggaagtacgccagcaaagccaagaatctggcagacgatatggtgagaaacaccgctagagatctgctgtactacgccgtgacccaggatgccatgctgatcttcgccaacctgagccggggcttcggccggcagggcaagcggaccttcatggccgagagacagtacacacggatggaggactggctgaccgccaagctggcctacgagggcctgagcaagacctacctgtccaagacactggcccagtacacctccaagacatgcagcaactgtgggtttaccatcaccagcgccgactacgacagggtgctggagaagctgaagaagacagcaacaggctggatgaccacaattaacggcaaggagctgaaggtggagggccagattacctactacaacagatacaagagacagaacgtagtcaaggacctgtccgtcgagctggatagactgagcgaagaatctgtgaacaacgacatctcctcctggacaaagggcagaagcggagaagctctgagcctcctgaagaaaagattctcccatagacccgtgcaggagaagttcgtgtgcctgaactgcggcttcgagacacacgcagccgagcaagccgccctgaacatcgccagatcctggctgttcctgcggagccaggagtacaagaaataccagacaaacaagacaaccggcaacaccgataagagagccttcgtcgagacctggcagtccttttaccggaagaagcttaaggaggtgtggaaacctgccgtgcggtctggcggatctggcggaggctccaccagccccaagaaaaagagaaaagtctaagctgccttctgcggggcttgccttctggccatgcccttcttctctcccttgcacctgtacctcttggtctttgaataaagcctgagtaggaaggctagcaaaaaaaaaaaaaaaaaaaaaaaaaaaaaaaaaaaaaaaaaaaaaaaaaaaaaaaaaaaaaaaaaaaaaaaaaaaaaaaa

SEQ ID NO: 12387 - RNA, 5785 nt, synthetic construct
  source 1..5785: mol_type = other RNA
aggaaataagagagaaaagaagagtaagaagaaatataagagccaccatggcccctaagaagaagcgtaaagtgagccggatggaacgcctcgtctacgaggtgcggcagaagtgcagaaacatcgaggacatctgcatctcctgcggatctctgaacgtgaccctggagcacccactgttcatcggcggcatgtgccagaactgtaaaaactgttttctggagtgtgcctatcaatacgacgatgacggctaccagagctactgcaccatctgttgcggcggaagagaggtgctgatgtgtggaaataacaactgctgccggtgcttctgcgtggaatgcgtggacctgctggtgggccccggcgccgcccaggccgctattaaggaagatccttggaactgctacatgtgcggccacaagggcacatacggcctgctgagacggagagaggactggcctagcagactgcagatgttcttcgccaataaccacgaccaggagttcgacccccctaaggtgtaccctcccgtccccgccgagaagagaaagcccatccgggtcctgagcctgttcgatggcatcgccaccggtctgctggtgctgaaggacctgggcatccaggtggataggtacattgcctccgaggtgtgcgaggactccatcaccgtgggaatggtgcgtcatcagggcaagatcatgtacgtgggcgacgtgcggagcgtgacacagaagcatatccaggagtggggccctttcgacctggtgatcggcggcagcccttgcaatgacctgagcatcgtgaacccagcccggaagggcctgtacgagggaaccggcagactgttcttcgagttttacagactgctgcacgacgcccggcctaaggaaggcgacgaccggcccttcttttggctgttcgagaatgtggtggccatgggagtcagcgacaagcgggatattagccggttcctggagagcaaccccgtgatgatcgatgccaaggaagtgagcgccgcccaccgggccagatacttctggggcaatctgcctggcatgaacagacccctggccagcaccgtgaacgacaagctggagctgcaggagtgcctggagcacggccggatcgccaagttcagcaaggtgagaaccatcaccacccgaagcaacagcatcaaacaaggcaaggaccagcactttcctgtgttcatgaacgagaaggaggacatcctgtggtgtaccgagatggagagagtgttcgggttcccagtccactacacagatgtcagcaacatgtctagactggccagacagagactgctgggaagaagctggtccgtccctgtgatcagacacctgttcgcccctctgaaggagtacttcgcctgcgtgagcagcggcaacagcaacgccaacagccggggccccagcttctctagcggcctggtgccactgtccctgagagggagccacatgggccccatggagatctacaaaaccgtgagcgcctggaagcggcagcctgtgcgcgtgctgagcctgtttcggaatatcgataaagtcctgaaaagcctgggattcctggagagcggctctggctccggcggtggcaccctgaagtacgtggaggatgtgacaaacgtggtcagacgggatgtggagaagtggggccccttcgatctggtgtacggcagcacccaacccctgggcagctcttgtgaccggtgccctggctggtacatgtttcagttccaccggatcctgcagtacgccctgccgagacaggagtcccagcggccattcttttggattttcatggacaacttgctgctgaccgaggatgaccaggaaactaccactcggttcctgcagaccgaagccgtgaccctgcaggacgtgagaggccgggactaccagaacgccatgcgggtgtggtccaacatccctggactgaaaagcaagcacgcacctctgacccctaaagaagaggagtacctgcaggcccaggtgcggagcagaagcaagctggacgcccctaaggtggatctgctggtgaagaattgcctcctgcccctgagagagtacttcaagtatttcagccagaatagtctgcccctgggaggcagcggcggcggcccccagaagagcgtgaccttcgaggacgtggccgtgtacttcacccagaccgagtgggacggcctgagccccgcccagagggccctgtacagggacgtgatgctggagaactacggcaacgtggccagcctgggcttccccctgctgaagcccaccgtgatcagccagctggagggcggcggcgagctggagggccccagccccctggccagcggcaccggcaccggcccccagggcctgtggggcggcccaagcagcggcgcccctcctcccagcggcggcagcccagccggctccccaacctctaccgaggagggcacctctgagtccgccacccccgagagcggccctggcacctccaccgagcccagcgagggcagcgcacccggcagccctgccggcagccccacctccacagaggagggaaccagcaccgagcccagcgaaggcagcgccccaggcaccagcaccgagcctagtgagcaggagattaaacggatcaacaagatcagaagaagacttgtgaaagacagcaacaccaagaaggccggcaagacaggccccatgaaaaccctgctggttagagtgatgacacccgatctgagagagcggctggaaaacctgagaaagaagcctgaaaatatcccccagcccatcagcaatacatctagagccaacctgaataagctgctgaccgattacaccgaaatgaagaaggcgatcctgcatgtgtactgggaagagttccagaaggaccctgtgggcctgatgagccgggtggcccagcctgccagcaagaagatcgatcagaacaagctgaaacctgagatggacgagaagggcaacctgaccaccgccggctttgcctgctctcagtgtggccagcccctgttcgtgtacaagctggagcaggtgtctgagaagggcaaggcttacaccaactacttcggacggtgcaatgtggccgagcacgaaaagctgatcctgctggcccagctgaagcccgagaaggatagcgacgaagccgtgacatatagcctgggaaagtttgggcagagggccctggatttctacagcattcatgtgaccaaggagtccacccaccccgtgaagcccctggcccagatcgccggaaacagatacgcctccggacctgtgggaaaggccctgagcgacgcatgtatgggcacaatcgcctccttcctgtctaagtaccaggacatcatcatcgaacaccagaaggtggtgaagggcaaccagaagagactggagagcctgcgggagctggccggcaaggaaaacctggaataccctagcgtgaccctgccacctcagcctcacaccaaggagggcgttgatgcctacaacgaagtgatcgcccgggtgcgaatgtgggtgaacctgaacctgtggcagaagctgaagctaagcagagatgatgccaagcctctgctgagactgaagggattcccttcctttcctctggtcgagagacaggccaacgaagtggactggtgggacatggtgtgtaacgtgaagaagctgatcaacgagaaaaaggaggatggcaaggtgttttggcagaatctggctggctacaagagacaggaagccctgagaccatacctgagcagcgaggaagatcggaagaagggaaagaaattcgctcggtaccagctgggcgacctgctgctgcacctggaaaagaagcacggcgaggactggggaaaggtgtacgacgaggcctgggagcggattgacaagaaagtggaaggcctgagcaagcacatcaagctggaagaggaacggagaagcgaggacgcccagagcaaggccgccctgaccgactggctgcgggctaaggccagcttcgtgatcgagggcctgaaggaggccgacaaggacgagttctgcagatgcgagctgaagctgcagaagtggtacggggacctgcggggaaagcccttcgccatcgaagccgagaacagcatcctggacatcagcggcttcagcaagcagtacaactgtgccttcatctggcagaaggacggcgtgaagaagctgaacctgtacctgatcatcaactacttcaagggcggcaagctgcggttcaagaagatcaaacctgaagccttcgaagccaacagattctacaccgtgatcaacaaaaagagcggcgagatcgtgcccatggaggtgaacttcaacttcgacgaccccaacctgatcatcctgcctctggcctttggcaagagacagggcagagaattcatctggaacgacctgctgtccctggaaaccggcagcctgaagctggccaacggaagagtgatcgagaagacactgtacaacagaagaacccggcaggatgagcctgccctgttcgtggccctgaccttcgagcggcgggaggtcctggactcctccaatatcaaaccaatgaacctgatcggcgtggcaagaggcgaaaacatccccgccgtgatcgccctgaccgaccccgagggctgcccactgagccggtttaaggatagcctgggaaacccaacccacatcctgagaatcggcgagagctataaggagaagcagcggaccatccaggccaagaaggaggtggagcagcggagagccggcggctacagccggaagtacgccagcaaagccaagaatctggcagacgatatggtgagaaacaccgctagagatctgctgtactacgccgtgacccaggatgccatgctgatcttcgccaacctgagccggggcttcggccggcagggcaagcggaccttcatggccgagagacagtacacacggatggaggactggctgaccgccaagctggcctacgagggcctgagcaagacctacctgtccaagacactggcccagtacacctccaagacatgcagcaactgtgggtttaccatcaccagcgccgactacgacagggtgctggagaagctgaagaagacagcaacaggctggatgaccacaattaacggcaaggagctgaaggtggagggccagattacctactacaacagatacaagagacagaacgtagtcaaggacctgtccgtcgagctggatagactgagcgaagaatctgtgaacaacgacatctcctcctggacaaagggcagaagcggagaagctctgagcctcctgaagaaaagattctcccatagacccgtgcaggagaagttcgtgtgcctgaactgcggcttcgagacacacgcagccgagcaagccgccctgaacatcgccagatcctggctgttcctgcggagccaggagtacaagaaataccagacaaacaagacaaccggcaacaccgataagagagccttcgtcgagacctggcagtccttttaccggaagaagcttaaggaggtgtggaaacctgccgtgcggtctggcggatctggcggaggctccaccagccccaagaaaaagagaaaagtctaagctgccttctgcggggcttgccttctggccatgcccttcttctctcccttgcacctgtacctcttggtctttgaataaagcctgagtaggaaggctagcaaaaaaaaaaaaaaaaaaaaaaaaaaaaaaaaaaaaaaaaaaaaaaaaaaaaaaaaaaaaaaaaaaaaaaaaaaaaaaaa

SEQ ID NO: 12388 - RNA, 5785 nt, synthetic construct
  source 1..5785: mol_type = other RNA
aggaaataagagagaaaagaagagtaagaagaaatataagagccaccatggcccctaagaagaagcgtaaagtgagccggatggaacgcctcgtctacgaggtgcggcagaagtgcagaaacatcgaggacatctgcatctcctgcggatctctgaacgtgaccctggagcacccactgttcatcggcggcatgtgccagaactgtaaaaactgttttctggagtgtgcctatcaatacgacgatgacggctaccagagctactgcaccatctgttgcggcggaagagaggtgctgatgtgtggaaataacaactgctgccggtgcttctgcgtggaatgcgtggacctgctggtgggccccggcgccgcccaggccgctattaaggaagatccttggaactgctacatgtgcggccacaagggcacatacggcctgctgagacggagagaggactggcctagcagactgcagatgttcttcgccaataaccacgaccaggagttcgacccccctaaggtgtaccctcccgtccccgccgagaagagaaagcccatccgggtcctgagcctgttcgatggcatcgccaccggtctgctggtgctgaaggacctgggcatccaggtggataggtacattgcctccgaggtgtgcgaggactccatcaccgtgggaatggtgcgtcatcagggcaagatcatgtacgtgggcgacgtgcggagcgtgacacagaagcatatccaggagtggggccctttcgacctggtgatcggcggcagcccttgcaatgacctgagcatcgtgaacccagcccggaagggcctgtacgagggaaccggcagactgttcttcgagttttacagactgctgcacgacgcccggcctaaggaaggcgacgaccggcccttcttttggctgttcgagaatgtggtggccatgggagtcagcgacaagcgggatattagccggttcctggagagcaaccccgtgatgatcgatgccaaggaagtgagcgccgcccaccgggccagatacttctggggcaatctgcctggcatgaacagacccctggccagcaccgtgaacgacaagctggagctgcaggagtgcctggagcacggccggatcgccaagttcagcaaggtgagaaccatcaccacccgaagcaacagcatcaaacaaggcaaggaccagcactttcctgtgttcatgaacgagaaggaggacatcctgtggtgtaccgagatggagagagtgttcgggttcccagtccactacacagatgtcagcaacatgtctagactggccagacagagactgctgggaagaagctggtccgtccctgtgatcagacacctgttcgcccctctgaaggagtacttcgcctgcgtgagcagcggcaacagcaacgccaacagccggggccccagcttctctagcggcctggtgccactgtccctgagagggagccacatgggccccatggagatctacaaaaccgtgagcgcctggaagcggcagcctgtgcgcgtgctgagcctgtttcggaatatcgataaagtcctgaaaagcctgggattcctggagagcggctctggctccggcggtggcaccctgaagtacgtggaggatgtgacaaacgtggtcagacgggatgtggagaagtggggccccttcgatctggtgtacggcagcacccaacccctgggcagctcttgtgaccggtgccctggctggtacatgtttcagttccaccggatcctgcagtacgccctgccgagacaggagtcccagcggccattcttttggattttcatggacaacttgctgctgaccgaggatgaccaggaaactaccactcggttcctgcagaccgaagccgtgaccctgcaggacgtgagaggccgggactaccagaacgccatgcgggtgtggtccaacatccctggactgaaaagcaagcacgcacctctgacccctaaagaagaggagtacctgcaggcccaggtgcggagcagaagcaagctggacgcccctaaggtggatctgctggtgaagaattgcctcctgcccctgagagagtacttcaagtatttcagccagaatagtctgcccctgggaggcagcggcggcggcgtgcaggagcccgtgaccttcaaggacgtggccgtggacttcacccaggaggagtggggccagctggacctggtgcagaggaccctgtacagggacgtgatgctggagacctacggccacctgctgagcgtgggcaaccagatcgccaagcccgaggtgatcagcctgctggagcagggcgaggagccctggagcgtggagcaggcctgcccccagaggacctgcagcgagtgggtgaggaacggcggcccaagcagcggcgcccctcctcccagcggcggcagcccagccggctccccaacctctaccgaggagggcacctctgagtccgccacccccgagagcggccctggcacctccaccgagcccagcgagggcagcgcacccggcagccctgccggcagccccacctccacagaggagggaaccagcaccgagcccagcgaaggcagcgccccaggcaccagcaccgagcctagtgagcaggagattaaacggatcaacaagatcagaagaagacttgtgaaagacagcaacaccaagaaggccggcaagacaggccccatgaaaaccctgctggttagagtgatgacacccgatctgagagagcggctggaaaacctgagaaagaagcctgaaaatatcccccagcccatcagcaatacatctagagccaacctgaataagctgctgaccgattacaccgaaatgaagaaggcgatcctgcatgtgtactgggaagagttccagaaggaccctgtgggcctgatgagccgggtggcccagcctgccagcaagaagatcgatcagaacaagctgaaacctgagatggacgagaagggcaacctgaccaccgccggctttgcctgctctcagtgtggccagcccctgttcgtgtacaagctggagcaggtgtctgagaagggcaaggcttacaccaactacttcggacggtgcaatgtggccgagcacgaaaagctgatcctgctggcccagctgaagcccgagaaggatagcgacgaagccgtgacatatagcctgggaaagtttgggcagagggccctggatttctacagcattcatgtgaccaaggagtccacccaccccgtgaagcccctggcccagatcgccggaaacagatacgcctccggacctgtgggaaaggccctgagcgacgcatgtatgggcacaatcgcctccttcctgtctaagtaccaggacatcatcatcgaacaccagaaggtggtgaagggcaaccagaagagactggagagcctgcgggagctggccggcaaggaaaacctggaataccctagcgtgaccctgccacctcagcctcacaccaaggagggcgttgatgcctacaacgaagtgatcgcccgggtgcgaatgtgggtgaacctgaacctgtggcagaagctgaagctaagcagagatgatgccaagcctctgctgagactgaagggattcccttcctttcctctggtcgagagacaggccaacgaagtggactggtgggacatggtgtgtaacgtgaagaagctgatcaacgagaaaaaggaggatggcaaggtgttttggcagaatctggctggctacaagagacaggaagccctgagaccatacctgagcagcgaggaagatcggaagaagggaaagaaattcgctcggtaccagctgggcgacctgctgctgcacctggaaaagaagcacggcgaggactggggaaaggtgtacgacgaggcctgggagcggattgacaagaaagtggaaggcctgagcaagcacatcaagctggaagaggaacggagaagcgaggacgcccagagcaaggccgccctgaccgactggctgcgggctaaggccagcttcgtgatcgagggcctgaaggaggccgacaaggacgagttctgcagatgcgagctgaagctgcagaagtggtacggggacctgcggggaaagcccttcgccatcgaagccgagaacagcatcctggacatcagcggcttcagcaagcagtacaactgtgccttcatctggcagaaggacggcgtgaagaagctgaacctgtacctgatcatcaactacttcaagggcggcaagctgcggttcaagaagatcaaacctgaagccttcgaagccaacagattctacaccgtgatcaacaaaaagagcggcgagatcgtgcccatggaggtgaacttcaacttcgacgaccccaacctgatcatcctgcctctggcctttggcaagagacagggcagagaattcatctggaacgacctgctgtccctggaaaccggcagcctgaagctggccaacggaagagtgatcgagaagacactgtacaacagaagaacccggcaggatgagcctgccctgttcgtggccctgaccttcgagcggcgggaggtcctggactcctccaatatcaaaccaatgaacctgatcggcgtggcaagaggcgaaaacatccccgccgtgatcgccctgaccgaccccgagggctgcccactgagccggtttaaggatagcctgggaaacccaacccacatcctgagaatcggcgagagctataaggagaagcagcggaccatccaggccaagaaggaggtggagcagcggagagccggcggctacagccggaagtacgccagcaaagccaagaatctggcagacgatatggtgagaaacaccgctagagatctgctgtactacgccgtgacccaggatgccatgctgatcttcgccaacctgagccggggcttcggccggcagggcaagcggaccttcatggccgagagacagtacacacggatggaggactggctgaccgccaagctggcctacgagggcctgagcaagacctacctgtccaagacactggcccagtacacctccaagacatgcagcaactgtgggtttaccatcaccagcgccgactacgacagggtgctggagaagctgaagaagacagcaacaggctggatgaccacaattaacggcaaggagctgaaggtggagggccagattacctactacaacagatacaagagacagaacgtagtcaaggacctgtccgtcgagctggatagactgagcgaagaatctgtgaacaacgacatctcctcctggacaaagggcagaagcggagaagctctgagcctcctgaagaaaagattctcccatagacccgtgcaggagaagttcgtgtgcctgaactgcggcttcgagacacacgcagccgagcaagccgccctgaacatcgccagatcctggctgttcctgcggagccaggagtacaagaaataccagacaaacaagacaaccggcaacaccgataagagagccttcgtcgagacctggcagtccttttaccggaagaagcttaaggaggtgtggaaacctgccgtgcggtctggcggatctggcggaggctccaccagccccaagaaaaagagaaaagtctaagctgccttctgcggggcttgccttctggccatgcccttcttctctcccttgcacctgtacctcttggtctttgaataaagcctgagtaggaaggctagcaaaaaaaaaaaaaaaaaaaaaaaaaaaaaaaaaaaaaaaaaaaaaaaaaaaaaaaaaaaaaaaaaaaaaaaaaaaaaaaa

SEQ ID NO: 12389 - RNA, 5785 nt, synthetic construct
  source 1..5785: mol_type = other RNA
aggaaataagagagaaaagaagagtaagaagaaatataagagccaccatggcccctaagaagaagcgtaaagtgagccggatggaacgcctcgtctacgaggtgcggcagaagtgcagaaacatcgaggacatctgcatctcctgcggatctctgaacgtgaccctggagcacccactgttcatcggcggcatgtgccagaactgtaaaaactgttttctggagtgtgcctatcaatacgacgatgacggctaccagagctactgcaccatctgttgcggcggaagagaggtgctgatgtgtggaaataacaactgctgccggtgcttctgcgtggaatgcgtggacctgctggtgggccccggcgccgcccaggccgctattaaggaagatccttggaactgctacatgtgcggccacaagggcacatacggcctgctgagacggagagaggactggcctagcagactgcagatgttcttcgccaataaccacgaccaggagttcgacccccctaaggtgtaccctcccgtccccgccgagaagagaaagcccatccgggtcctgagcctgttcgatggcatcgccaccggtctgctggtgctgaaggacctgggcatccaggtggataggtacattgcctccgaggtgtgcgaggactccatcaccgtgggaatggtgcgtcatcagggcaagatcatgtacgtgggcgacgtgcggagcgtgacacagaagcatatccaggagtggggccctttcgacctggtgatcggcggcagcccttgcaatgacctgagcatcgtgaacccagcccggaagggcctgtacgagggaaccggcagactgttcttcgagttttacagactgctgcacgacgcccggcctaaggaaggcgacgaccggcccttcttttggctgttcgagaatgtggtggccatgggagtcagcgacaagcgggatattagccggttcctggagagcaaccccgtgatgatcgatgccaaggaagtgagcgccgcccaccgggccagatacttctggggcaatctgcctggcatgaacagacccctggccagcaccgtgaacgacaagctggagctgcaggagtgcctggagcacggccggatcgccaagttcagcaaggtgagaaccatcaccacccgaagcaacagcatcaaacaaggcaaggaccagcactttcctgtgttcatgaacgagaaggaggacatcctgtggtgtaccgagatggagagagtgttcgggttcccagtccactacacagatgtcagcaacatgtctagactggccagacagagactgctgggaagaagctggtccgtccctgtgatcagacacctgttcgcccctctgaaggagtacttcgcctgcgtgagcagcggcaacagcaacgccaacagccggggccccagcttctctagcggcctggtgccactgtccctgagagggagccacatgggccccatggagatctacaaaaccgtgagcgcctggaagcggcagcctgtgcgcgtgctgagcctgtttcggaatatcgataaagtcctgaaaagcctgggattcctggagagcggctctggctccggcggtggcaccctgaagtacgtggaggatgtgacaaacgtggtcagacgggatgtggagaagtggggccccttcgatctggtgtacggcagcacccaacccctgggcagctcttgtgaccggtgccctggctggtacatgtttcagttccaccggatcctgcagtacgccctgccgagacaggagtcccagcggccattcttttggattttcatggacaacttgctgctgaccgaggatgaccaggaaactaccactcggttcctgcagaccgaagccgtgaccctgcaggacgtgagaggccgggactaccagaacgccatgcgggtgtggtccaacatccctggactgaaaagcaagcacgcacctctgacccctaaagaagaggagtacctgcaggcccaggtgcggagcagaagcaagctggacgcccctaaggtggatctgctggtgaagaattgcctcctgcccctgagagagtacttcaagtatttcagccagaatagtctgcccctgggaggcagcggcggcggcctggtgaagttcgaggaggtggccgtggtgttcagcgaggacgagtggaacctgctgagcgaccagcagaggggcctgtacatggaggtgatgaaggagaactacgagcacctgatctacctgggctacgaggtgcccgtgatcctgagcctgctgcaggacggcggcggcatcagcagcgacgccggcagccagagcaagagccagcaggtggccgtggccgagggcagcaacgtgaacagcggcggcccaagcagcggcgcccctcctcccagcggcggcagcccagccggctccccaacctctaccgaggagggcacctctgagtccgccacccccgagagcggccctggcacctccaccgagcccagcgagggcagcgcacccggcagccctgccggcagccccacctccacagaggagggaaccagcaccgagcccagcgaaggcagcgccccaggcaccagcaccgagcctagtgagcaggagattaaacggatcaacaagatcagaagaagacttgtgaaagacagcaacaccaagaaggccggcaagacaggccccatgaaaaccctgctggttagagtgatgacacccgatctgagagagcggctggaaaacctgagaaagaagcctgaaaatatcccccagcccatcagcaatacatctagagccaacctgaataagctgctgaccgattacaccgaaatgaagaaggcgatcctgcatgtgtactgggaagagttccagaaggaccctgtgggcctgatgagccgggtggcccagcctgccagcaagaagatcgatcagaacaagctgaaacctgagatggacgagaagggcaacctgaccaccgccggctttgcctgctctcagtgtggccagcccctgttcgtgtacaagctggagcaggtgtctgagaagggcaaggcttacaccaactacttcggacggtgcaatgtggccgagcacgaaaagctgatcctgctggcccagctgaagcccgagaaggatagcgacgaagccgtgacatatagcctgggaaagtttgggcagagggccctggatttctacagcattcatgtgaccaaggagtccacccaccccgtgaagcccctggcccagatcgccggaaacagatacgcctccggacctgtgggaaaggccctgagcgacgcatgtatgggcacaatcgcctccttcctgtctaagtaccaggacatcatcatcgaacaccagaaggtggtgaagggcaaccagaagagactggagagcctgcgggagctggccggcaaggaaaacctggaataccctagcgtgaccctgccacctcagcctcacaccaaggagggcgttgatgcctacaacgaagtgatcgcccgggtgcgaatgtgggtgaacctgaacctgtggcagaagctgaagctaagcagagatgatgccaagcctctgctgagactgaagggattcccttcctttcctctggtcgagagacaggccaacgaagtggactggtgggacatggtgtgtaacgtgaagaagctgatcaacgagaaaaaggaggatggcaaggtgttttggcagaatctggctggctacaagagacaggaagccctgagaccatacctgagcagcgaggaagatcggaagaagggaaagaaattcgctcggtaccagctgggcgacctgctgctgcacctggaaaagaagcacggcgaggactggggaaaggtgtacgacgaggcctgggagcggattgacaagaaagtggaaggcctgagcaagcacatcaagctggaagaggaacggagaagcgaggacgcccagagcaaggccgccctgaccgactggctgcgggctaaggccagcttcgtgatcgagggcctgaaggaggccgacaaggacgagttctgcagatgcgagctgaagctgcagaagtggtacggggacctgcggggaaagcccttcgccatcgaagccgagaacagcatcctggacatcagcggcttcagcaagcagtacaactgtgccttcatctggcagaaggacggcgtgaagaagctgaacctgtacctgatcatcaactacttcaagggcggcaagctgcggttcaagaagatcaaacctgaagccttcgaagccaacagattctacaccgtgatcaacaaaaagagcggcgagatcgtgcccatggaggtgaacttcaacttcgacgaccccaacctgatcatcctgcctctggcctttggcaagagacagggcagagaattcatctggaacgacctgctgtccctggaaaccggcagcctgaagctggccaacggaagagtgatcgagaagacactgtacaacagaagaacccggcaggatgagcctgccctgttcgtggccctgaccttcgagcggcgggaggtcctggactcctccaatatcaaaccaatgaacctgatcggcgtggcaagaggcgaaaacatccccgccgtgatcgccctgaccgaccccgagggctgcccactgagccggtttaaggatagcctgggaaacccaacccacatcctgagaatcggcgagagctataaggagaagcagcggaccatccaggccaagaaggaggtggagcagcggagagccggcggctacagccggaagtacgccagcaaagccaagaatctggcagacgatatggtgagaaacaccgctagagatctgctgtactacgccgtgacccaggatgccatgctgatcttcgccaacctgagccggggcttcggccggcagggcaagcggaccttcatggccgagagacagtacacacggatggaggactggctgaccgccaagctggcctacgagggcctgagcaagacctacctgtccaagacactggcccagtacacctccaagacatgcagcaactgtgggtttaccatcaccagcgccgactacgacagggtgctggagaagctgaagaagacagcaacaggctggatgaccacaattaacggcaaggagctgaaggtggagggccagattacctactacaacagatacaagagacagaacgtagtcaaggacctgtccgtcgagctggatagactgagcgaagaatctgtgaacaacgacatctcctcctggacaaagggcagaagcggagaagctctgagcctcctgaagaaaagattctcccatagacccgtgcaggagaagttcgtgtgcctgaactgcggcttcgagacacacgcagccgagcaagccgccctgaacatcgccagatcctggctgttcctgcggagccaggagtacaagaaataccagacaaacaagacaaccggcaacaccgataagagagccttcgtcgagacctggcagtccttttaccggaagaagcttaaggaggtgtggaaacctgccgtgcggtctggcggatctggcggaggctccaccagccccaagaaaaagagaaaagtctaagctgccttctgcggggcttgccttctggccatgcccttcttctctcccttgcacctgtacctcttggtctttgaataaagcctgagtaggaaggctagcaaaaaaaaaaaaaaaaaaaaaaaaaaaaaaaaaaaaaaaaaaaaaaaaaaaaaaaaaaaaaaaaaaaaaaaaaaaaaaaa

SEQ ID NO: 12390 - RNA, 5785 nt, synthetic construct
  source 1..5785: mol_type = other RNA
aggaaataagagagaaaagaagagtaagaagaaatataagagccaccatggcccctaagaagaagcgtaaagtgagccggatggaacgcctcgtctacgaggtgcggcagaagtgcagaaacatcgaggacatctgcatctcctgcggatctctgaacgtgaccctggagcacccactgttcatcggcggcatgtgccagaactgtaaaaactgttttctggagtgtgcctatcaatacgacgatgacggctaccagagctactgcaccatctgttgcggcggaagagaggtgctgatgtgtggaaataacaactgctgccggtgcttctgcgtggaatgcgtggacctgctggtgggccccggcgccgcccaggccgctattaaggaagatccttggaactgctacatgtgcggccacaagggcacatacggcctgctgagacggagagaggactggcctagcagactgcagatgttcttcgccaataaccacgaccaggagttcgacccccctaaggtgtaccctcccgtccccgccgagaagagaaagcccatccgggtcctgagcctgttcgatggcatcgccaccggtctgctggtgctgaaggacctgggcatccaggtggataggtacattgcctccgaggtgtgcgaggactccatcaccgtgggaatggtgcgtcatcagggcaagatcatgtacgtgggcgacgtgcggagcgtgacacagaagcatatccaggagtggggccctttcgacctggtgatcggcggcagcccttgcaatgacctgagcatcgtgaacccagcccggaagggcctgtacgagggaaccggcagactgttcttcgagttttacagactgctgcacgacgcccggcctaaggaaggcgacgaccggcccttcttttggctgttcgagaatgtggtggccatgggagtcagcgacaagcgggatattagccggttcctggagagcaaccccgtgatgatcgatgccaaggaagtgagcgccgcccaccgggccagatacttctggggcaatctgcctggcatgaacagacccctggccagcaccgtgaacgacaagctggagctgcaggagtgcctggagcacggccggatcgccaagttcagcaaggtgagaaccatcaccacccgaagcaacagcatcaaacaaggcaaggaccagcactttcctgtgttcatgaacgagaaggaggacatcctgtggtgtaccgagatggagagagtgttcgggttcccagtccactacacagatgtcagcaacatgtctagactggccagacagagactgctgggaagaagctggtccgtccctgtgatcagacacctgttcgcccctctgaaggagtacttcgcctgcgtgagcagcggcaacagcaacgccaacagccggggccccagcttctctagcggcctggtgccactgtccctgagagggagccacatgggccccatggagatctacaaaaccgtgagcgcctggaagcggcagcctgtgcgcgtgctgagcctgtttcggaatatcgataaagtcctgaaaagcctgggattcctggagagcggctctggctccggcggtggcaccctgaagtacgtggaggatgtgacaaacgtggtcagacgggatgtggagaagtggggccccttcgatctggtgtacggcagcacccaacccctgggcagctcttgtgaccggtgccctggctggtacatgtttcagttccaccggatcctgcagtacgccctgccgagacaggagtcccagcggccattcttttggattttcatggacaacttgctgctgaccgaggatgaccaggaaactaccactcggttcctgcagaccgaagccgtgaccctgcaggacgtgagaggccgggactaccagaacgccatgcgggtgtggtccaacatccctggactgaaaagcaagcacgcacctctgacccctaaagaagaggagtacctgcaggcccaggtgcggagcagaagcaagctggacgcccctaaggtggatctgctggtgaagaattgcctcctgcccctgagagagtacttcaagtatttcagccagaatagtctgcccctgggaggcagcggcggcggcctggcccccgaggaccacggcagcagctacgagggcagcgtgagcttcagggacgtggccatcgacttcagcagggaggagtggaggcacctggacctgagccagaggaacctgtacagggacgtgatgctggagacctacagccacctgctgagcgtgggctaccaggtgcccgaggccgaggtggtgatgctggagcagggcaacgagccctggagcctgcagggcgagaggccccaccagggcggcccaagcagcggcgcccctcctcccagcggcggcagcccagccggctccccaacctctaccgaggagggcacctctgagtccgccacccccgagagcggccctggcacctccaccgagcccagcgagggcagcgcacccggcagccctgccggcagccccacctccacagaggagggaaccagcaccgagcccagcgaaggcagcgccccaggcaccagcaccgagcctagtgagcaggagattaaacggatcaacaagatcagaagaagacttgtgaaagacagcaacaccaagaaggccggcaagacaggccccatgaaaaccctgctggttagagtgatgacacccgatctgagagagcggctggaaaacctgagaaagaagcctgaaaatatcccccagcccatcagcaatacatctagagccaacctgaataagctgctgaccgattacaccgaaatgaagaaggcgatcctgcatgtgtactgggaagagttccagaaggaccctgtgggcctgatgagccgggtggcccagcctgccagcaagaagatcgatcagaacaagctgaaacctgagatggacgagaagggcaacctgaccaccgccggctttgcctgctctcagtgtggccagcccctgttcgtgtacaagctggagcaggtgtctgagaagggcaaggcttacaccaactacttcggacggtgcaatgtggccgagcacgaaaagctgatcctgctggcccagctgaagcccgagaaggatagcgacgaagccgtgacatatagcctgggaaagtttgggcagagggccctggatttctacagcattcatgtgaccaaggagtccacccaccccgtgaagcccctggcccagatcgccggaaacagatacgcctccggacctgtgggaaaggccctgagcgacgcatgtatgggcacaatcgcctccttcctgtctaagtaccaggacatcatcatcgaacaccagaaggtggtgaagggcaaccagaagagactggagagcctgcgggagctggccggcaaggaaaacctggaataccctagcgtgaccctgccacctcagcctcacaccaaggagggcgttgatgcctacaacgaagtgatcgcccgggtgcgaatgtgggtgaacctgaacctgtggcagaagctgaagctaagcagagatgatgccaagcctctgctgagactgaagggattcccttcctttcctctggtcgagagacaggccaacgaagtggactggtgggacatggtgtgtaacgtgaagaagctgatcaacgagaaaaaggaggatggcaaggtgttttggcagaatctggctggctacaagagacaggaagccctgagaccatacctgagcagcgaggaagatcggaagaagggaaagaaattcgctcggtaccagctgggcgacctgctgctgcacctggaaaagaagcacggcgaggactggggaaaggtgtacgacgaggcctgggagcggattgacaagaaagtggaaggcctgagcaagcacatcaagctggaagaggaacggagaagcgaggacgcccagagcaaggccgccctgaccgactggctgcgggctaaggccagcttcgtgatcgagggcctgaaggaggccgacaaggacgagttctgcagatgcgagctgaagctgcagaagtggtacggggacctgcggggaaagcccttcgccatcgaagccgagaacagcatcctggacatcagcggcttcagcaagcagtacaactgtgccttcatctggcagaaggacggcgtgaagaagctgaacctgtacctgatcatcaactacttcaagggcggcaagctgcggttcaagaagatcaaacctgaagccttcgaagccaacagattctacaccgtgatcaacaaaaagagcggcgagatcgtgcccatggaggtgaacttcaacttcgacgaccccaacctgatcatcctgcctctggcctttggcaagagacagggcagagaattcatctggaacgacctgctgtccctggaaaccggcagcctgaagctggccaacggaagagtgatcgagaagacactgtacaacagaagaacccggcaggatgagcctgccctgttcgtggccctgaccttcgagcggcgggaggtcctggactcctccaatatcaaaccaatgaacctgatcggcgtggcaagaggcgaaaacatccccgccgtgatcgccctgaccgaccccgagggctgcccactgagccggtttaaggatagcctgggaaacccaacccacatcctgagaatcggcgagagctataaggagaagcagcggaccatccaggccaagaaggaggtggagcagcggagagccggcggctacagccggaagtacgccagcaaagccaagaatctggcagacgatatggtgagaaacaccgctagagatctgctgtactacgccgtgacccaggatgccatgctgatcttcgccaacctgagccggggcttcggccggcagggcaagcggaccttcatggccgagagacagtacacacggatggaggactggctgaccgccaagctggcctacgagggcctgagcaagacctacctgtccaagacactggcccagtacacctccaagacatgcagcaactgtgggtttaccatcaccagcgccgactacgacagggtgctggagaagctgaagaagacagcaacaggctggatgaccacaattaacggcaaggagctgaaggtggagggccagattacctactacaacagatacaagagacagaacgtagtcaaggacctgtccgtcgagctggatagactgagcgaagaatctgtgaacaacgacatctcctcctggacaaagggcagaagcggagaagctctgagcctcctgaagaaaagattctcccatagacccgtgcaggagaagttcgtgtgcctgaactgcggcttcgagacacacgcagccgagcaagccgccctgaacatcgccagatcctggctgttcctgcggagccaggagtacaagaaataccagacaaacaagacaaccggcaacaccgataagagagccttcgtcgagacctggcagtccttttaccggaagaagcttaaggaggtgtggaaacctgccgtgcggtctggcggatctggcggaggctccaccagccccaagaaaaagagaaaagtctaagctgccttctgcggggcttgccttctggccatgcccttcttctctcccttgcacctgtacctcttggtctttgaataaagcctgagtaggaaggctagcaaaaaaaaaaaaaaaaaaaaaaaaaaaaaaaaaaaaaaaaaaaaaaaaaaaaaaaaaaaaaaaaaaaaaaaaaaaaaaaa

SEQ ID NO: 12391 - RNA, 5785 nt, synthetic construct
  source 1..5785: mol_type = other RNA
aggaaataagagagaaaagaagagtaagaagaaatataagagccaccatggcccctaagaagaagcgtaaagtgagccggatggaacgcctcgtctacgaggtgcggcagaagtgcagaaacatcgaggacatctgcatctcctgcggatctctgaacgtgaccctggagcacccactgttcatcggcggcatgtgccagaactgtaaaaactgttttctggagtgtgcctatcaatacgacgatgacggctaccagagctactgcaccatctgttgcggcggaagagaggtgctgatgtgtggaaataacaactgctgccggtgcttctgcgtggaatgcgtggacctgctggtgggccccggcgccgcccaggccgctattaaggaagatccttggaactgctacatgtgcggccacaagggcacatacggcctgctgagacggagagaggactggcctagcagactgcagatgttcttcgccaataaccacgaccaggagttcgacccccctaaggtgtaccctcccgtccccgccgagaagagaaagcccatccgggtcctgagcctgttcgatggcatcgccaccggtctgctggtgctgaaggacctgggcatccaggtggataggtacattgcctccgaggtgtgcgaggactccatcaccgtgggaatggtgcgtcatcagggcaagatcatgtacgtgggcgacgtgcggagcgtgacacagaagcatatccaggagtggggccctttcgacctggtgatcggcggcagcccttgcaatgacctgagcatcgtgaacccagcccggaagggcctgtacgagggaaccggcagactgttcttcgagttttacagactgctgcacgacgcccggcctaaggaaggcgacgaccggcccttcttttggctgttcgagaatgtggtggccatgggagtcagcgacaagcgggatattagccggttcctggagagcaaccccgtgatgatcgatgccaaggaagtgagcgccgcccaccgggccagatacttctggggcaatctgcctggcatgaacagacccctggccagcaccgtgaacgacaagctggagctgcaggagtgcctggagcacggccggatcgccaagttcagcaaggtgagaaccatcaccacccgaagcaacagcatcaaacaaggcaaggaccagcactttcctgtgttcatgaacgagaaggaggacatcctgtggtgtaccgagatggagagagtgttcgggttcccagtccactacacagatgtcagcaacatgtctagactggccagacagagactgctgggaagaagctggtccgtccctgtgatcagacacctgttcgcccctctgaaggagtacttcgcctgcgtgagcagcggcaacagcaacgccaacagccggggccccagcttctctagcggcctggtgccactgtccctgagagggagccacatgggccccatggagatctacaaaaccgtgagcgcctggaagcggcagcctgtgcgcgtgctgagcctgtttcggaatatcgataaagtcctgaaaagcctgggattcctggagagcggctctggctccggcggtggcaccctgaagtacgtggaggatgtgacaaacgtggtcagacgggatgtggagaagtggggccccttcgatctggtgtacggcagcacccaacccctgggcagctcttgtgaccggtgccctggctggtacatgtttcagttccaccggatcctgcagtacgccctgccgagacaggagtcccagcggccattcttttggattttcatggacaacttgctgctgaccgaggatgaccaggaaactaccactcggttcctgcagaccgaagccgtgaccctgcaggacgtgagaggccgggactaccagaacgccatgcgggtgtggtccaacatccctggactgaaaagcaagcacgcacctctgacccctaaagaagaggagtacctgcaggcccaggtgcggagcagaagcaagctggacgcccctaaggtggatctgctggtgaagaattgcctcctgcccctgagagagtacttcaagtatttcagccagaatagtctgcccctgggaggcagcggcggcggcagcaaggtgcccgtgaccttcggcgacctggccatctacttcagccaggaggagtgggagtggctgagccccatccagaaggacctgtacgaggacgtgatgctggagaactaccagaacctggtgagcgtgggcctgagcttcaggaggcccaacgtgatcaccctgctggagaagggcagggccccctggatggtggagcccgtgaggaagaggaggggcatggacagcggcagcaagtgcggcggcccaagcagcggcgcccctcctcccagcggcggcagcccagccggctccccaacctctaccgaggagggcacctctgagtccgccacccccgagagcggccctggcacctccaccgagcccagcgagggcagcgcacccggcagccctgccggcagccccacctccacagaggagggaaccagcaccgagcccagcgaaggcagcgccccaggcaccagcaccgagcctagtgagcaggagattaaacggatcaacaagatcagaagaagacttgtgaaagacagcaacaccaagaaggccggcaagacaggccccatgaaaaccctgctggttagagtgatgacacccgatctgagagagcggctggaaaacctgagaaagaagcctgaaaatatcccccagcccatcagcaatacatctagagccaacctgaataagctgctgaccgattacaccgaaatgaagaaggcgatcctgcatgtgtactgggaagagttccagaaggaccctgtgggcctgatgagccgggtggcccagcctgccagcaagaagatcgatcagaacaagctgaaacctgagatggacgagaagggcaacctgaccaccgccggctttgcctgctctcagtgtggccagcccctgttcgtgtacaagctggagcaggtgtctgagaagggcaaggcttacaccaactacttcggacggtgcaatgtggccgagcacgaaaagctgatcctgctggcccagctgaagcccgagaaggatagcgacgaagccgtgacatatagcctgggaaagtttgggcagagggccctggatttctacagcattcatgtgaccaaggagtccacccaccccgtgaagcccctggcccagatcgccggaaacagatacgcctccggacctgtgggaaaggccctgagcgacgcatgtatgggcacaatcgcctccttcctgtctaagtaccaggacatcatcatcgaacaccagaaggtggtgaagggcaaccagaagagactggagagcctgcgggagctggccggcaaggaaaacctggaataccctagcgtgaccctgccacctcagcctcacaccaaggagggcgttgatgcctacaacgaagtgatcgcccgggtgcgaatgtgggtgaacctgaacctgtggcagaagctgaagctaagcagagatgatgccaagcctctgctgagactgaagggattcccttcctttcctctggtcgagagacaggccaacgaagtggactggtgggacatggtgtgtaacgtgaagaagctgatcaacgagaaaaaggaggatggcaaggtgttttggcagaatctggctggctacaagagacaggaagccctgagaccatacctgagcagcgaggaagatcggaagaagggaaagaaattcgctcggtaccagctgggcgacctgctgctgcacctggaaaagaagcacggcgaggactggggaaaggtgtacgacgaggcctgggagcggattgacaagaaagtggaaggcctgagcaagcacatcaagctggaagaggaacggagaagcgaggacgcccagagcaaggccgccctgaccgactggctgcgggctaaggccagcttcgtgatcgagggcctgaaggaggccgacaaggacgagttctgcagatgcgagctgaagctgcagaagtggtacggggacctgcggggaaagcccttcgccatcgaagccgagaacagcatcctggacatcagcggcttcagcaagcagtacaactgtgccttcatctggcagaaggacggcgtgaagaagctgaacctgtacctgatcatcaactacttcaagggcggcaagctgcggttcaagaagatcaaacctgaagccttcgaagccaacagattctacaccgtgatcaacaaaaagagcggcgagatcgtgcccatggaggtgaacttcaacttcgacgaccccaacctgatcatcctgcctctggcctttggcaagagacagggcagagaattcatctggaacgacctgctgtccctggaaaccggcagcctgaagctggccaacggaagagtgatcgagaagacactgtacaacagaagaacccggcaggatgagcctgccctgttcgtggccctgaccttcgagcggcgggaggtcctggactcctccaatatcaaaccaatgaacctgatcggcgtggcaagaggcgaaaacatccccgccgtgatcgccctgaccgaccccgagggctgcccactgagccggtttaaggatagcctgggaaacccaacccacatcctgagaatcggcgagagctataaggagaagcagcggaccatccaggccaagaaggaggtggagcagcggagagccggcggctacagccggaagtacgccagcaaagccaagaatctggcagacgatatggtgagaaacaccgctagagatctgctgtactacgccgtgacccaggatgccatgctgatcttcgccaacctgagccggggcttcggccggcagggcaagcggaccttcatggccgagagacagtacacacggatggaggactggctgaccgccaagctggcctacgagggcctgagcaagacctacctgtccaagacactggcccagtacacctccaagacatgcagcaactgtgggtttaccatcaccagcgccgactacgacagggtgctggagaagctgaagaagacagcaacaggctggatgaccacaattaacggcaaggagctgaaggtggagggccagattacctactacaacagatacaagagacagaacgtagtcaaggacctgtccgtcgagctggatagactgagcgaagaatctgtgaacaacgacatctcctcctggacaaagggcagaagcggagaagctctgagcctcctgaagaaaagattctcccatagacccgtgcaggagaagttcgtgtgcctgaactgcggcttcgagacacacgcagccgagcaagccgccctgaacatcgccagatcctggctgttcctgcggagccaggagtacaagaaataccagacaaacaagacaaccggcaacaccgataagagagccttcgtcgagacctggcagtccttttaccggaagaagcttaaggaggtgtggaaacctgccgtgcggtctggcggatctggcggaggctccaccagccccaagaaaaagagaaaagtctaagctgccttctgcggggcttgccttctggccatgcccttcttctctcccttgcacctgtacctcttggtctttgaataaagcctgagtaggaaggctagcaaaaaaaaaaaaaaaaaaaaaaaaaaaaaaaaaaaaaaaaaaaaaaaaaaaaaaaaaaaaaaaaaaaaaaaaaaaaaaaa

SEQ ID NO: 12392 - RNA, 5785 nt, synthetic construct
  source 1..5785: mol_type = other RNA
aggaaataagagagaaaagaagagtaagaagaaatataagagccaccatggcccctaagaagaagcgtaaagtgagccggatggaacgcctcgtctacgaggtgcggcagaagtgcagaaacatcgaggacatctgcatctcctgcggatctctgaacgtgaccctggagcacccactgttcatcggcggcatgtgccagaactgtaaaaactgttttctggagtgtgcctatcaatacgacgatgacggctaccagagctactgcaccatctgttgcggcggaagagaggtgctgatgtgtggaaataacaactgctgccggtgcttctgcgtggaatgcgtggacctgctggtgggccccggcgccgcccaggccgctattaaggaagatccttggaactgctacatgtgcggccacaagggcacatacggcctgctgagacggagagaggactggcctagcagactgcagatgttcttcgccaataaccacgaccaggagttcgacccccctaaggtgtaccctcccgtccccgccgagaagagaaagcccatccgggtcctgagcctgttcgatggcatcgccaccggtctgctggtgctgaaggacctgggcatccaggtggataggtacattgcctccgaggtgtgcgaggactccatcaccgtgggaatggtgcgtcatcagggcaagatcatgtacgtgggcgacgtgcggagcgtgacacagaagcatatccaggagtggggccctttcgacctggtgatcggcggcagcccttgcaatgacctgagcatcgtgaacccagcccggaagggcctgtacgagggaaccggcagactgttcttcgagttttacagactgctgcacgacgcccggcctaaggaaggcgacgaccggcccttcttttggctgttcgagaatgtggtggccatgggagtcagcgacaagcgggatattagccggttcctggagagcaaccccgtgatgatcgatgccaaggaagtgagcgccgcccaccgggccagatacttctggggcaatctgcctggcatgaacagacccctggccagcaccgtgaacgacaagctggagctgcaggagtgcctggagcacggccggatcgccaagttcagcaaggtgagaaccatcaccacccgaagcaacagcatcaaacaaggcaaggaccagcactttcctgtgttcatgaacgagaaggaggacatcctgtggtgtaccgagatggagagagtgttcgggttcccagtccactacacagatgtcagcaacatgtctagactggccagacagagactgctgggaagaagctggtccgtccctgtgatcagacacctgttcgcccctctgaaggagtacttcgcctgcgtgagcagcggcaacagcaacgccaacagccggggccccagcttctctagcggcctggtgccactgtccctgagagggagccacatgggccccatggagatctacaaaaccgtgagcgcctggaagcggcagcctgtgcgcgtgctgagcctgtttcggaatatcgataaagtcctgaaaagcctgggattcctggagagcggctctggctccggcggtggcaccctgaagtacgtggaggatgtgacaaacgtggtcagacgggatgtggagaagtggggccccttcgatctggtgtacggcagcacccaacccctgggcagctcttgtgaccggtgccctggctggtacatgtttcagttccaccggatcctgcagtacgccctgccgagacaggagtcccagcggccattcttttggattttcatggacaacttgctgctgaccgaggatgaccaggaaactaccactcggttcctgcagaccgaagccgtgaccctgcaggacgtgagaggccgggactaccagaacgccatgcgggtgtggtccaacatccctggactgaaaagcaagcacgcacctctgacccctaaagaagaggagtacctgcaggcccaggtgcggagcagaagcaagctggacgcccctaaggtggatctgctggtgaagaattgcctcctgcccctgagagagtacttcaagtatttcagccagaatagtctgcccctgggaggcagcggcggcggcagcgtggccttcgaggacgtggccgtgaacttcacccaggaggagtgggccctgctgagccccagccagaagaacctgtacagggacgtgatgctggagaccttcaggaacctggccagcgtgggcatccagtggaaggaccagaacatcgagaacctgtaccagaacctgggcatcaagctgaggagcctggtggagaggctgtgcggcccccaggagggcagcgagcacagggagaccttcggcggcccaagcagcggcgcccctcctcccagcggcggcagcccagccggctccccaacctctaccgaggagggcacctctgagtccgccacccccgagagcggccctggcacctccaccgagcccagcgagggcagcgcacccggcagccctgccggcagccccacctccacagaggagggaaccagcaccgagcccagcgaaggcagcgccccaggcaccagcaccgagcctagtgagcaggagattaaacggatcaacaagatcagaagaagacttgtgaaagacagcaacaccaagaaggccggcaagacaggccccatgaaaaccctgctggttagagtgatgacacccgatctgagagagcggctggaaaacctgagaaagaagcctgaaaatatcccccagcccatcagcaatacatctagagccaacctgaataagctgctgaccgattacaccgaaatgaagaaggcgatcctgcatgtgtactgggaagagttccagaaggaccctgtgggcctgatgagccgggtggcccagcctgccagcaagaagatcgatcagaacaagctgaaacctgagatggacgagaagggcaacctgaccaccgccggctttgcctgctctcagtgtggccagcccctgttcgtgtacaagctggagcaggtgtctgagaagggcaaggcttacaccaactacttcggacggtgcaatgtggccgagcacgaaaagctgatcctgctggcccagctgaagcccgagaaggatagcgacgaagccgtgacatatagcctgggaaagtttgggcagagggccctggatttctacagcattcatgtgaccaaggagtccacccaccccgtgaagcccctggcccagatcgccggaaacagatacgcctccggacctgtgggaaaggccctgagcgacgcatgtatgggcacaatcgcctccttcctgtctaagtaccaggacatcatcatcgaacaccagaaggtggtgaagggcaaccagaagagactggagagcctgcgggagctggccggcaaggaaaacctggaataccctagcgtgaccctgccacctcagcctcacaccaaggagggcgttgatgcctacaacgaagtgatcgcccgggtgcgaatgtgggtgaacctgaacctgtggcagaagctgaagctaagcagagatgatgccaagcctctgctgagactgaagggattcccttcctttcctctggtcgagagacaggccaacgaagtggactggtgggacatggtgtgtaacgtgaagaagctgatcaacgagaaaaaggaggatggcaaggtgttttggcagaatctggctggctacaagagacaggaagccctgagaccatacctgagcagcgaggaagatcggaagaagggaaagaaattcgctcggtaccagctgggcgacctgctgctgcacctggaaaagaagcacggcgaggactggggaaaggtgtacgacgaggcctgggagcggattgacaagaaagtggaaggcctgagcaagcacatcaagctggaagaggaacggagaagcgaggacgcccagagcaaggccgccctgaccgactggctgcgggctaaggccagcttcgtgatcgagggcctgaaggaggccgacaaggacgagttctgcagatgcgagctgaagctgcagaagtggtacggggacctgcggggaaagcccttcgccatcgaagccgagaacagcatcctggacatcagcggcttcagcaagcagtacaactgtgccttcatctggcagaaggacggcgtgaagaagctgaacctgtacctgatcatcaactacttcaagggcggcaagctgcggttcaagaagatcaaacctgaagccttcgaagccaacagattctacaccgtgatcaacaaaaagagcggcgagatcgtgcccatggaggtgaacttcaacttcgacgaccccaacctgatcatcctgcctctggcctttggcaagagacagggcagagaattcatctggaacgacctgctgtccctggaaaccggcagcctgaagctggccaacggaagagtgatcgagaagacactgtacaacagaagaacccggcaggatgagcctgccctgttcgtggccctgaccttcgagcggcgggaggtcctggactcctccaatatcaaaccaatgaacctgatcggcgtggcaagaggcgaaaacatccccgccgtgatcgccctgaccgaccccgagggctgcccactgagccggtttaaggatagcctgggaaacccaacccacatcctgagaatcggcgagagctataaggagaagcagcggaccatccaggccaagaaggaggtggagcagcggagagccggcggctacagccggaagtacgccagcaaagccaagaatctggcagacgatatggtgagaaacaccgctagagatctgctgtactacgccgtgacccaggatgccatgctgatcttcgccaacctgagccggggcttcggccggcagggcaagcggaccttcatggccgagagacagtacacacggatggaggactggctgaccgccaagctggcctacgagggcctgagcaagacctacctgtccaagacactggcccagtacacctccaagacatgcagcaactgtgggtttaccatcaccagcgccgactacgacagggtgctggagaagctgaagaagacagcaacaggctggatgaccacaattaacggcaaggagctgaaggtggagggccagattacctactacaacagatacaagagacagaacgtagtcaaggacctgtccgtcgagctggatagactgagcgaagaatctgtgaacaacgacatctcctcctggacaaagggcagaagcggagaagctctgagcctcctgaagaaaagattctcccatagacccgtgcaggagaagttcgtgtgcctgaactgcggcttcgagacacacgcagccgagcaagccgccctgaacatcgccagatcctggctgttcctgcggagccaggagtacaagaaataccagacaaacaagacaaccggcaacaccgataagagagccttcgtcgagacctggcagtccttttaccggaagaagcttaaggaggtgtggaaacctgccgtgcggtctggcggatctggcggaggctccaccagccccaagaaaaagagaaaagtctaagctgccttctgcggggcttgccttctggccatgcccttcttctctcccttgcacctgtacctcttggtctttgaataaagcctgagtaggaaggctagcaaaaaaaaaaaaaaaaaaaaaaaaaaaaaaaaaaaaaaaaaaaaaaaaaaaaaaaaaaaaaaaaaaaaaaaaaaaaaaaa

SEQ ID NO: 12393 - RNA, 5785 nt, synthetic construct
  source 1..5785: mol_type = other RNA
aggaaataagagagaaaagaagagtaagaagaaatataagagccaccatggcccctaagaagaagcgtaaagtgagccggatggaacgcctcgtctacgaggtgcggcagaagtgcagaaacatcgaggacatctgcatctcctgcggatctctgaacgtgaccctggagcacccactgttcatcggcggcatgtgccagaactgtaaaaactgttttctggagtgtgcctatcaatacgacgatgacggctaccagagctactgcaccatctgttgcggcggaagagaggtgctgatgtgtggaaataacaactgctgccggtgcttctgcgtggaatgcgtggacctgctggtgggccccggcgccgcccaggccgctattaaggaagatccttggaactgctacatgtgcggccacaagggcacatacggcctgctgagacggagagaggactggcctagcagactgcagatgttcttcgccaataaccacgaccaggagttcgacccccctaaggtgtaccctcccgtccccgccgagaagagaaagcccatccgggtcctgagcctgttcgatggcatcgccaccggtctgctggtgctgaaggacctgggcatccaggtggataggtacattgcctccgaggtgtgcgaggactccatcaccgtgggaatggtgcgtcatcagggcaagatcatgtacgtgggcgacgtgcggagcgtgacacagaagcatatccaggagtggggccctttcgacctggtgatcggcggcagcccttgcaatgacctgagcatcgtgaacccagcccggaagggcctgtacgagggaaccggcagactgttcttcgagttttacagactgctgcacgacgcccggcctaaggaaggcgacgaccggcccttcttttggctgttcgagaatgtggtggccatgggagtcagcgacaagcgggatattagccggttcctggagagcaaccccgtgatgatcgatgccaaggaagtgagcgccgcccaccgggccagatacttctggggcaatctgcctggcatgaacagacccctggccagcaccgtgaacgacaagctggagctgcaggagtgcctggagcacggccggatcgccaagttcagcaaggtgagaaccatcaccacccgaagcaacagcatcaaacaaggcaaggaccagcactttcctgtgttcatgaacgagaaggaggacatcctgtggtgtaccgagatggagagagtgttcgggttcccagtccactacacagatgtcagcaacatgtctagactggccagacagagactgctgggaagaagctggtccgtccctgtgatcagacacctgttcgcccctctgaaggagtacttcgcctgcgtgagcagcggcaacagcaacgccaacagccggggccccagcttctctagcggcctggtgccactgtccctgagagggagccacatgggccccatggagatctacaaaaccgtgagcgcctggaagcggcagcctgtgcgcgtgctgagcctgtttcggaatatcgataaagtcctgaaaagcctgggattcctggagagcggctctggctccggcggtggcaccctgaagtacgtggaggatgtgacaaacgtggtcagacgggatgtggagaagtggggccccttcgatctggtgtacggcagcacccaacccctgggcagctcttgtgaccggtgccctggctggtacatgtttcagttccaccggatcctgcagtacgccctgccgagacaggagtcccagcggccattcttttggattttcatggacaacttgctgctgaccgaggatgaccaggaaactaccactcggttcctgcagaccgaagccgtgaccctgcaggacgtgagaggccgggactaccagaacgccatgcgggtgtggtccaacatccctggactgaaaagcaagcacgcacctctgacccctaaagaagaggagtacctgcaggcccaggtgcggagcagaagcaagctggacgcccctaaggtggatctgctggtgaagaattgcctcctgcccctgagagagtacttcaagtatttcagccagaatagtctgcccctgggaggcagcggcggcggcagccagagcctggtgaccttcggcgacgtggccgtggagttcagccccgaggagtgggcctggctggacagcgcccagaggagcctgtacaggagcgtgatgctggagaactacaggagcctggtgagcctgggcctgtgcgtgagcaagcccaagatgatcagcagcctggagcagaggaaggagccctgggccgccaagaggaccctgaccaggggcggctgccccgacagcagggccctgggcggcccaagcagcggcgcccctcctcccagcggcggcagcccagccggctccccaacctctaccgaggagggcacctctgagtccgccacccccgagagcggccctggcacctccaccgagcccagcgagggcagcgcacccggcagccctgccggcagccccacctccacagaggagggaaccagcaccgagcccagcgaaggcagcgccccaggcaccagcaccgagcctagtgagcaggagattaaacggatcaacaagatcagaagaagacttgtgaaagacagcaacaccaagaaggccggcaagacaggccccatgaaaaccctgctggttagagtgatgacacccgatctgagagagcggctggaaaacctgagaaagaagcctgaaaatatcccccagcccatcagcaatacatctagagccaacctgaataagctgctgaccgattacaccgaaatgaagaaggcgatcctgcatgtgtactgggaagagttccagaaggaccctgtgggcctgatgagccgggtggcccagcctgccagcaagaagatcgatcagaacaagctgaaacctgagatggacgagaagggcaacctgaccaccgccggctttgcctgctctcagtgtggccagcccctgttcgtgtacaagctggagcaggtgtctgagaagggcaaggcttacaccaactacttcggacggtgcaatgtggccgagcacgaaaagctgatcctgctggcccagctgaagcccgagaaggatagcgacgaagccgtgacatatagcctgggaaagtttgggcagagggccctggatttctacagcattcatgtgaccaaggagtccacccaccccgtgaagcccctggcccagatcgccggaaacagatacgcctccggacctgtgggaaaggccctgagcgacgcatgtatgggcacaatcgcctccttcctgtctaagtaccaggacatcatcatcgaacaccagaaggtggtgaagggcaaccagaagagactggagagcctgcgggagctggccggcaaggaaaacctggaataccctagcgtgaccctgccacctcagcctcacaccaaggagggcgttgatgcctacaacgaagtgatcgcccgggtgcgaatgtgggtgaacctgaacctgtggcagaagctgaagctaagcagagatgatgccaagcctctgctgagactgaagggattcccttcctttcctctggtcgagagacaggccaacgaagtggactggtgggacatggtgtgtaacgtgaagaagctgatcaacgagaaaaaggaggatggcaaggtgttttggcagaatctggctggctacaagagacaggaagccctgagaccatacctgagcagcgaggaagatcggaagaagggaaagaaattcgctcggtaccagctgggcgacctgctgctgcacctggaaaagaagcacggcgaggactggggaaaggtgtacgacgaggcctgggagcggattgacaagaaagtggaaggcctgagcaagcacatcaagctggaagaggaacggagaagcgaggacgcccagagcaaggccgccctgaccgactggctgcgggctaaggccagcttcgtgatcgagggcctgaaggaggccgacaaggacgagttctgcagatgcgagctgaagctgcagaagtggtacggggacctgcggggaaagcccttcgccatcgaagccgagaacagcatcctggacatcagcggcttcagcaagcagtacaactgtgccttcatctggcagaaggacggcgtgaagaagctgaacctgtacctgatcatcaactacttcaagggcggcaagctgcggttcaagaagatcaaacctgaagccttcgaagccaacagattctacaccgtgatcaacaaaaagagcggcgagatcgtgcccatggaggtgaacttcaacttcgacgaccccaacctgatcatcctgcctctggcctttggcaagagacagggcagagaattcatctggaacgacctgctgtccctggaaaccggcagcctgaagctggccaacggaagagtgatcgagaagacactgtacaacagaagaacccggcaggatgagcctgccctgttcgtggccctgaccttcgagcggcgggaggtcctggactcctccaatatcaaaccaatgaacctgatcggcgtggcaagaggcgaaaacatccccgccgtgatcgccctgaccgaccccgagggctgcccactgagccggtttaaggatagcctgggaaacccaacccacatcctgagaatcggcgagagctataaggagaagcagcggaccatccaggccaagaaggaggtggagcagcggagagccggcggctacagccggaagtacgccagcaaagccaagaatctggcagacgatatggtgagaaacaccgctagagatctgctgtactacgccgtgacccaggatgccatgctgatcttcgccaacctgagccggggcttcggccggcagggcaagcggaccttcatggccgagagacagtacacacggatggaggactggctgaccgccaagctggcctacgagggcctgagcaagacctacctgtccaagacactggcccagtacacctccaagacatgcagcaactgtgggtttaccatcaccagcgccgactacgacagggtgctggagaagctgaagaagacagcaacaggctggatgaccacaattaacggcaaggagctgaaggtggagggccagattacctactacaacagatacaagagacagaacgtagtcaaggacctgtccgtcgagctggatagactgagcgaagaatctgtgaacaacgacatctcctcctggacaaagggcagaagcggagaagctctgagcctcctgaagaaaagattctcccatagacccgtgcaggagaagttcgtgtgcctgaactgcggcttcgagacacacgcagccgagcaagccgccctgaacatcgccagatcctggctgttcctgcggagccaggagtacaagaaataccagacaaacaagacaaccggcaacaccgataagagagccttcgtcgagacctggcagtccttttaccggaagaagcttaaggaggtgtggaaacctgccgtgcggtctggcggatctggcggaggctccaccagccccaagaaaaagagaaaagtctaagctgccttctgcggggcttgccttctggccatgcccttcttctctcccttgcacctgtacctcttggtctttgaataaagcctgagtaggaaggctagcaaaaaaaaaaaaaaaaaaaaaaaaaaaaaaaaaaaaaaaaaaaaaaaaaaaaaaaaaaaaaaaaaaaaaaaaaaaaaaaa

SEQ ID NO: 12394 - RNA, 5785 nt, synthetic construct
  source 1..5785: mol_type = other RNA
aggaaataagagagaaaagaagagtaagaagaaatataagagccaccatggcccctaagaagaagcgtaaagtgagccggatggaacgcctcgtctacgaggtgcggcagaagtgcagaaacatcgaggacatctgcatctcctgcggatctctgaacgtgaccctggagcacccactgttcatcggcggcatgtgccagaactgtaaaaactgttttctggagtgtgcctatcaatacgacgatgacggctaccagagctactgcaccatctgttgcggcggaagagaggtgctgatgtgtggaaataacaactgctgccggtgcttctgcgtggaatgcgtggacctgctggtgggccccggcgccgcccaggccgctattaaggaagatccttggaactgctacatgtgcggccacaagggcacatacggcctgctgagacggagagaggactggcctagcagactgcagatgttcttcgccaataaccacgaccaggagttcgacccccctaaggtgtaccctcccgtccccgccgagaagagaaagcccatccgggtcctgagcctgttcgatggcatcgccaccggtctgctggtgctgaaggacctgggcatccaggtggataggtacattgcctccgaggtgtgcgaggactccatcaccgtgggaatggtgcgtcatcagggcaagatcatgtacgtgggcgacgtgcggagcgtgacacagaagcatatccaggagtggggccctttcgacctggtgatcggcggcagcccttgcaatgacctgagcatcgtgaacccagcccggaagggcctgtacgagggaaccggcagactgttcttcgagttttacagactgctgcacgacgcccggcctaaggaaggcgacgaccggcccttcttttggctgttcgagaatgtggtggccatgggagtcagcgacaagcgggatattagccggttcctggagagcaaccccgtgatgatcgatgccaaggaagtgagcgccgcccaccgggccagatacttctggggcaatctgcctggcatgaacagacccctggccagcaccgtgaacgacaagctggagctgcaggagtgcctggagcacggccggatcgccaagttcagcaaggtgagaaccatcaccacccgaagcaacagcatcaaacaaggcaaggaccagcactttcctgtgttcatgaacgagaaggaggacatcctgtggtgtaccgagatggagagagtgttcgggttcccagtccactacacagatgtcagcaacatgtctagactggccagacagagactgctgggaagaagctggtccgtccctgtgatcagacacctgttcgcccctctgaaggagtacttcgcctgcgtgagcagcggcaacagcaacgccaacagccggggccccagcttctctagcggcctggtgccactgtccctgagagggagccacatgggccccatggagatctacaaaaccgtgagcgcctggaagcggcagcctgtgcgcgtgctgagcctgtttcggaatatcgataaagtcctgaaaagcctgggattcctggagagcggctctggctccggcggtggcaccctgaagtacgtggaggatgtgacaaacgtggtcagacgggatgtggagaagtggggccccttcgatctggtgtacggcagcacccaacccctgggcagctcttgtgaccggtgccctggctggtacatgtttcagttccaccggatcctgcagtacgccctgccgagacaggagtcccagcggccattcttttggattttcatggacaacttgctgctgaccgaggatgaccaggaaactaccactcggttcctgcagaccgaagccgtgaccctgcaggacgtgagaggccgggactaccagaacgccatgcgggtgtggtccaacatccctggactgaaaagcaagcacgcacctctgacccctaaagaagaggagtacctgcaggcccaggtgcggagcagaagcaagctggacgcccctaaggtggatctgctggtgaagaattgcctcctgcccctgagagagtacttcaagtatttcagccagaatagtctgcccctgggaggcagcggcggcggcgagcaggtgaccttcaaggacgtggccatcgagttcagcaagaccgagtggaagaggctggaccccgcccagagggccctgtacagggaggtgatgctggagaactacaggaacctggtgagcgtgggcaccagcccccccgacgtgaccgtgatcagcatgctggagcagggcgaggagccctggaccgccgagagcagggtgcagaggcccgaggtgcccggcggcagggagtggacccagggcggcccaagcagcggcgcccctcctcccagcggcggcagcccagccggctccccaacctctaccgaggagggcacctctgagtccgccacccccgagagcggccctggcacctccaccgagcccagcgagggcagcgcacccggcagccctgccggcagccccacctccacagaggagggaaccagcaccgagcccagcgaaggcagcgccccaggcaccagcaccgagcctagtgagcaggagattaaacggatcaacaagatcagaagaagacttgtgaaagacagcaacaccaagaaggccggcaagacaggccccatgaaaaccctgctggttagagtgatgacacccgatctgagagagcggctggaaaacctgagaaagaagcctgaaaatatcccccagcccatcagcaatacatctagagccaacctgaataagctgctgaccgattacaccgaaatgaagaaggcgatcctgcatgtgtactgggaagagttccagaaggaccctgtgggcctgatgagccgggtggcccagcctgccagcaagaagatcgatcagaacaagctgaaacctgagatggacgagaagggcaacctgaccaccgccggctttgcctgctctcagtgtggccagcccctgttcgtgtacaagctggagcaggtgtctgagaagggcaaggcttacaccaactacttcggacggtgcaatgtggccgagcacgaaaagctgatcctgctggcccagctgaagcccgagaaggatagcgacgaagccgtgacatatagcctgggaaagtttgggcagagggccctggatttctacagcattcatgtgaccaaggagtccacccaccccgtgaagcccctggcccagatcgccggaaacagatacgcctccggacctgtgggaaaggccctgagcgacgcatgtatgggcacaatcgcctccttcctgtctaagtaccaggacatcatcatcgaacaccagaaggtggtgaagggcaaccagaagagactggagagcctgcgggagctggccggcaaggaaaacctggaataccctagcgtgaccctgccacctcagcctcacaccaaggagggcgttgatgcctacaacgaagtgatcgcccgggtgcgaatgtgggtgaacctgaacctgtggcagaagctgaagctaagcagagatgatgccaagcctctgctgagactgaagggattcccttcctttcctctggtcgagagacaggccaacgaagtggactggtgggacatggtgtgtaacgtgaagaagctgatcaacgagaaaaaggaggatggcaaggtgttttggcagaatctggctggctacaagagacaggaagccctgagaccatacctgagcagcgaggaagatcggaagaagggaaagaaattcgctcggtaccagctgggcgacctgctgctgcacctggaaaagaagcacggcgaggactggggaaaggtgtacgacgaggcctgggagcggattgacaagaaagtggaaggcctgagcaagcacatcaagctggaagaggaacggagaagcgaggacgcccagagcaaggccgccctgaccgactggctgcgggctaaggccagcttcgtgatcgagggcctgaaggaggccgacaaggacgagttctgcagatgcgagctgaagctgcagaagtggtacggggacctgcggggaaagcccttcgccatcgaagccgagaacagcatcctggacatcagcggcttcagcaagcagtacaactgtgccttcatctggcagaaggacggcgtgaagaagctgaacctgtacctgatcatcaactacttcaagggcggcaagctgcggttcaagaagatcaaacctgaagccttcgaagccaacagattctacaccgtgatcaacaaaaagagcggcgagatcgtgcccatggaggtgaacttcaacttcgacgaccccaacctgatcatcctgcctctggcctttggcaagagacagggcagagaattcatctggaacgacctgctgtccctggaaaccggcagcctgaagctggccaacggaagagtgatcgagaagacactgtacaacagaagaacccggcaggatgagcctgccctgttcgtggccctgaccttcgagcggcgggaggtcctggactcctccaatatcaaaccaatgaacctgatcggcgtggcaagaggcgaaaacatccccgccgtgatcgccctgaccgaccccgagggctgcccactgagccggtttaaggatagcctgggaaacccaacccacatcctgagaatcggcgagagctataaggagaagcagcggaccatccaggccaagaaggaggtggagcagcggagagccggcggctacagccggaagtacgccagcaaagccaagaatctggcagacgatatggtgagaaacaccgctagagatctgctgtactacgccgtgacccaggatgccatgctgatcttcgccaacctgagccggggcttcggccggcagggcaagcggaccttcatggccgagagacagtacacacggatggaggactggctgaccgccaagctggcctacgagggcctgagcaagacctacctgtccaagacactggcccagtacacctccaagacatgcagcaactgtgggtttaccatcaccagcgccgactacgacagggtgctggagaagctgaagaagacagcaacaggctggatgaccacaattaacggcaaggagctgaaggtggagggccagattacctactacaacagatacaagagacagaacgtagtcaaggacctgtccgtcgagctggatagactgagcgaagaatctgtgaacaacgacatctcctcctggacaaagggcagaagcggagaagctctgagcctcctgaagaaaagattctcccatagacccgtgcaggagaagttcgtgtgcctgaactgcggcttcgagacacacgcagccgagcaagccgccctgaacatcgccagatcctggctgttcctgcggagccaggagtacaagaaataccagacaaacaagacaaccggcaacaccgataagagagccttcgtcgagacctggcagtccttttaccggaagaagcttaaggaggtgtggaaacctgccgtgcggtctggcggatctggcggaggctccaccagccccaagaaaaagagaaaagtctaagctgccttctgcggggcttgccttctggccatgcccttcttctctcccttgcacctgtacctcttggtctttgaataaagcctgagtaggaaggctagcaaaaaaaaaaaaaaaaaaaaaaaaaaaaaaaaaaaaaaaaaaaaaaaaaaaaaaaaaaaaaaaaaaaaaaaaaaaaaaaa

SEQ ID NO: 12395 - RNA, 5785 nt, synthetic construct
  source 1..5785: mol_type = other RNA
aggaaataagagagaaaagaagagtaagaagaaatataagagccaccatggcccctaagaagaagcgtaaagtgagccggatggaacgcctcgtctacgaggtgcggcagaagtgcagaaacatcgaggacatctgcatctcctgcggatctctgaacgtgaccctggagcacccactgttcatcggcggcatgtgccagaactgtaaaaactgttttctggagtgtgcctatcaatacgacgatgacggctaccagagctactgcaccatctgttgcggcggaagagaggtgctgatgtgtggaaataacaactgctgccggtgcttctgcgtggaatgcgtggacctgctggtgggccccggcgccgcccaggccgctattaaggaagatccttggaactgctacatgtgcggccacaagggcacatacggcctgctgagacggagagaggactggcctagcagactgcagatgttcttcgccaataaccacgaccaggagttcgacccccctaaggtgtaccctcccgtccccgccgagaagagaaagcccatccgggtcctgagcctgttcgatggcatcgccaccggtctgctggtgctgaaggacctgggcatccaggtggataggtacattgcctccgaggtgtgcgaggactccatcaccgtgggaatggtgcgtcatcagggcaagatcatgtacgtgggcgacgtgcggagcgtgacacagaagcatatccaggagtggggccctttcgacctggtgatcggcggcagcccttgcaatgacctgagcatcgtgaacccagcccggaagggcctgtacgagggaaccggcagactgttcttcgagttttacagactgctgcacgacgcccggcctaaggaaggcgacgaccggcccttcttttggctgttcgagaatgtggtggccatgggagtcagcgacaagcgggatattagccggttcctggagagcaaccccgtgatgatcgatgccaaggaagtgagcgccgcccaccgggccagatacttctggggcaatctgcctggcatgaacagacccctggccagcaccgtgaacgacaagctggagctgcaggagtgcctggagcacggccggatcgccaagttcagcaaggtgagaaccatcaccacccgaagcaacagcatcaaacaaggcaaggaccagcactttcctgtgttcatgaacgagaaggaggacatcctgtggtgtaccgagatggagagagtgttcgggttcccagtccactacacagatgtcagcaacatgtctagactggccagacagagactgctgggaagaagctggtccgtccctgtgatcagacacctgttcgcccctctgaaggagtacttcgcctgcgtgagcagcggcaacagcaacgccaacagccggggccccagcttctctagcggcctggtgccactgtccctgagagggagccacatgggccccatggagatctacaaaaccgtgagcgcctggaagcggcagcctgtgcgcgtgctgagcctgtttcggaatatcgataaagtcctgaaaagcctgggattcctggagagcggctctggctccggcggtggcaccctgaagtacgtggaggatgtgacaaacgtggtcagacgggatgtggagaagtggggccccttcgatctggtgtacggcagcacccaacccctgggcagctcttgtgaccggtgccctggctggtacatgtttcagttccaccggatcctgcagtacgccctgccgagacaggagtcccagcggccattcttttggattttcatggacaacttgctgctgaccgaggatgaccaggaaactaccactcggttcctgcagaccgaagccgtgaccctgcaggacgtgagaggccgggactaccagaacgccatgcgggtgtggtccaacatccctggactgaaaagcaagcacgcacctctgacccctaaagaagaggagtacctgcaggcccaggtgcggagcagaagcaagctggacgcccctaaggtggatctgctggtgaagaattgcctcctgcccctgagagagtacttcaagtatttcagccagaatagtctgcccctgggaggcagcggcggcggcgccagggccagcctgagcttcgaggacgtggccgtgggcttcagctgggaggagtggcagctgctggcccccagccagaaggacctgtacagggaggtgatgctggagaactacaggaacctggtgagcgtgggctaccaggccagcaagcccgacagcctgttccacctggagcagggcgagcccccctggaccgtggtgggcgccgcccagagccagacctgccaggagatctgggagatcggcggcccaagcagcggcgcccctcctcccagcggcggcagcccagccggctccccaacctctaccgaggagggcacctctgagtccgccacccccgagagcggccctggcacctccaccgagcccagcgagggcagcgcacccggcagccctgccggcagccccacctccacagaggagggaaccagcaccgagcccagcgaaggcagcgccccaggcaccagcaccgagcctagtgagcaggagattaaacggatcaacaagatcagaagaagacttgtgaaagacagcaacaccaagaaggccggcaagacaggccccatgaaaaccctgctggttagagtgatgacacccgatctgagagagcggctggaaaacctgagaaagaagcctgaaaatatcccccagcccatcagcaatacatctagagccaacctgaataagctgctgaccgattacaccgaaatgaagaaggcgatcctgcatgtgtactgggaagagttccagaaggaccctgtgggcctgatgagccgggtggcccagcctgccagcaagaagatcgatcagaacaagctgaaacctgagatggacgagaagggcaacctgaccaccgccggctttgcctgctctcagtgtggccagcccctgttcgtgtacaagctggagcaggtgtctgagaagggcaaggcttacaccaactacttcggacggtgcaatgtggccgagcacgaaaagctgatcctgctggcccagctgaagcccgagaaggatagcgacgaagccgtgacatatagcctgggaaagtttgggcagagggccctggatttctacagcattcatgtgaccaaggagtccacccaccccgtgaagcccctggcccagatcgccggaaacagatacgcctccggacctgtgggaaaggccctgagcgacgcatgtatgggcacaatcgcctccttcctgtctaagtaccaggacatcatcatcgaacaccagaaggtggtgaagggcaaccagaagagactggagagcctgcgggagctggccggcaaggaaaacctggaataccctagcgtgaccctgccacctcagcctcacaccaaggagggcgttgatgcctacaacgaagtgatcgcccgggtgcgaatgtgggtgaacctgaacctgtggcagaagctgaagctaagcagagatgatgccaagcctctgctgagactgaagggattcccttcctttcctctggtcgagagacaggccaacgaagtggactggtgggacatggtgtgtaacgtgaagaagctgatcaacgagaaaaaggaggatggcaaggtgttttggcagaatctggctggctacaagagacaggaagccctgagaccatacctgagcagcgaggaagatcggaagaagggaaagaaattcgctcggtaccagctgggcgacctgctgctgcacctggaaaagaagcacggcgaggactggggaaaggtgtacgacgaggcctgggagcggattgacaagaaagtggaaggcctgagcaagcacatcaagctggaagaggaacggagaagcgaggacgcccagagcaaggccgccctgaccgactggctgcgggctaaggccagcttcgtgatcgagggcctgaaggaggccgacaaggacgagttctgcagatgcgagctgaagctgcagaagtggtacggggacctgcggggaaagcccttcgccatcgaagccgagaacagcatcctggacatcagcggcttcagcaagcagtacaactgtgccttcatctggcagaaggacggcgtgaagaagctgaacctgtacctgatcatcaactacttcaagggcggcaagctgcggttcaagaagatcaaacctgaagccttcgaagccaacagattctacaccgtgatcaacaaaaagagcggcgagatcgtgcccatggaggtgaacttcaacttcgacgaccccaacctgatcatcctgcctctggcctttggcaagagacagggcagagaattcatctggaacgacctgctgtccctggaaaccggcagcctgaagctggccaacggaagagtgatcgagaagacactgtacaacagaagaacccggcaggatgagcctgccctgttcgtggccctgaccttcgagcggcgggaggtcctggactcctccaatatcaaaccaatgaacctgatcggcgtggcaagaggcgaaaacatccccgccgtgatcgccctgaccgaccccgagggctgcccactgagccggtttaaggatagcctgggaaacccaacccacatcctgagaatcggcgagagctataaggagaagcagcggaccatccaggccaagaaggaggtggagcagcggagagccggcggctacagccggaagtacgccagcaaagccaagaatctggcagacgatatggtgagaaacaccgctagagatctgctgtactacgccgtgacccaggatgccatgctgatcttcgccaacctgagccggggcttcggccggcagggcaagcggaccttcatggccgagagacagtacacacggatggaggactggctgaccgccaagctggcctacgagggcctgagcaagacctacctgtccaagacactggcccagtacacctccaagacatgcagcaactgtgggtttaccatcaccagcgccgactacgacagggtgctggagaagctgaagaagacagcaacaggctggatgaccacaattaacggcaaggagctgaaggtggagggccagattacctactacaacagatacaagagacagaacgtagtcaaggacctgtccgtcgagctggatagactgagcgaagaatctgtgaacaacgacatctcctcctggacaaagggcagaagcggagaagctctgagcctcctgaagaaaagattctcccatagacccgtgcaggagaagttcgtgtgcctgaactgcggcttcgagacacacgcagccgagcaagccgccctgaacatcgccagatcctggctgttcctgcggagccaggagtacaagaaataccagacaaacaagacaaccggcaacaccgataagagagccttcgtcgagacctggcagtccttttaccggaagaagcttaaggaggtgtggaaacctgccgtgcggtctggcggatctggcggaggctccaccagccccaagaaaaagagaaaagtctaagctgccttctgcggggcttgccttctggccatgcccttcttctctcccttgcacctgtacctcttggtctttgaataaagcctgagtaggaaggctagcaaaaaaaaaaaaaaaaaaaaaaaaaaaaaaaaaaaaaaaaaaaaaaaaaaaaaaaaaaaaaaaaaaaaaaaaaaaaaaaa

SEQ ID NO: 12396 - RNA, 5785 nt, synthetic construct
  source 1..5785: mol_type = other RNA
aggaaataagagagaaaagaagagtaagaagaaatataagagccaccatggcccctaagaagaagcgtaaagtgagccggatggaacgcctcgtctacgaggtgcggcagaagtgcagaaacatcgaggacatctgcatctcctgcggatctctgaacgtgaccctggagcacccactgttcatcggcggcatgtgccagaactgtaaaaactgttttctggagtgtgcctatcaatacgacgatgacggctaccagagctactgcaccatctgttgcggcggaagagaggtgctgatgtgtggaaataacaactgctgccggtgcttctgcgtggaatgcgtggacctgctggtgggccccggcgccgcccaggccgctattaaggaagatccttggaactgctacatgtgcggccacaagggcacatacggcctgctgagacggagagaggactggcctagcagactgcagatgttcttcgccaataaccacgaccaggagttcgacccccctaaggtgtaccctcccgtccccgccgagaagagaaagcccatccgggtcctgagcctgttcgatggcatcgccaccggtctgctggtgctgaaggacctgggcatccaggtggataggtacattgcctccgaggtgtgcgaggactccatcaccgtgggaatggtgcgtcatcagggcaagatcatgtacgtgggcgacgtgcggagcgtgacacagaagcatatccaggagtggggccctttcgacctggtgatcggcggcagcccttgcaatgacctgagcatcgtgaacccagcccggaagggcctgtacgagggaaccggcagactgttcttcgagttttacagactgctgcacgacgcccggcctaaggaaggcgacgaccggcccttcttttggctgttcgagaatgtggtggccatgggagtcagcgacaagcgggatattagccggttcctggagagcaaccccgtgatgatcgatgccaaggaagtgagcgccgcccaccgggccagatacttctggggcaatctgcctggcatgaacagacccctggccagcaccgtgaacgacaagctggagctgcaggagtgcctggagcacggccggatcgccaagttcagcaaggtgagaaccatcaccacccgaagcaacagcatcaaacaaggcaaggaccagcactttcctgtgttcatgaacgagaaggaggacatcctgtggtgtaccgagatggagagagtgttcgggttcccagtccactacacagatgtcagcaacatgtctagactggccagacagagactgctgggaagaagctggtccgtccctgtgatcagacacctgttcgcccctctgaaggagtacttcgcctgcgtgagcagcggcaacagcaacgccaacagccggggccccagcttctctagcggcctggtgccactgtccctgagagggagccacatgggccccatggagatctacaaaaccgtgagcgcctggaagcggcagcctgtgcgcgtgctgagcctgtttcggaatatcgataaagtcctgaaaagcctgggattcctggagagcggctctggctccggcggtggcaccctgaagtacgtggaggatgtgacaaacgtggtcagacgggatgtggagaagtggggccccttcgatctggtgtacggcagcacccaacccctgggcagctcttgtgaccggtgccctggctggtacatgtttcagttccaccggatcctgcagtacgccctgccgagacaggagtcccagcggccattcttttggattttcatggacaacttgctgctgaccgaggatgaccaggaaactaccactcggttcctgcagaccgaagccgtgaccctgcaggacgtgagaggccgggactaccagaacgccatgcgggtgtggtccaacatccctggactgaaaagcaagcacgcacctctgacccctaaagaagaggagtacctgcaggcccaggtgcggagcagaagcaagctggacgcccctaaggtggatctgctggtgaagaattgcctcctgcccctgagagagtacttcaagtatttcagccagaatagtctgcccctgggaggcagcggcggcggcatggccttcgaggacgtggccgtgtacttcagccaggaggagtggatgttcctggacgccgcccagagggccctgtacaggcacgtgatgctggagaacttcgccctggtggacagcatcggcctgagcgtgagcaggcccagggtgatcatccagctgcagaggggcgaggagccctgggtgcccaacaggaccaaccccggccccggcaggagcacctgcaggaggcccagcctgggcagcggcggcccaagcagcggcgcccctcctcccagcggcggcagcccagccggctccccaacctctaccgaggagggcacctctgagtccgccacccccgagagcggccctggcacctccaccgagcccagcgagggcagcgcacccggcagccctgccggcagccccacctccacagaggagggaaccagcaccgagcccagcgaaggcagcgccccaggcaccagcaccgagcctagtgagcaggagattaaacggatcaacaagatcagaagaagacttgtgaaagacagcaacaccaagaaggccggcaagacaggccccatgaaaaccctgctggttagagtgatgacacccgatctgagagagcggctggaaaacctgagaaagaagcctgaaaatatcccccagcccatcagcaatacatctagagccaacctgaataagctgctgaccgattacaccgaaatgaagaaggcgatcctgcatgtgtactgggaagagttccagaaggaccctgtgggcctgatgagccgggtggcccagcctgccagcaagaagatcgatcagaacaagctgaaacctgagatggacgagaagggcaacctgaccaccgccggctttgcctgctctcagtgtggccagcccctgttcgtgtacaagctggagcaggtgtctgagaagggcaaggcttacaccaactacttcggacggtgcaatgtggccgagcacgaaaagctgatcctgctggcccagctgaagcccgagaaggatagcgacgaagccgtgacatatagcctgggaaagtttgggcagagggccctggatttctacagcattcatgtgaccaaggagtccacccaccccgtgaagcccctggcccagatcgccggaaacagatacgcctccggacctgtgggaaaggccctgagcgacgcatgtatgggcacaatcgcctccttcctgtctaagtaccaggacatcatcatcgaacaccagaaggtggtgaagggcaaccagaagagactggagagcctgcgggagctggccggcaaggaaaacctggaataccctagcgtgaccctgccacctcagcctcacaccaaggagggcgttgatgcctacaacgaagtgatcgcccgggtgcgaatgtgggtgaacctgaacctgtggcagaagctgaagctaagcagagatgatgccaagcctctgctgagactgaagggattcccttcctttcctctggtcgagagacaggccaacgaagtggactggtgggacatggtgtgtaacgtgaagaagctgatcaacgagaaaaaggaggatggcaaggtgttttggcagaatctggctggctacaagagacaggaagccctgagaccatacctgagcagcgaggaagatcggaagaagggaaagaaattcgctcggtaccagctgggcgacctgctgctgcacctggaaaagaagcacggcgaggactggggaaaggtgtacgacgaggcctgggagcggattgacaagaaagtggaaggcctgagcaagcacatcaagctggaagaggaacggagaagcgaggacgcccagagcaaggccgccctgaccgactggctgcgggctaaggccagcttcgtgatcgagggcctgaaggaggccgacaaggacgagttctgcagatgcgagctgaagctgcagaagtggtacggggacctgcggggaaagcccttcgccatcgaagccgagaacagcatcctggacatcagcggcttcagcaagcagtacaactgtgccttcatctggcagaaggacggcgtgaagaagctgaacctgtacctgatcatcaactacttcaagggcggcaagctgcggttcaagaagatcaaacctgaagccttcgaagccaacagattctacaccgtgatcaacaaaaagagcggcgagatcgtgcccatggaggtgaacttcaacttcgacgaccccaacctgatcatcctgcctctggcctttggcaagagacagggcagagaattcatctggaacgacctgctgtccctggaaaccggcagcctgaagctggccaacggaagagtgatcgagaagacactgtacaacagaagaacccggcaggatgagcctgccctgttcgtggccctgaccttcgagcggcgggaggtcctggactcctccaatatcaaaccaatgaacctgatcggcgtggcaagaggcgaaaacatccccgccgtgatcgccctgaccgaccccgagggctgcccactgagccggtttaaggatagcctgggaaacccaacccacatcctgagaatcggcgagagctataaggagaagcagcggaccatccaggccaagaaggaggtggagcagcggagagccggcggctacagccggaagtacgccagcaaagccaagaatctggcagacgatatggtgagaaacaccgctagagatctgctgtactacgccgtgacccaggatgccatgctgatcttcgccaacctgagccggggcttcggccggcagggcaagcggaccttcatggccgagagacagtacacacggatggaggactggctgaccgccaagctggcctacgagggcctgagcaagacctacctgtccaagacactggcccagtacacctccaagacatgcagcaactgtgggtttaccatcaccagcgccgactacgacagggtgctggagaagctgaagaagacagcaacaggctggatgaccacaattaacggcaaggagctgaaggtggagggccagattacctactacaacagatacaagagacagaacgtagtcaaggacctgtccgtcgagctggatagactgagcgaagaatctgtgaacaacgacatctcctcctggacaaagggcagaagcggagaagctctgagcctcctgaagaaaagattctcccatagacccgtgcaggagaagttcgtgtgcctgaactgcggcttcgagacacacgcagccgagcaagccgccctgaacatcgccagatcctggctgttcctgcggagccaggagtacaagaaataccagacaaacaagacaaccggcaacaccgataagagagccttcgtcgagacctggcagtccttttaccggaagaagcttaaggaggtgtggaaacctgccgtgcggtctggcggatctggcggaggctccaccagccccaagaaaaagagaaaagtctaagctgccttctgcggggcttgccttctggccatgcccttcttctctcccttgcacctgtacctcttggtctttgaataaagcctgagtaggaaggctagcaaaaaaaaaaaaaaaaaaaaaaaaaaaaaaaaaaaaaaaaaaaaaaaaaaaaaaaaaaaaaaaaaaaaaaaaaaaaaaaa

SEQ ID NO: 12397 - RNA, 5785 nt, synthetic construct
  source 1..5785: mol_type = other RNA
aggaaataagagagaaaagaagagtaagaagaaatataagagccaccatggcccctaagaagaagcgtaaagtgagccggatggaacgcctcgtctacgaggtgcggcagaagtgcagaaacatcgaggacatctgcatctcctgcggatctctgaacgtgaccctggagcacccactgttcatcggcggcatgtgccagaactgtaaaaactgttttctggagtgtgcctatcaatacgacgatgacggctaccagagctactgcaccatctgttgcggcggaagagaggtgctgatgtgtggaaataacaactgctgccggtgcttctgcgtggaatgcgtggacctgctggtgggccccggcgccgcccaggccgctattaaggaagatccttggaactgctacatgtgcggccacaagggcacatacggcctgctgagacggagagaggactggcctagcagactgcagatgttcttcgccaataaccacgaccaggagttcgacccccctaaggtgtaccctcccgtccccgccgagaagagaaagcccatccgggtcctgagcctgttcgatggcatcgccaccggtctgctggtgctgaaggacctgggcatccaggtggataggtacattgcctccgaggtgtgcgaggactccatcaccgtgggaatggtgcgtcatcagggcaagatcatgtacgtgggcgacgtgcggagcgtgacacagaagcatatccaggagtggggccctttcgacctggtgatcggcggcagcccttgcaatgacctgagcatcgtgaacccagcccggaagggcctgtacgagggaaccggcagactgttcttcgagttttacagactgctgcacgacgcccggcctaaggaaggcgacgaccggcccttcttttggctgttcgagaatgtggtggccatgggagtcagcgacaagcgggatattagccggttcctggagagcaaccccgtgatgatcgatgccaaggaagtgagcgccgcccaccgggccagatacttctggggcaatctgcctggcatgaacagacccctggccagcaccgtgaacgacaagctggagctgcaggagtgcctggagcacggccggatcgccaagttcagcaaggtgagaaccatcaccacccgaagcaacagcatcaaacaaggcaaggaccagcactttcctgtgttcatgaacgagaaggaggacatcctgtggtgtaccgagatggagagagtgttcgggttcccagtccactacacagatgtcagcaacatgtctagactggccagacagagactgctgggaagaagctggtccgtccctgtgatcagacacctgttcgcccctctgaaggagtacttcgcctgcgtgagcagcggcaacagcaacgccaacagccggggccccagcttctctagcggcctggtgccactgtccctgagagggagccacatgggccccatggagatctacaaaaccgtgagcgcctggaagcggcagcctgtgcgcgtgctgagcctgtttcggaatatcgataaagtcctgaaaagcctgggattcctggagagcggctctggctccggcggtggcaccctgaagtacgtggaggatgtgacaaacgtggtcagacgggatgtggagaagtggggccccttcgatctggtgtacggcagcacccaacccctgggcagctcttgtgaccggtgccctggctggtacatgtttcagttccaccggatcctgcagtacgccctgccgagacaggagtcccagcggccattcttttggattttcatggacaacttgctgctgaccgaggatgaccaggaaactaccactcggttcctgcagaccgaagccgtgaccctgcaggacgtgagaggccgggactaccagaacgccatgcgggtgtggtccaacatccctggactgaaaagcaagcacgcacctctgacccctaaagaagaggagtacctgcaggcccaggtgcggagcagaagcaagctggacgcccctaaggtggatctgctggtgaagaattgcctcctgcccctgagagagtacttcaagtatttcagccagaatagtctgcccctgggaggcagcggcggcggcatgagccagggcagcgtgaccttcagggacgtggccatcgacttcagccaggaggagtggaagtggctgcagcccgcccagagggacctgtacaggtgcgtgatgctggagaactacggccacctggtgagcctgggcctgagcatcagcaagcccgacgtggtgagcctgctggagcagggcaaggagccctggctgggcaagagggaggtgaagagggacctgttcagcggctggagcgccggcggcccaagcagcggcgcccctcctcccagcggcggcagcccagccggctccccaacctctaccgaggagggcacctctgagtccgccacccccgagagcggccctggcacctccaccgagcccagcgagggcagcgcacccggcagccctgccggcagccccacctccacagaggagggaaccagcaccgagcccagcgaaggcagcgccccaggcaccagcaccgagcctagtgagcaggagattaaacggatcaacaagatcagaagaagacttgtgaaagacagcaacaccaagaaggccggcaagacaggccccatgaaaaccctgctggttagagtgatgacacccgatctgagagagcggctggaaaacctgagaaagaagcctgaaaatatcccccagcccatcagcaatacatctagagccaacctgaataagctgctgaccgattacaccgaaatgaagaaggcgatcctgcatgtgtactgggaagagttccagaaggaccctgtgggcctgatgagccgggtggcccagcctgccagcaagaagatcgatcagaacaagctgaaacctgagatggacgagaagggcaacctgaccaccgccggctttgcctgctctcagtgtggccagcccctgttcgtgtacaagctggagcaggtgtctgagaagggcaaggcttacaccaactacttcggacggtgcaatgtggccgagcacgaaaagctgatcctgctggcccagctgaagcccgagaaggatagcgacgaagccgtgacatatagcctgggaaagtttgggcagagggccctggatttctacagcattcatgtgaccaaggagtccacccaccccgtgaagcccctggcccagatcgccggaaacagatacgcctccggacctgtgggaaaggccctgagcgacgcatgtatgggcacaatcgcctccttcctgtctaagtaccaggacatcatcatcgaacaccagaaggtggtgaagggcaaccagaagagactggagagcctgcgggagctggccggcaaggaaaacctggaataccctagcgtgaccctgccacctcagcctcacaccaaggagggcgttgatgcctacaacgaagtgatcgcccgggtgcgaatgtgggtgaacctgaacctgtggcagaagctgaagctaagcagagatgatgccaagcctctgctgagactgaagggattcccttcctttcctctggtcgagagacaggccaacgaagtggactggtgggacatggtgtgtaacgtgaagaagctgatcaacgagaaaaaggaggatggcaaggtgttttggcagaatctggctggctacaagagacaggaagccctgagaccatacctgagcagcgaggaagatcggaagaagggaaagaaattcgctcggtaccagctgggcgacctgctgctgcacctggaaaagaagcacggcgaggactggggaaaggtgtacgacgaggcctgggagcggattgacaagaaagtggaaggcctgagcaagcacatcaagctggaagaggaacggagaagcgaggacgcccagagcaaggccgccctgaccgactggctgcgggctaaggccagcttcgtgatcgagggcctgaaggaggccgacaaggacgagttctgcagatgcgagctgaagctgcagaagtggtacggggacctgcggggaaagcccttcgccatcgaagccgagaacagcatcctggacatcagcggcttcagcaagcagtacaactgtgccttcatctggcagaaggacggcgtgaagaagctgaacctgtacctgatcatcaactacttcaagggcggcaagctgcggttcaagaagatcaaacctgaagccttcgaagccaacagattctacaccgtgatcaacaaaaagagcggcgagatcgtgcccatggaggtgaacttcaacttcgacgaccccaacctgatcatcctgcctctggcctttggcaagagacagggcagagaattcatctggaacgacctgctgtccctggaaaccggcagcctgaagctggccaacggaagagtgatcgagaagacactgtacaacagaagaacccggcaggatgagcctgccctgttcgtggccctgaccttcgagcggcgggaggtcctggactcctccaatatcaaaccaatgaacctgatcggcgtggcaagaggcgaaaacatccccgccgtgatcgccctgaccgaccccgagggctgcccactgagccggtttaaggatagcctgggaaacccaacccacatcctgagaatcggcgagagctataaggagaagcagcggaccatccaggccaagaaggaggtggagcagcggagagccggcggctacagccggaagtacgccagcaaagccaagaatctggcagacgatatggtgagaaacaccgctagagatctgctgtactacgccgtgacccaggatgccatgctgatcttcgccaacctgagccggggcttcggccggcagggcaagcggaccttcatggccgagagacagtacacacggatggaggactggctgaccgccaagctggcctacgagggcctgagcaagacctacctgtccaagacactggcccagtacacctccaagacatgcagcaactgtgggtttaccatcaccagcgccgactacgacagggtgctggagaagctgaagaagacagcaacaggctggatgaccacaattaacggcaaggagctgaaggtggagggccagattacctactacaacagatacaagagacagaacgtagtcaaggacctgtccgtcgagctggatagactgagcgaagaatctgtgaacaacgacatctcctcctggacaaagggcagaagcggagaagctctgagcctcctgaagaaaagattctcccatagacccgtgcaggagaagttcgtgtgcctgaactgcggcttcgagacacacgcagccgagcaagccgccctgaacatcgccagatcctggctgttcctgcggagccaggagtacaagaaataccagacaaacaagacaaccggcaacaccgataagagagccttcgtcgagacctggcagtccttttaccggaagaagcttaaggaggtgtggaaacctgccgtgcggtctggcggatctggcggaggctccaccagccccaagaaaaagagaaaagtctaagctgccttctgcggggcttgccttctggccatgcccttcttctctcccttgcacctgtacctcttggtctttgaataaagcctgagtaggaaggctagcaaaaaaaaaaaaaaaaaaaaaaaaaaaaaaaaaaaaaaaaaaaaaaaaaaaaaaaaaaaaaaaaaaaaaaaaaaaaaaaa

SEQ ID NO: 12398 - RNA, 5785 nt, synthetic construct
  source 1..5785: mol_type = other RNA
aggaaataagagagaaaagaagagtaagaagaaatataagagccaccatggcccctaagaagaagcgtaaagtgagccggatggaacgcctcgtctacgaggtgcggcagaagtgcagaaacatcgaggacatctgcatctcctgcggatctctgaacgtgaccctggagcacccactgttcatcggcggcatgtgccagaactgtaaaaactgttttctggagtgtgcctatcaatacgacgatgacggctaccagagctactgcaccatctgttgcggcggaagagaggtgctgatgtgtggaaataacaactgctgccggtgcttctgcgtggaatgcgtggacctgctggtgggccccggcgccgcccaggccgctattaaggaagatccttggaactgctacatgtgcggccacaagggcacatacggcctgctgagacggagagaggactggcctagcagactgcagatgttcttcgccaataaccacgaccaggagttcgacccccctaaggtgtaccctcccgtccccgccgagaagagaaagcccatccgggtcctgagcctgttcgatggcatcgccaccggtctgctggtgctgaaggacctgggcatccaggtggataggtacattgcctccgaggtgtgcgaggactccatcaccgtgggaatggtgcgtcatcagggcaagatcatgtacgtgggcgacgtgcggagcgtgacacagaagcatatccaggagtggggccctttcgacctggtgatcggcggcagcccttgcaatgacctgagcatcgtgaacccagcccggaagggcctgtacgagggaaccggcagactgttcttcgagttttacagactgctgcacgacgcccggcctaaggaaggcgacgaccggcccttcttttggctgttcgagaatgtggtggccatgggagtcagcgacaagcgggatattagccggttcctggagagcaaccccgtgatgatcgatgccaaggaagtgagcgccgcccaccgggccagatacttctggggcaatctgcctggcatgaacagacccctggccagcaccgtgaacgacaagctggagctgcaggagtgcctggagcacggccggatcgccaagttcagcaaggtgagaaccatcaccacccgaagcaacagcatcaaacaaggcaaggaccagcactttcctgtgttcatgaacgagaaggaggacatcctgtggtgtaccgagatggagagagtgttcgggttcccagtccactacacagatgtcagcaacatgtctagactggccagacagagactgctgggaagaagctggtccgtccctgtgatcagacacctgttcgcccctctgaaggagtacttcgcctgcgtgagcagcggcaacagcaacgccaacagccggggccccagcttctctagcggcctggtgccactgtccctgagagggagccacatgggccccatggagatctacaaaaccgtgagcgcctggaagcggcagcctgtgcgcgtgctgagcctgtttcggaatatcgataaagtcctgaaaagcctgggattcctggagagcggctctggctccggcggtggcaccctgaagtacgtggaggatgtgacaaacgtggtcagacgggatgtggagaagtggggccccttcgatctggtgtacggcagcacccaacccctgggcagctcttgtgaccggtgccctggctggtacatgtttcagttccaccggatcctgcagtacgccctgccgagacaggagtcccagcggccattcttttggattttcatggacaacttgctgctgaccgaggatgaccaggaaactaccactcggttcctgcagaccgaagccgtgaccctgcaggacgtgagaggccgggactaccagaacgccatgcgggtgtggtccaacatccctggactgaaaagcaagcacgcacctctgacccctaaagaagaggagtacctgcaggcccaggtgcggagcagaagcaagctggacgcccctaaggtggatctgctggtgaagaattgcctcctgcccctgagagagtacttcaagtatttcagccagaatagtctgcccctgggaggcagcggcggcggcgcccaccacctggtgatgttcagggacgtggccgtggacttcagccaggaggagtgggagtgcctgaacccctaccagaggaacctgtacagggacgtgatcctggagaactacagcaacctggtgagcgtgggctgcagcatcagcaagcccgacgtgatcaccctgctggagcagggcaaggagccctggatggtggtgagggacgagaggaggaggagcctggacctggagagcaggtacggcggcccaagcagcggcgcccctcctcccagcggcggcagcccagccggctccccaacctctaccgaggagggcacctctgagtccgccacccccgagagcggccctggcacctccaccgagcccagcgagggcagcgcacccggcagccctgccggcagccccacctccacagaggagggaaccagcaccgagcccagcgaaggcagcgccccaggcaccagcaccgagcctagtgagcaggagattaaacggatcaacaagatcagaagaagacttgtgaaagacagcaacaccaagaaggccggcaagacaggccccatgaaaaccctgctggttagagtgatgacacccgatctgagagagcggctggaaaacctgagaaagaagcctgaaaatatcccccagcccatcagcaatacatctagagccaacctgaataagctgctgaccgattacaccgaaatgaagaaggcgatcctgcatgtgtactgggaagagttccagaaggaccctgtgggcctgatgagccgggtggcccagcctgccagcaagaagatcgatcagaacaagctgaaacctgagatggacgagaagggcaacctgaccaccgccggctttgcctgctctcagtgtggccagcccctgttcgtgtacaagctggagcaggtgtctgagaagggcaaggcttacaccaactacttcggacggtgcaatgtggccgagcacgaaaagctgatcctgctggcccagctgaagcccgagaaggatagcgacgaagccgtgacatatagcctgggaaagtttgggcagagggccctggatttctacagcattcatgtgaccaaggagtccacccaccccgtgaagcccctggcccagatcgccggaaacagatacgcctccggacctgtgggaaaggccctgagcgacgcatgtatgggcacaatcgcctccttcctgtctaagtaccaggacatcatcatcgaacaccagaaggtggtgaagggcaaccagaagagactggagagcctgcgggagctggccggcaaggaaaacctggaataccctagcgtgaccctgccacctcagcctcacaccaaggagggcgttgatgcctacaacgaagtgatcgcccgggtgcgaatgtgggtgaacctgaacctgtggcagaagctgaagctaagcagagatgatgccaagcctctgctgagactgaagggattcccttcctttcctctggtcgagagacaggccaacgaagtggactggtgggacatggtgtgtaacgtgaagaagctgatcaacgagaaaaaggaggatggcaaggtgttttggcagaatctggctggctacaagagacaggaagccctgagaccatacctgagcagcgaggaagatcggaagaagggaaagaaattcgctcggtaccagctgggcgacctgctgctgcacctggaaaagaagcacggcgaggactggggaaaggtgtacgacgaggcctgggagcggattgacaagaaagtggaaggcctgagcaagcacatcaagctggaagaggaacggagaagcgaggacgcccagagcaaggccgccctgaccgactggctgcgggctaaggccagcttcgtgatcgagggcctgaaggaggccgacaaggacgagttctgcagatgcgagctgaagctgcagaagtggtacggggacctgcggggaaagcccttcgccatcgaagccgagaacagcatcctggacatcagcggcttcagcaagcagtacaactgtgccttcatctggcagaaggacggcgtgaagaagctgaacctgtacctgatcatcaactacttcaagggcggcaagctgcggttcaagaagatcaaacctgaagccttcgaagccaacagattctacaccgtgatcaacaaaaagagcggcgagatcgtgcccatggaggtgaacttcaacttcgacgaccccaacctgatcatcctgcctctggcctttggcaagagacagggcagagaattcatctggaacgacctgctgtccctggaaaccggcagcctgaagctggccaacggaagagtgatcgagaagacactgtacaacagaagaacccggcaggatgagcctgccctgttcgtggccctgaccttcgagcggcgggaggtcctggactcctccaatatcaaaccaatgaacctgatcggcgtggcaagaggcgaaaacatccccgccgtgatcgccctgaccgaccccgagggctgcccactgagccggtttaaggatagcctgggaaacccaacccacatcctgagaatcggcgagagctataaggagaagcagcggaccatccaggccaagaaggaggtggagcagcggagagccggcggctacagccggaagtacgccagcaaagccaagaatctggcagacgatatggtgagaaacaccgctagagatctgctgtactacgccgtgacccaggatgccatgctgatcttcgccaacctgagccggggcttcggccggcagggcaagcggaccttcatggccgagagacagtacacacggatggaggactggctgaccgccaagctggcctacgagggcctgagcaagacctacctgtccaagacactggcccagtacacctccaagacatgcagcaactgtgggtttaccatcaccagcgccgactacgacagggtgctggagaagctgaagaagacagcaacaggctggatgaccacaattaacggcaaggagctgaaggtggagggccagattacctactacaacagatacaagagacagaacgtagtcaaggacctgtccgtcgagctggatagactgagcgaagaatctgtgaacaacgacatctcctcctggacaaagggcagaagcggagaagctctgagcctcctgaagaaaagattctcccatagacccgtgcaggagaagttcgtgtgcctgaactgcggcttcgagacacacgcagccgagcaagccgccctgaacatcgccagatcctggctgttcctgcggagccaggagtacaagaaataccagacaaacaagacaaccggcaacaccgataagagagccttcgtcgagacctggcagtccttttaccggaagaagcttaaggaggtgtggaaacctgccgtgcggtctggcggatctggcggaggctccaccagccccaagaaaaagagaaaagtctaagctgccttctgcggggcttgccttctggccatgcccttcttctctcccttgcacctgtacctcttggtctttgaataaagcctgagtaggaaggctagcaaaaaaaaaaaaaaaaaaaaaaaaaaaaaaaaaaaaaaaaaaaaaaaaaaaaaaaaaaaaaaaaaaaaaaaaaaaaaaaa

SEQ ID NO: 12399 - RNA, 5785 nt, synthetic construct
  source 1..5785: mol_type = other RNA
aggaaataagagagaaaagaagagtaagaagaaatataagagccaccatggcccctaagaagaagcgtaaagtgagccggatggaacgcctcgtctacgaggtgcggcagaagtgcagaaacatcgaggacatctgcatctcctgcggatctctgaacgtgaccctggagcacccactgttcatcggcggcatgtgccagaactgtaaaaactgttttctggagtgtgcctatcaatacgacgatgacggctaccagagctactgcaccatctgttgcggcggaagagaggtgctgatgtgtggaaataacaactgctgccggtgcttctgcgtggaatgcgtggacctgctggtgggccccggcgccgcccaggccgctattaaggaagatccttggaactgctacatgtgcggccacaagggcacatacggcctgctgagacggagagaggactggcctagcagactgcagatgttcttcgccaataaccacgaccaggagttcgacccccctaaggtgtaccctcccgtccccgccgagaagagaaagcccatccgggtcctgagcctgttcgatggcatcgccaccggtctgctggtgctgaaggacctgggcatccaggtggataggtacattgcctccgaggtgtgcgaggactccatcaccgtgggaatggtgcgtcatcagggcaagatcatgtacgtgggcgacgtgcggagcgtgacacagaagcatatccaggagtggggccctttcgacctggtgatcggcggcagcccttgcaatgacctgagcatcgtgaacccagcccggaagggcctgtacgagggaaccggcagactgttcttcgagttttacagactgctgcacgacgcccggcctaaggaaggcgacgaccggcccttcttttggctgttcgagaatgtggtggccatgggagtcagcgacaagcgggatattagccggttcctggagagcaaccccgtgatgatcgatgccaaggaagtgagcgccgcccaccgggccagatacttctggggcaatctgcctggcatgaacagacccctggccagcaccgtgaacgacaagctggagctgcaggagtgcctggagcacggccggatcgccaagttcagcaaggtgagaaccatcaccacccgaagcaacagcatcaaacaaggcaaggaccagcactttcctgtgttcatgaacgagaaggaggacatcctgtggtgtaccgagatggagagagtgttcgggttcccagtccactacacagatgtcagcaacatgtctagactggccagacagagactgctgggaagaagctggtccgtccctgtgatcagacacctgttcgcccctctgaaggagtacttcgcctgcgtgagcagcggcaacagcaacgccaacagccggggccccagcttctctagcggcctggtgccactgtccctgagagggagccacatgggccccatggagatctacaaaaccgtgagcgcctggaagcggcagcctgtgcgcgtgctgagcctgtttcggaatatcgataaagtcctgaaaagcctgggattcctggagagcggctctggctccggcggtggcaccctgaagtacgtggaggatgtgacaaacgtggtcagacgggatgtggagaagtggggccccttcgatctggtgtacggcagcacccaacccctgggcagctcttgtgaccggtgccctggctggtacatgtttcagttccaccggatcctgcagtacgccctgccgagacaggagtcccagcggccattcttttggattttcatggacaacttgctgctgaccgaggatgaccaggaaactaccactcggttcctgcagaccgaagccgtgaccctgcaggacgtgagaggccgggactaccagaacgccatgcgggtgtggtccaacatccctggactgaaaagcaagcacgcacctctgacccctaaagaagaggagtacctgcaggcccaggtgcggagcagaagcaagctggacgcccctaaggtggatctgctggtgaagaattgcctcctgcccctgagagagtacttcaagtatttcagccagaatagtctgcccctgggaggcagcggcggcggcccccaggagcccgtgaccttcgaggacgtggccgtgtacttcacccagaaccagtgggccagcctggaccccacccagagggccctgtacagggaggtgatgctggagaactacgccagcgtggccagcctggtgttccccttccccaagcccgacctggtgagccagctggagaggggcgaggccccctggggccccgacccctgggaggccgaggtgctgaggggcatctgccccggcggcggcggcccaagcagcggcgcccctcctcccagcggcggcagcccagccggctccccaacctctaccgaggagggcacctctgagtccgccacccccgagagcggccctggcacctccaccgagcccagcgagggcagcgcacccggcagccctgccggcagccccacctccacagaggagggaaccagcaccgagcccagcgaaggcagcgccccaggcaccagcaccgagcctagtgagcaggagattaaacggatcaacaagatcagaagaagacttgtgaaagacagcaacaccaagaaggccggcaagacaggccccatgaaaaccctgctggttagagtgatgacacccgatctgagagagcggctggaaaacctgagaaagaagcctgaaaatatcccccagcccatcagcaatacatctagagccaacctgaataagctgctgaccgattacaccgaaatgaagaaggcgatcctgcatgtgtactgggaagagttccagaaggaccctgtgggcctgatgagccgggtggcccagcctgccagcaagaagatcgatcagaacaagctgaaacctgagatggacgagaagggcaacctgaccaccgccggctttgcctgctctcagtgtggccagcccctgttcgtgtacaagctggagcaggtgtctgagaagggcaaggcttacaccaactacttcggacggtgcaatgtggccgagcacgaaaagctgatcctgctggcccagctgaagcccgagaaggatagcgacgaagccgtgacatatagcctgggaaagtttgggcagagggccctggatttctacagcattcatgtgaccaaggagtccacccaccccgtgaagcccctggcccagatcgccggaaacagatacgcctccggacctgtgggaaaggccctgagcgacgcatgtatgggcacaatcgcctccttcctgtctaagtaccaggacatcatcatcgaacaccagaaggtggtgaagggcaaccagaagagactggagagcctgcgggagctggccggcaaggaaaacctggaataccctagcgtgaccctgccacctcagcctcacaccaaggagggcgttgatgcctacaacgaagtgatcgcccgggtgcgaatgtgggtgaacctgaacctgtggcagaagctgaagctaagcagagatgatgccaagcctctgctgagactgaagggattcccttcctttcctctggtcgagagacaggccaacgaagtggactggtgggacatggtgtgtaacgtgaagaagctgatcaacgagaaaaaggaggatggcaaggtgttttggcagaatctggctggctacaagagacaggaagccctgagaccatacctgagcagcgaggaagatcggaagaagggaaagaaattcgctcggtaccagctgggcgacctgctgctgcacctggaaaagaagcacggcgaggactggggaaaggtgtacgacgaggcctgggagcggattgacaagaaagtggaaggcctgagcaagcacatcaagctggaagaggaacggagaagcgaggacgcccagagcaaggccgccctgaccgactggctgcgggctaaggccagcttcgtgatcgagggcctgaaggaggccgacaaggacgagttctgcagatgcgagctgaagctgcagaagtggtacggggacctgcggggaaagcccttcgccatcgaagccgagaacagcatcctggacatcagcggcttcagcaagcagtacaactgtgccttcatctggcagaaggacggcgtgaagaagctgaacctgtacctgatcatcaactacttcaagggcggcaagctgcggttcaagaagatcaaacctgaagccttcgaagccaacagattctacaccgtgatcaacaaaaagagcggcgagatcgtgcccatggaggtgaacttcaacttcgacgaccccaacctgatcatcctgcctctggcctttggcaagagacagggcagagaattcatctggaacgacctgctgtccctggaaaccggcagcctgaagctggccaacggaagagtgatcgagaagacactgtacaacagaagaacccggcaggatgagcctgccctgttcgtggccctgaccttcgagcggcgggaggtcctggactcctccaatatcaaaccaatgaacctgatcggcgtggcaagaggcgaaaacatccccgccgtgatcgccctgaccgaccccgagggctgcccactgagccggtttaaggatagcctgggaaacccaacccacatcctgagaatcggcgagagctataaggagaagcagcggaccatccaggccaagaaggaggtggagcagcggagagccggcggctacagccggaagtacgccagcaaagccaagaatctggcagacgatatggtgagaaacaccgctagagatctgctgtactacgccgtgacccaggatgccatgctgatcttcgccaacctgagccggggcttcggccggcagggcaagcggaccttcatggccgagagacagtacacacggatggaggactggctgaccgccaagctggcctacgagggcctgagcaagacctacctgtccaagacactggcccagtacacctccaagacatgcagcaactgtgggtttaccatcaccagcgccgactacgacagggtgctggagaagctgaagaagacagcaacaggctggatgaccacaattaacggcaaggagctgaaggtggagggccagattacctactacaacagatacaagagacagaacgtagtcaaggacctgtccgtcgagctggatagactgagcgaagaatctgtgaacaacgacatctcctcctggacaaagggcagaagcggagaagctctgagcctcctgaagaaaagattctcccatagacccgtgcaggagaagttcgtgtgcctgaactgcggcttcgagacacacgcagccgagcaagccgccctgaacatcgccagatcctggctgttcctgcggagccaggagtacaagaaataccagacaaacaagacaaccggcaacaccgataagagagccttcgtcgagacctggcagtccttttaccggaagaagcttaaggaggtgtggaaacctgccgtgcggtctggcggatctggcggaggctccaccagccccaagaaaaagagaaaagtctaagctgccttctgcggggcttgccttctggccatgcccttcttctctcccttgcacctgtacctcttggtctttgaataaagcctgagtaggaaggctagcaaaaaaaaaaaaaaaaaaaaaaaaaaaaaaaaaaaaaaaaaaaaaaaaaaaaaaaaaaaaaaaaaaaaaaaaaaaaaaaa

SEQ ID NO: 12400 - RNA, 5785 nt, synthetic construct
  source 1..5785: mol_type = other RNA
aggaaataagagagaaaagaagagtaagaagaaatataagagccaccatggcccctaagaagaagcgtaaagtgagccggatggaacgcctcgtctacgaggtgcggcagaagtgcagaaacatcgaggacatctgcatctcctgcggatctctgaacgtgaccctggagcacccactgttcatcggcggcatgtgccagaactgtaaaaactgttttctggagtgtgcctatcaatacgacgatgacggctaccagagctactgcaccatctgttgcggcggaagagaggtgctgatgtgtggaaataacaactgctgccggtgcttctgcgtggaatgcgtggacctgctggtgggccccggcgccgcccaggccgctattaaggaagatccttggaactgctacatgtgcggccacaagggcacatacggcctgctgagacggagagaggactggcctagcagactgcagatgttcttcgccaataaccacgaccaggagttcgacccccctaaggtgtaccctcccgtccccgccgagaagagaaagcccatccgggtcctgagcctgttcgatggcatcgccaccggtctgctggtgctgaaggacctgggcatccaggtggataggtacattgcctccgaggtgtgcgaggactccatcaccgtgggaatggtgcgtcatcagggcaagatcatgtacgtgggcgacgtgcggagcgtgacacagaagcatatccaggagtggggccctttcgacctggtgatcggcggcagcccttgcaatgacctgagcatcgtgaacccagcccggaagggcctgtacgagggaaccggcagactgttcttcgagttttacagactgctgcacgacgcccggcctaaggaaggcgacgaccggcccttcttttggctgttcgagaatgtggtggccatgggagtcagcgacaagcgggatattagccggttcctggagagcaaccccgtgatgatcgatgccaaggaagtgagcgccgcccaccgggccagatacttctggggcaatctgcctggcatgaacagacccctggccagcaccgtgaacgacaagctggagctgcaggagtgcctggagcacggccggatcgccaagttcagcaaggtgagaaccatcaccacccgaagcaacagcatcaaacaaggcaaggaccagcactttcctgtgttcatgaacgagaaggaggacatcctgtggtgtaccgagatggagagagtgttcgggttcccagtccactacacagatgtcagcaacatgtctagactggccagacagagactgctgggaagaagctggtccgtccctgtgatcagacacctgttcgcccctctgaaggagtacttcgcctgcgtgagcagcggcaacagcaacgccaacagccggggccccagcttctctagcggcctggtgccactgtccctgagagggagccacatgggccccatggagatctacaaaaccgtgagcgcctggaagcggcagcctgtgcgcgtgctgagcctgtttcggaatatcgataaagtcctgaaaagcctgggattcctggagagcggctctggctccggcggtggcaccctgaagtacgtggaggatgtgacaaacgtggtcagacgggatgtggagaagtggggccccttcgatctggtgtacggcagcacccaacccctgggcagctcttgtgaccggtgccctggctggtacatgtttcagttccaccggatcctgcagtacgccctgccgagacaggagtcccagcggccattcttttggattttcatggacaacttgctgctgaccgaggatgaccaggaaactaccactcggttcctgcagaccgaagccgtgaccctgcaggacgtgagaggccgggactaccagaacgccatgcgggtgtggtccaacatccctggactgaaaagcaagcacgcacctctgacccctaaagaagaggagtacctgcaggcccaggtgcggagcagaagcaagctggacgcccctaaggtggatctgctggtgaagaattgcctcctgcccctgagagagtacttcaagtatttcagccagaatagtctgcccctgggaggcagcggcggcggcatggccttcgaggacgtggccgtgtacttcagccaggaggagtgggtgttcctggacgccgcccagagggccctgtacaggcacgtgatgctggagaacttcgccctggtggacagcatcggcctgagcatcagcaggcccagggtgatcatccagctgcagaggggcgaggagccctgggtgcccaacaggaccaacaccggccccggcaggggcaccaggaggaggcccagcctgggcagcggcggcccaagcagcggcgcccctcctcccagcggcggcagcccagccggctccccaacctctaccgaggagggcacctctgagtccgccacccccgagagcggccctggcacctccaccgagcccagcgagggcagcgcacccggcagccctgccggcagccccacctccacagaggagggaaccagcaccgagcccagcgaaggcagcgccccaggcaccagcaccgagcctagtgagcaggagattaaacggatcaacaagatcagaagaagacttgtgaaagacagcaacaccaagaaggccggcaagacaggccccatgaaaaccctgctggttagagtgatgacacccgatctgagagagcggctggaaaacctgagaaagaagcctgaaaatatcccccagcccatcagcaatacatctagagccaacctgaataagctgctgaccgattacaccgaaatgaagaaggcgatcctgcatgtgtactgggaagagttccagaaggaccctgtgggcctgatgagccgggtggcccagcctgccagcaagaagatcgatcagaacaagctgaaacctgagatggacgagaagggcaacctgaccaccgccggctttgcctgctctcagtgtggccagcccctgttcgtgtacaagctggagcaggtgtctgagaagggcaaggcttacaccaactacttcggacggtgcaatgtggccgagcacgaaaagctgatcctgctggcccagctgaagcccgagaaggatagcgacgaagccgtgacatatagcctgggaaagtttgggcagagggccctggatttctacagcattcatgtgaccaaggagtccacccaccccgtgaagcccctggcccagatcgccggaaacagatacgcctccggacctgtgggaaaggccctgagcgacgcatgtatgggcacaatcgcctccttcctgtctaagtaccaggacatcatcatcgaacaccagaaggtggtgaagggcaaccagaagagactggagagcctgcgggagctggccggcaaggaaaacctggaataccctagcgtgaccctgccacctcagcctcacaccaaggagggcgttgatgcctacaacgaagtgatcgcccgggtgcgaatgtgggtgaacctgaacctgtggcagaagctgaagctaagcagagatgatgccaagcctctgctgagactgaagggattcccttcctttcctctggtcgagagacaggccaacgaagtggactggtgggacatggtgtgtaacgtgaagaagctgatcaacgagaaaaaggaggatggcaaggtgttttggcagaatctggctggctacaagagacaggaagccctgagaccatacctgagcagcgaggaagatcggaagaagggaaagaaattcgctcggtaccagctgggcgacctgctgctgcacctggaaaagaagcacggcgaggactggggaaaggtgtacgacgaggcctgggagcggattgacaagaaagtggaaggcctgagcaagcacatcaagctggaagaggaacggagaagcgaggacgcccagagcaaggccgccctgaccgactggctgcgggctaaggccagcttcgtgatcgagggcctgaaggaggccgacaaggacgagttctgcagatgcgagctgaagctgcagaagtggtacggggacctgcggggaaagcccttcgccatcgaagccgagaacagcatcctggacatcagcggcttcagcaagcagtacaactgtgccttcatctggcagaaggacggcgtgaagaagctgaacctgtacctgatcatcaactacttcaagggcggcaagctgcggttcaagaagatcaaacctgaagccttcgaagccaacagattctacaccgtgatcaacaaaaagagcggcgagatcgtgcccatggaggtgaacttcaacttcgacgaccccaacctgatcatcctgcctctggcctttggcaagagacagggcagagaattcatctggaacgacctgctgtccctggaaaccggcagcctgaagctggccaacggaagagtgatcgagaagacactgtacaacagaagaacccggcaggatgagcctgccctgttcgtggccctgaccttcgagcggcgggaggtcctggactcctccaatatcaaaccaatgaacctgatcggcgtggcaagaggcgaaaacatccccgccgtgatcgccctgaccgaccccgagggctgcccactgagccggtttaaggatagcctgggaaacccaacccacatcctgagaatcggcgagagctataaggagaagcagcggaccatccaggccaagaaggaggtggagcagcggagagccggcggctacagccggaagtacgccagcaaagccaagaatctggcagacgatatggtgagaaacaccgctagagatctgctgtactacgccgtgacccaggatgccatgctgatcttcgccaacctgagccggggcttcggccggcagggcaagcggaccttcatggccgagagacagtacacacggatggaggactggctgaccgccaagctggcctacgagggcctgagcaagacctacctgtccaagacactggcccagtacacctccaagacatgcagcaactgtgggtttaccatcaccagcgccgactacgacagggtgctggagaagctgaagaagacagcaacaggctggatgaccacaattaacggcaaggagctgaaggtggagggccagattacctactacaacagatacaagagacagaacgtagtcaaggacctgtccgtcgagctggatagactgagcgaagaatctgtgaacaacgacatctcctcctggacaaagggcagaagcggagaagctctgagcctcctgaagaaaagattctcccatagacccgtgcaggagaagttcgtgtgcctgaactgcggcttcgagacacacgcagccgagcaagccgccctgaacatcgccagatcctggctgttcctgcggagccaggagtacaagaaataccagacaaacaagacaaccggcaacaccgataagagagccttcgtcgagacctggcagtccttttaccggaagaagcttaaggaggtgtggaaacctgccgtgcggtctggcggatctggcggaggctccaccagccccaagaaaaagagaaaagtctaagctgccttctgcggggcttgccttctggccatgcccttcttctctcccttgcacctgtacctcttggtctttgaataaagcctgagtaggaaggctagcaaaaaaaaaaaaaaaaaaaaaaaaaaaaaaaaaaaaaaaaaaaaaaaaaaaaaaaaaaaaaaaaaaaaaaaaaaaaaaaa

SEQ ID NO: 12401 - RNA, 5785 nt, synthetic construct
  source 1..5785: mol_type = other RNA
aggaaataagagagaaaagaagagtaagaagaaatataagagccaccatggcccctaagaagaagcgtaaagtgagccggatggaacgcctcgtctacgaggtgcggcagaagtgcagaaacatcgaggacatctgcatctcctgcggatctctgaacgtgaccctggagcacccactgttcatcggcggcatgtgccagaactgtaaaaactgttttctggagtgtgcctatcaatacgacgatgacggctaccagagctactgcaccatctgttgcggcggaagagaggtgctgatgtgtggaaataacaactgctgccggtgcttctgcgtggaatgcgtggacctgctggtgggccccggcgccgcccaggccgctattaaggaagatccttggaactgctacatgtgcggccacaagggcacatacggcctgctgagacggagagaggactggcctagcagactgcagatgttcttcgccaataaccacgaccaggagttcgacccccctaaggtgtaccctcccgtccccgccgagaagagaaagcccatccgggtcctgagcctgttcgatggcatcgccaccggtctgctggtgctgaaggacctgggcatccaggtggataggtacattgcctccgaggtgtgcgaggactccatcaccgtgggaatggtgcgtcatcagggcaagatcatgtacgtgggcgacgtgcggagcgtgacacagaagcatatccaggagtggggccctttcgacctggtgatcggcggcagcccttgcaatgacctgagcatcgtgaacccagcccggaagggcctgtacgagggaaccggcagactgttcttcgagttttacagactgctgcacgacgcccggcctaaggaaggcgacgaccggcccttcttttggctgttcgagaatgtggtggccatgggagtcagcgacaagcgggatattagccggttcctggagagcaaccccgtgatgatcgatgccaaggaagtgagcgccgcccaccgggccagatacttctggggcaatctgcctggcatgaacagacccctggccagcaccgtgaacgacaagctggagctgcaggagtgcctggagcacggccggatcgccaagttcagcaaggtgagaaccatcaccacccgaagcaacagcatcaaacaaggcaaggaccagcactttcctgtgttcatgaacgagaaggaggacatcctgtggtgtaccgagatggagagagtgttcgggttcccagtccactacacagatgtcagcaacatgtctagactggccagacagagactgctgggaagaagctggtccgtccctgtgatcagacacctgttcgcccctctgaaggagtacttcgcctgcgtgagcagcggcaacagcaacgccaacagccggggccccagcttctctagcggcctggtgccactgtccctgagagggagccacatgggccccatggagatctacaaaaccgtgagcgcctggaagcggcagcctgtgcgcgtgctgagcctgtttcggaatatcgataaagtcctgaaaagcctgggattcctggagagcggctctggctccggcggtggcaccctgaagtacgtggaggatgtgacaaacgtggtcagacgggatgtggagaagtggggccccttcgatctggtgtacggcagcacccaacccctgggcagctcttgtgaccggtgccctggctggtacatgtttcagttccaccggatcctgcagtacgccctgccgagacaggagtcccagcggccattcttttggattttcatggacaacttgctgctgaccgaggatgaccaggaaactaccactcggttcctgcagaccgaagccgtgaccctgcaggacgtgagaggccgggactaccagaacgccatgcgggtgtggtccaacatccctggactgaaaagcaagcacgcacctctgacccctaaagaagaggagtacctgcaggcccaggtgcggagcagaagcaagctggacgcccctaaggtggatctgctggtgaagaattgcctcctgcccctgagagagtacttcaagtatttcagccagaatagtctgcccctgggaggcagcggcggcggcgaggagctgcccgtggtgttcgaggacgtggccgtgtacttcaccagggaggagtggggcatgctggtgaagaggcagaaggagctgtacagggacgtgatgaggatgaactacgagctgctggccagcctgggccccgccgccgccaagcccgacctgatcagcaagctggagaggagggccgccccctggatcaaggaccccaacggccccaagtggggcaagggcaggccccccggcaagggcggcccaagcagcggcgcccctcctcccagcggcggcagcccagccggctccccaacctctaccgaggagggcacctctgagtccgccacccccgagagcggccctggcacctccaccgagcccagcgagggcagcgcacccggcagccctgccggcagccccacctccacagaggagggaaccagcaccgagcccagcgaaggcagcgccccaggcaccagcaccgagcctagtgagcaggagattaaacggatcaacaagatcagaagaagacttgtgaaagacagcaacaccaagaaggccggcaagacaggccccatgaaaaccctgctggttagagtgatgacacccgatctgagagagcggctggaaaacctgagaaagaagcctgaaaatatcccccagcccatcagcaatacatctagagccaacctgaataagctgctgaccgattacaccgaaatgaagaaggcgatcctgcatgtgtactgggaagagttccagaaggaccctgtgggcctgatgagccgggtggcccagcctgccagcaagaagatcgatcagaacaagctgaaacctgagatggacgagaagggcaacctgaccaccgccggctttgcctgctctcagtgtggccagcccctgttcgtgtacaagctggagcaggtgtctgagaagggcaaggcttacaccaactacttcggacggtgcaatgtggccgagcacgaaaagctgatcctgctggcccagctgaagcccgagaaggatagcgacgaagccgtgacatatagcctgggaaagtttgggcagagggccctggatttctacagcattcatgtgaccaaggagtccacccaccccgtgaagcccctggcccagatcgccggaaacagatacgcctccggacctgtgggaaaggccctgagcgacgcatgtatgggcacaatcgcctccttcctgtctaagtaccaggacatcatcatcgaacaccagaaggtggtgaagggcaaccagaagagactggagagcctgcgggagctggccggcaaggaaaacctggaataccctagcgtgaccctgccacctcagcctcacaccaaggagggcgttgatgcctacaacgaagtgatcgcccgggtgcgaatgtgggtgaacctgaacctgtggcagaagctgaagctaagcagagatgatgccaagcctctgctgagactgaagggattcccttcctttcctctggtcgagagacaggccaacgaagtggactggtgggacatggtgtgtaacgtgaagaagctgatcaacgagaaaaaggaggatggcaaggtgttttggcagaatctggctggctacaagagacaggaagccctgagaccatacctgagcagcgaggaagatcggaagaagggaaagaaattcgctcggtaccagctgggcgacctgctgctgcacctggaaaagaagcacggcgaggactggggaaaggtgtacgacgaggcctgggagcggattgacaagaaagtggaaggcctgagcaagcacatcaagctggaagaggaacggagaagcgaggacgcccagagcaaggccgccctgaccgactggctgcgggctaaggccagcttcgtgatcgagggcctgaaggaggccgacaaggacgagttctgcagatgcgagctgaagctgcagaagtggtacggggacctgcggggaaagcccttcgccatcgaagccgagaacagcatcctggacatcagcggcttcagcaagcagtacaactgtgccttcatctggcagaaggacggcgtgaagaagctgaacctgtacctgatcatcaactacttcaagggcggcaagctgcggttcaagaagatcaaacctgaagccttcgaagccaacagattctacaccgtgatcaacaaaaagagcggcgagatcgtgcccatggaggtgaacttcaacttcgacgaccccaacctgatcatcctgcctctggcctttggcaagagacagggcagagaattcatctggaacgacctgctgtccctggaaaccggcagcctgaagctggccaacggaagagtgatcgagaagacactgtacaacagaagaacccggcaggatgagcctgccctgttcgtggccctgaccttcgagcggcgggaggtcctggactcctccaatatcaaaccaatgaacctgatcggcgtggcaagaggcgaaaacatccccgccgtgatcgccctgaccgaccccgagggctgcccactgagccggtttaaggatagcctgggaaacccaacccacatcctgagaatcggcgagagctataaggagaagcagcggaccatccaggccaagaaggaggtggagcagcggagagccggcggctacagccggaagtacgccagcaaagccaagaatctggcagacgatatggtgagaaacaccgctagagatctgctgtactacgccgtgacccaggatgccatgctgatcttcgccaacctgagccggggcttcggccggcagggcaagcggaccttcatggccgagagacagtacacacggatggaggactggctgaccgccaagctggcctacgagggcctgagcaagacctacctgtccaagacactggcccagtacacctccaagacatgcagcaactgtgggtttaccatcaccagcgccgactacgacagggtgctggagaagctgaagaagacagcaacaggctggatgaccacaattaacggcaaggagctgaaggtggagggccagattacctactacaacagatacaagagacagaacgtagtcaaggacctgtccgtcgagctggatagactgagcgaagaatctgtgaacaacgacatctcctcctggacaaagggcagaagcggagaagctctgagcctcctgaagaaaagattctcccatagacccgtgcaggagaagttcgtgtgcctgaactgcggcttcgagacacacgcagccgagcaagccgccctgaacatcgccagatcctggctgttcctgcggagccaggagtacaagaaataccagacaaacaagacaaccggcaacaccgataagagagccttcgtcgagacctggcagtccttttaccggaagaagcttaaggaggtgtggaaacctgccgtgcggtctggcggatctggcggaggctccaccagccccaagaaaaagagaaaagtctaagctgccttctgcggggcttgccttctggccatgcccttcttctctcccttgcacctgtacctcttggtctttgaataaagcctgagtaggaaggctagcaaaaaaaaaaaaaaaaaaaaaaaaaaaaaaaaaaaaaaaaaaaaaaaaaaaaaaaaaaaaaaaaaaaaaaaaaaaaaaaa

SEQ ID NO: 12402 - RNA, 5785 nt, synthetic construct
  source 1..5785: mol_type = other RNA
aggaaataagagagaaaagaagagtaagaagaaatataagagccaccatggcccctaagaagaagcgtaaagtgagccggatggaacgcctcgtctacgaggtgcggcagaagtgcagaaacatcgaggacatctgcatctcctgcggatctctgaacgtgaccctggagcacccactgttcatcggcggcatgtgccagaactgtaaaaactgttttctggagtgtgcctatcaatacgacgatgacggctaccagagctactgcaccatctgttgcggcggaagagaggtgctgatgtgtggaaataacaactgctgccggtgcttctgcgtggaatgcgtggacctgctggtgggccccggcgccgcccaggccgctattaaggaagatccttggaactgctacatgtgcggccacaagggcacatacggcctgctgagacggagagaggactggcctagcagactgcagatgttcttcgccaataaccacgaccaggagttcgacccccctaaggtgtaccctcccgtccccgccgagaagagaaagcccatccgggtcctgagcctgttcgatggcatcgccaccggtctgctggtgctgaaggacctgggcatccaggtggataggtacattgcctccgaggtgtgcgaggactccatcaccgtgggaatggtgcgtcatcagggcaagatcatgtacgtgggcgacgtgcggagcgtgacacagaagcatatccaggagtggggccctttcgacctggtgatcggcggcagcccttgcaatgacctgagcatcgtgaacccagcccggaagggcctgtacgagggaaccggcagactgttcttcgagttttacagactgctgcacgacgcccggcctaaggaaggcgacgaccggcccttcttttggctgttcgagaatgtggtggccatgggagtcagcgacaagcgggatattagccggttcctggagagcaaccccgtgatgatcgatgccaaggaagtgagcgccgcccaccgggccagatacttctggggcaatctgcctggcatgaacagacccctggccagcaccgtgaacgacaagctggagctgcaggagtgcctggagcacggccggatcgccaagttcagcaaggtgagaaccatcaccacccgaagcaacagcatcaaacaaggcaaggaccagcactttcctgtgttcatgaacgagaaggaggacatcctgtggtgtaccgagatggagagagtgttcgggttcccagtccactacacagatgtcagcaacatgtctagactggccagacagagactgctgggaagaagctggtccgtccctgtgatcagacacctgttcgcccctctgaaggagtacttcgcctgcgtgagcagcggcaacagcaacgccaacagccggggccccagcttctctagcggcctggtgccactgtccctgagagggagccacatgggccccatggagatctacaaaaccgtgagcgcctggaagcggcagcctgtgcgcgtgctgagcctgtttcggaatatcgataaagtcctgaaaagcctgggattcctggagagcggctctggctccggcggtggcaccctgaagtacgtggaggatgtgacaaacgtggtcagacgggatgtggagaagtggggccccttcgatctggtgtacggcagcacccaacccctgggcagctcttgtgaccggtgccctggctggtacatgtttcagttccaccggatcctgcagtacgccctgccgagacaggagtcccagcggccattcttttggattttcatggacaacttgctgctgaccgaggatgaccaggaaactaccactcggttcctgcagaccgaagccgtgaccctgcaggacgtgagaggccgggactaccagaacgccatgcgggtgtggtccaacatccctggactgaaaagcaagcacgcacctctgacccctaaagaagaggagtacctgcaggcccaggtgcggagcagaagcaagctggacgcccctaaggtggatctgctggtgaagaattgcctcctgcccctgagagagtacttcaagtatttcagccagaatagtctgcccctgggaggcagcggcggcggcgcccaggagagcgtgatgttcagcgacgtgagcatcgacttcagccaggaggagtgggagtgcctgaacgacgaccagagggacctgtacagggacgtgatgctggagaactacagccacctggtgagcatgggccacagcgtgagcaagcccgacgtgatcagcttcctggagcagggcaaggagccctggctggtggacagggagctgaccagggaccactggcccgtgctggagagcaggggcggcccaagcagcggcgcccctcctcccagcggcggcagcccagccggctccccaacctctaccgaggagggcacctctgagtccgccacccccgagagcggccctggcacctccaccgagcccagcgagggcagcgcacccggcagccctgccggcagccccacctccacagaggagggaaccagcaccgagcccagcgaaggcagcgccccaggcaccagcaccgagcctagtgagcaggagattaaacggatcaacaagatcagaagaagacttgtgaaagacagcaacaccaagaaggccggcaagacaggccccatgaaaaccctgctggttagagtgatgacacccgatctgagagagcggctggaaaacctgagaaagaagcctgaaaatatcccccagcccatcagcaatacatctagagccaacctgaataagctgctgaccgattacaccgaaatgaagaaggcgatcctgcatgtgtactgggaagagttccagaaggaccctgtgggcctgatgagccgggtggcccagcctgccagcaagaagatcgatcagaacaagctgaaacctgagatggacgagaagggcaacctgaccaccgccggctttgcctgctctcagtgtggccagcccctgttcgtgtacaagctggagcaggtgtctgagaagggcaaggcttacaccaactacttcggacggtgcaatgtggccgagcacgaaaagctgatcctgctggcccagctgaagcccgagaaggatagcgacgaagccgtgacatatagcctgggaaagtttgggcagagggccctggatttctacagcattcatgtgaccaaggagtccacccaccccgtgaagcccctggcccagatcgccggaaacagatacgcctccggacctgtgggaaaggccctgagcgacgcatgtatgggcacaatcgcctccttcctgtctaagtaccaggacatcatcatcgaacaccagaaggtggtgaagggcaaccagaagagactggagagcctgcgggagctggccggcaaggaaaacctggaataccctagcgtgaccctgccacctcagcctcacaccaaggagggcgttgatgcctacaacgaagtgatcgcccgggtgcgaatgtgggtgaacctgaacctgtggcagaagctgaagctaagcagagatgatgccaagcctctgctgagactgaagggattcccttcctttcctctggtcgagagacaggccaacgaagtggactggtgggacatggtgtgtaacgtgaagaagctgatcaacgagaaaaaggaggatggcaaggtgttttggcagaatctggctggctacaagagacaggaagccctgagaccatacctgagcagcgaggaagatcggaagaagggaaagaaattcgctcggtaccagctgggcgacctgctgctgcacctggaaaagaagcacggcgaggactggggaaaggtgtacgacgaggcctgggagcggattgacaagaaagtggaaggcctgagcaagcacatcaagctggaagaggaacggagaagcgaggacgcccagagcaaggccgccctgaccgactggctgcgggctaaggccagcttcgtgatcgagggcctgaaggaggccgacaaggacgagttctgcagatgcgagctgaagctgcagaagtggtacggggacctgcggggaaagcccttcgccatcgaagccgagaacagcatcctggacatcagcggcttcagcaagcagtacaactgtgccttcatctggcagaaggacggcgtgaagaagctgaacctgtacctgatcatcaactacttcaagggcggcaagctgcggttcaagaagatcaaacctgaagccttcgaagccaacagattctacaccgtgatcaacaaaaagagcggcgagatcgtgcccatggaggtgaacttcaacttcgacgaccccaacctgatcatcctgcctctggcctttggcaagagacagggcagagaattcatctggaacgacctgctgtccctggaaaccggcagcctgaagctggccaacggaagagtgatcgagaagacactgtacaacagaagaacccggcaggatgagcctgccctgttcgtggccctgaccttcgagcggcgggaggtcctggactcctccaatatcaaaccaatgaacctgatcggcgtggcaagaggcgaaaacatccccgccgtgatcgccctgaccgaccccgagggctgcccactgagccggtttaaggatagcctgggaaacccaacccacatcctgagaatcggcgagagctataaggagaagcagcggaccatccaggccaagaaggaggtggagcagcggagagccggcggctacagccggaagtacgccagcaaagccaagaatctggcagacgatatggtgagaaacaccgctagagatctgctgtactacgccgtgacccaggatgccatgctgatcttcgccaacctgagccggggcttcggccggcagggcaagcggaccttcatggccgagagacagtacacacggatggaggactggctgaccgccaagctggcctacgagggcctgagcaagacctacctgtccaagacactggcccagtacacctccaagacatgcagcaactgtgggtttaccatcaccagcgccgactacgacagggtgctggagaagctgaagaagacagcaacaggctggatgaccacaattaacggcaaggagctgaaggtggagggccagattacctactacaacagatacaagagacagaacgtagtcaaggacctgtccgtcgagctggatagactgagcgaagaatctgtgaacaacgacatctcctcctggacaaagggcagaagcggagaagctctgagcctcctgaagaaaagattctcccatagacccgtgcaggagaagttcgtgtgcctgaactgcggcttcgagacacacgcagccgagcaagccgccctgaacatcgccagatcctggctgttcctgcggagccaggagtacaagaaataccagacaaacaagacaaccggcaacaccgataagagagccttcgtcgagacctggcagtccttttaccggaagaagcttaaggaggtgtggaaacctgccgtgcggtctggcggatctggcggaggctccaccagccccaagaaaaagagaaaagtctaagctgccttctgcggggcttgccttctggccatgcccttcttctctcccttgcacctgtacctcttggtctttgaataaagcctgagtaggaaggctagcaaaaaaaaaaaaaaaaaaaaaaaaaaaaaaaaaaaaaaaaaaaaaaaaaaaaaaaaaaaaaaaaaaaaaaaaaaaaaaaa

SEQ ID NO: 12403 - RNA, 5785 nt, synthetic construct
  source 1..5785: mol_type = other RNA
aggaaataagagagaaaagaagagtaagaagaaatataagagccaccatggcccctaagaagaagcgtaaagtgagccggatggaacgcctcgtctacgaggtgcggcagaagtgcagaaacatcgaggacatctgcatctcctgcggatctctgaacgtgaccctggagcacccactgttcatcggcggcatgtgccagaactgtaaaaactgttttctggagtgtgcctatcaatacgacgatgacggctaccagagctactgcaccatctgttgcggcggaagagaggtgctgatgtgtggaaataacaactgctgccggtgcttctgcgtggaatgcgtggacctgctggtgggccccggcgccgcccaggccgctattaaggaagatccttggaactgctacatgtgcggccacaagggcacatacggcctgctgagacggagagaggactggcctagcagactgcagatgttcttcgccaataaccacgaccaggagttcgacccccctaaggtgtaccctcccgtccccgccgagaagagaaagcccatccgggtcctgagcctgttcgatggcatcgccaccggtctgctggtgctgaaggacctgggcatccaggtggataggtacattgcctccgaggtgtgcgaggactccatcaccgtgggaatggtgcgtcatcagggcaagatcatgtacgtgggcgacgtgcggagcgtgacacagaagcatatccaggagtggggccctttcgacctggtgatcggcggcagcccttgcaatgacctgagcatcgtgaacccagcccggaagggcctgtacgagggaaccggcagactgttcttcgagttttacagactgctgcacgacgcccggcctaaggaaggcgacgaccggcccttcttttggctgttcgagaatgtggtggccatgggagtcagcgacaagcgggatattagccggttcctggagagcaaccccgtgatgatcgatgccaaggaagtgagcgccgcccaccgggccagatacttctggggcaatctgcctggcatgaacagacccctggccagcaccgtgaacgacaagctggagctgcaggagtgcctggagcacggccggatcgccaagttcagcaaggtgagaaccatcaccacccgaagcaacagcatcaaacaaggcaaggaccagcactttcctgtgttcatgaacgagaaggaggacatcctgtggtgtaccgagatggagagagtgttcgggttcccagtccactacacagatgtcagcaacatgtctagactggccagacagagactgctgggaagaagctggtccgtccctgtgatcagacacctgttcgcccctctgaaggagtacttcgcctgcgtgagcagcggcaacagcaacgccaacagccggggccccagcttctctagcggcctggtgccactgtccctgagagggagccacatgggccccatggagatctacaaaaccgtgagcgcctggaagcggcagcctgtgcgcgtgctgagcctgtttcggaatatcgataaagtcctgaaaagcctgggattcctggagagcggctctggctccggcggtggcaccctgaagtacgtggaggatgtgacaaacgtggtcagacgggatgtggagaagtggggccccttcgatctggtgtacggcagcacccaacccctgggcagctcttgtgaccggtgccctggctggtacatgtttcagttccaccggatcctgcagtacgccctgccgagacaggagtcccagcggccattcttttggattttcatggacaacttgctgctgaccgaggatgaccaggaaactaccactcggttcctgcagaccgaagccgtgaccctgcaggacgtgagaggccgggactaccagaacgccatgcgggtgtggtccaacatccctggactgaaaagcaagcacgcacctctgacccctaaagaagaggagtacctgcaggcccaggtgcggagcagaagcaagctggacgcccctaaggtggatctgctggtgaagaattgcctcctgcccctgagagagtacttcaagtatttcagccagaatagtctgcccctgggaggcagcggcggcggcagccaggagagcgtgagcttcgaggacgtggccgtgtacttcacccagaaccagtgggccagcctggccagcgcccagaggaccctgtacagggaggtgatgctggagaactacgccaacgtgaccagcctggccgccttccccttccccaagcccgacctgatcttccagctggagaggggcgaggcccccggcggcctggacccctggaccagcatcaggagggaggtgaggggcgtgtgcggcggcccaagcagcggcgcccctcctcccagcggcggcagcccagccggctccccaacctctaccgaggagggcacctctgagtccgccacccccgagagcggccctggcacctccaccgagcccagcgagggcagcgcacccggcagccctgccggcagccccacctccacagaggagggaaccagcaccgagcccagcgaaggcagcgccccaggcaccagcaccgagcctagtgagcaggagattaaacggatcaacaagatcagaagaagacttgtgaaagacagcaacaccaagaaggccggcaagacaggccccatgaaaaccctgctggttagagtgatgacacccgatctgagagagcggctggaaaacctgagaaagaagcctgaaaatatcccccagcccatcagcaatacatctagagccaacctgaataagctgctgaccgattacaccgaaatgaagaaggcgatcctgcatgtgtactgggaagagttccagaaggaccctgtgggcctgatgagccgggtggcccagcctgccagcaagaagatcgatcagaacaagctgaaacctgagatggacgagaagggcaacctgaccaccgccggctttgcctgctctcagtgtggccagcccctgttcgtgtacaagctggagcaggtgtctgagaagggcaaggcttacaccaactacttcggacggtgcaatgtggccgagcacgaaaagctgatcctgctggcccagctgaagcccgagaaggatagcgacgaagccgtgacatatagcctgggaaagtttgggcagagggccctggatttctacagcattcatgtgaccaaggagtccacccaccccgtgaagcccctggcccagatcgccggaaacagatacgcctccggacctgtgggaaaggccctgagcgacgcatgtatgggcacaatcgcctccttcctgtctaagtaccaggacatcatcatcgaacaccagaaggtggtgaagggcaaccagaagagactggagagcctgcgggagctggccggcaaggaaaacctggaataccctagcgtgaccctgccacctcagcctcacaccaaggagggcgttgatgcctacaacgaagtgatcgcccgggtgcgaatgtgggtgaacctgaacctgtggcagaagctgaagctaagcagagatgatgccaagcctctgctgagactgaagggattcccttcctttcctctggtcgagagacaggccaacgaagtggactggtgggacatggtgtgtaacgtgaagaagctgatcaacgagaaaaaggaggatggcaaggtgttttggcagaatctggctggctacaagagacaggaagccctgagaccatacctgagcagcgaggaagatcggaagaagggaaagaaattcgctcggtaccagctgggcgacctgctgctgcacctggaaaagaagcacggcgaggactggggaaaggtgtacgacgaggcctgggagcggattgacaagaaagtggaaggcctgagcaagcacatcaagctggaagaggaacggagaagcgaggacgcccagagcaaggccgccctgaccgactggctgcgggctaaggccagcttcgtgatcgagggcctgaaggaggccgacaaggacgagttctgcagatgcgagctgaagctgcagaagtggtacggggacctgcggggaaagcccttcgccatcgaagccgagaacagcatcctggacatcagcggcttcagcaagcagtacaactgtgccttcatctggcagaaggacggcgtgaagaagctgaacctgtacctgatcatcaactacttcaagggcggcaagctgcggttcaagaagatcaaacctgaagccttcgaagccaacagattctacaccgtgatcaacaaaaagagcggcgagatcgtgcccatggaggtgaacttcaacttcgacgaccccaacctgatcatcctgcctctggcctttggcaagagacagggcagagaattcatctggaacgacctgctgtccctggaaaccggcagcctgaagctggccaacggaagagtgatcgagaagacactgtacaacagaagaacccggcaggatgagcctgccctgttcgtggccctgaccttcgagcggcgggaggtcctggactcctccaatatcaaaccaatgaacctgatcggcgtggcaagaggcgaaaacatccccgccgtgatcgccctgaccgaccccgagggctgcccactgagccggtttaaggatagcctgggaaacccaacccacatcctgagaatcggcgagagctataaggagaagcagcggaccatccaggccaagaaggaggtggagcagcggagagccggcggctacagccggaagtacgccagcaaagccaagaatctggcagacgatatggtgagaaacaccgctagagatctgctgtactacgccgtgacccaggatgccatgctgatcttcgccaacctgagccggggcttcggccggcagggcaagcggaccttcatggccgagagacagtacacacggatggaggactggctgaccgccaagctggcctacgagggcctgagcaagacctacctgtccaagacactggcccagtacacctccaagacatgcagcaactgtgggtttaccatcaccagcgccgactacgacagggtgctggagaagctgaagaagacagcaacaggctggatgaccacaattaacggcaaggagctgaaggtggagggccagattacctactacaacagatacaagagacagaacgtagtcaaggacctgtccgtcgagctggatagactgagcgaagaatctgtgaacaacgacatctcctcctggacaaagggcagaagcggagaagctctgagcctcctgaagaaaagattctcccatagacccgtgcaggagaagttcgtgtgcctgaactgcggcttcgagacacacgcagccgagcaagccgccctgaacatcgccagatcctggctgttcctgcggagccaggagtacaagaaataccagacaaacaagacaaccggcaacaccgataagagagccttcgtcgagacctggcagtccttttaccggaagaagcttaaggaggtgtggaaacctgccgtgcggtctggcggatctggcggaggctccaccagccccaagaaaaagagaaaagtctaagctgccttctgcggggcttgccttctggccatgcccttcttctctcccttgcacctgtacctcttggtctttgaataaagcctgagtaggaaggctagcaaaaaaaaaaaaaaaaaaaaaaaaaaaaaaaaaaaaaaaaaaaaaaaaaaaaaaaaaaaaaaaaaaaaaaaaaaaaaaaa

SEQ ID NO: 12404 - RNA, 5803 nt, synthetic construct
  source 1..5803: mol_type = other RNA
aggaaataagagagaaaagaagagtaagaagaaatataagagccaccatggcccctaagaagaagcgtaaagtgagccggatggaacgcctcgtctacgaggtgcggcagaagtgcagaaacatcgaggacatctgcatctcctgcggatctctgaacgtgaccctggagcacccactgttcatcggcggcatgtgccagaactgtaaaaactgttttctggagtgtgcctatcaatacgacgatgacggctaccagagctactgcaccatctgttgcggcggaagagaggtgctgatgtgtggaaataacaactgctgccggtgcttctgcgtggaatgcgtggacctgctggtgggccccggcgccgcccaggccgctattaaggaagatccttggaactgctacatgtgcggccacaagggcacatacggcctgctgagacggagagaggactggcctagcagactgcagatgttcttcgccaataaccacgaccaggagttcgacccccctaaggtgtaccctcccgtccccgccgagaagagaaagcccatccgggtcctgagcctgttcgatggcatcgccaccggtctgctggtgctgaaggacctgggcatccaggtggataggtacattgcctccgaggtgtgcgaggactccatcaccgtgggaatggtgcgtcatcagggcaagatcatgtacgtgggcgacgtgcggagcgtgacacagaagcatatccaggagtggggccctttcgacctggtgatcggcggcagcccttgcaatgacctgagcatcgtgaacccagcccggaagggcctgtacgagggaaccggcagactgttcttcgagttttacagactgctgcacgacgcccggcctaaggaaggcgacgaccggcccttcttttggctgttcgagaatgtggtggccatgggagtcagcgacaagcgggatattagccggttcctggagagcaaccccgtgatgatcgatgccaaggaagtgagcgccgcccaccgggccagatacttctggggcaatctgcctggcatgaacagacccctggccagcaccgtgaacgacaagctggagctgcaggagtgcctggagcacggccggatcgccaagttcagcaaggtgagaaccatcaccacccgaagcaacagcatcaaacaaggcaaggaccagcactttcctgtgttcatgaacgagaaggaggacatcctgtggtgtaccgagatggagagagtgttcgggttcccagtccactacacagatgtcagcaacatgtctagactggccagacagagactgctgggaagaagctggtccgtccctgtgatcagacacctgttcgcccctctgaaggagtacttcgcctgcgtgagcagcggcaacagcaacgccaacagccggggccccagcttctctagcggcctggtgccactgtccctgagagggagccacatgggccccatggagatctacaaaaccgtgagcgcctggaagcggcagcctgtgcgcgtgctgagcctgtttcggaatatcgataaagtcctgaaaagcctgggattcctggagagcggctctggctccggcggtggcaccctgaagtacgtggaggatgtgacaaacgtggtcagacgggatgtggagaagtggggccccttcgatctggtgtacggcagcacccaacccctgggcagctcttgtgaccggtgccctggctggtacatgtttcagttccaccggatcctgcagtacgccctgccgagacaggagtcccagcggccattcttttggattttcatggacaacttgctgctgaccgaggatgaccaggaaactaccactcggttcctgcagaccgaagccgtgaccctgcaggacgtgagaggccgggactaccagaacgccatgcgggtgtggtccaacatccctggactgaaaagcaagcacgcacctctgacccctaaagaagaggagtacctgcaggcccaggtgcggagcagaagcaagctggacgcccctaaggtggatctgctggtgaagaattgcctcctgcccctgagagagtacttcaagtatttcagccagaatagtctgcccctgggaggcagcggcggcggcgtggccttcgaggacgtggccgtgaacttcacccaggaggagtgggccctgctggaccccagccagaagaacctgtacagggaggtgatgcaggagaccctgaggaacctggccagcatcggcaagaagtggaacaaccagtacatcgaggacgagcaccagaaccccaggaggaacctgaggaggctgatcaaggagaggctgagcgagagcaaggagagccaccagcacggcgagttcctgacccaggtgcccgacgacggcggcccaagcagcggcgcccctcctcccagcggcggcagcccagccggctccccaacctctaccgaggagggcacctctgagtccgccacccccgagagcggccctggcacctccaccgagcccagcgagggcagcgcacccggcagccctgccggcagccccacctccacagaggagggaaccagcaccgagcccagcgaaggcagcgccccaggcaccagcaccgagcctagtgagcaggagattaaacggatcaacaagatcagaagaagacttgtgaaagacagcaacaccaagaaggccggcaagacaggccccatgaaaaccctgctggttagagtgatgacacccgatctgagagagcggctggaaaacctgagaaagaagcctgaaaatatcccccagcccatcagcaatacatctagagccaacctgaataagctgctgaccgattacaccgaaatgaagaaggcgatcctgcatgtgtactgggaagagttccagaaggaccctgtgggcctgatgagccgggtggcccagcctgccagcaagaagatcgatcagaacaagctgaaacctgagatggacgagaagggcaacctgaccaccgccggctttgcctgctctcagtgtggccagcccctgttcgtgtacaagctggagcaggtgtctgagaagggcaaggcttacaccaactacttcggacggtgcaatgtggccgagcacgaaaagctgatcctgctggcccagctgaagcccgagaaggatagcgacgaagccgtgacatatagcctgggaaagtttgggcagagggccctggatttctacagcattcatgtgaccaaggagtccacccaccccgtgaagcccctggcccagatcgccggaaacagatacgcctccggacctgtgggaaaggccctgagcgacgcatgtatgggcacaatcgcctccttcctgtctaagtaccaggacatcatcatcgaacaccagaaggtggtgaagggcaaccagaagagactggagagcctgcgggagctggccggcaaggaaaacctggaataccctagcgtgaccctgccacctcagcctcacaccaaggagggcgttgatgcctacaacgaagtgatcgcccgggtgcgaatgtgggtgaacctgaacctgtggcagaagctgaagctaagcagagatgatgccaagcctctgctgagactgaagggattcccttcctttcctctggtcgagagacaggccaacgaagtggactggtgggacatggtgtgtaacgtgaagaagctgatcaacgagaaaaaggaggatggcaaggtgttttggcagaatctggctggctacaagagacaggaagccctgagaccatacctgagcagcgaggaagatcggaagaagggaaagaaattcgctcggtaccagctgggcgacctgctgctgcacctggaaaagaagcacggcgaggactggggaaaggtgtacgacgaggcctgggagcggattgacaagaaagtggaaggcctgagcaagcacatcaagctggaagaggaacggagaagcgaggacgcccagagcaaggccgccctgaccgactggctgcgggctaaggccagcttcgtgatcgagggcctgaaggaggccgacaaggacgagttctgcagatgcgagctgaagctgcagaagtggtacggggacctgcggggaaagcccttcgccatcgaagccgagaacagcatcctggacatcagcggcttcagcaagcagtacaactgtgccttcatctggcagaaggacggcgtgaagaagctgaacctgtacctgatcatcaactacttcaagggcggcaagctgcggttcaagaagatcaaacctgaagccttcgaagccaacagattctacaccgtgatcaacaaaaagagcggcgagatcgtgcccatggaggtgaacttcaacttcgacgaccccaacctgatcatcctgcctctggcctttggcaagagacagggcagagaattcatctggaacgacctgctgtccctggaaaccggcagcctgaagctggccaacggaagagtgatcgagaagacactgtacaacagaagaacccggcaggatgagcctgccctgttcgtggccctgaccttcgagcggcgggaggtcctggactcctccaatatcaaaccaatgaacctgatcggcgtggcaagaggcgaaaacatccccgccgtgatcgccctgaccgaccccgagggctgcccactgagccggtttaaggatagcctgggaaacccaacccacatcctgagaatcggcgagagctataaggagaagcagcggaccatccaggccaagaaggaggtggagcagcggagagccggcggctacagccggaagtacgccagcaaagccaagaatctggcagacgatatggtgagaaacaccgctagagatctgctgtactacgccgtgacccaggatgccatgctgatcttcgccaacctgagccggggcttcggccggcagggcaagcggaccttcatggccgagagacagtacacacggatggaggactggctgaccgccaagctggcctacgagggcctgagcaagacctacctgtccaagacactggcccagtacacctccaagacatgcagcaactgtgggtttaccatcaccagcgccgactacgacagggtgctggagaagctgaagaagacagcaacaggctggatgaccacaattaacggcaaggagctgaaggtggagggccagattacctactacaacagatacaagagacagaacgtagtcaaggacctgtccgtcgagctggatagactgagcgaagaatctgtgaacaacgacatctcctcctggacaaagggcagaagcggagaagctctgagcctcctgaagaaaagattctcccatagacccgtgcaggagaagttcgtgtgcctgaactgcggcttcgagacacacgcagccgagcaagccgccctgaacatcgccagatcctggctgttcctgcggagccaggagtacaagaaataccagacaaacaagacaaccggcaacaccgataagagagccttcgtcgagacctggcagtccttttaccggaagaagcttaaggaggtgtggaaacctgccgtgcggtctggcggatctggcggaggctccaccagccccaagaaaaagagaaaagtctaagctgccttctgcggggcttgccttctggccatgcccttcttctctcccttgcacctgtacctcttggtctttgaataaagcctgagtaggaaggctagcaaaaaaaaaaaaaaaaaaaaaaaaaaaaaaaaaaaaaaaaaaaaaaaaaaaaaaaaaaaaaaaaaaaaaaaaaaaaaaaa

SEQ ID NO: 12405 - RNA, 5785 nt, synthetic construct
  source 1..5785: mol_type = other RNA
aggaaataagagagaaaagaagagtaagaagaaatataagagccaccatggcccctaagaagaagcgtaaagtgagccggatggaacgcctcgtctacgaggtgcggcagaagtgcagaaacatcgaggacatctgcatctcctgcggatctctgaacgtgaccctggagcacccactgttcatcggcggcatgtgccagaactgtaaaaactgttttctggagtgtgcctatcaatacgacgatgacggctaccagagctactgcaccatctgttgcggcggaagagaggtgctgatgtgtggaaataacaactgctgccggtgcttctgcgtggaatgcgtggacctgctggtgggccccggcgccgcccaggccgctattaaggaagatccttggaactgctacatgtgcggccacaagggcacatacggcctgctgagacggagagaggactggcctagcagactgcagatgttcttcgccaataaccacgaccaggagttcgacccccctaaggtgtaccctcccgtccccgccgagaagagaaagcccatccgggtcctgagcctgttcgatggcatcgccaccggtctgctggtgctgaaggacctgggcatccaggtggataggtacattgcctccgaggtgtgcgaggactccatcaccgtgggaatggtgcgtcatcagggcaagatcatgtacgtgggcgacgtgcggagcgtgacacagaagcatatccaggagtggggccctttcgacctggtgatcggcggcagcccttgcaatgacctgagcatcgtgaacccagcccggaagggcctgtacgagggaaccggcagactgttcttcgagttttacagactgctgcacgacgcccggcctaaggaaggcgacgaccggcccttcttttggctgttcgagaatgtggtggccatgggagtcagcgacaagcgggatattagccggttcctggagagcaaccccgtgatgatcgatgccaaggaagtgagcgccgcccaccgggccagatacttctggggcaatctgcctggcatgaacagacccctggccagcaccgtgaacgacaagctggagctgcaggagtgcctggagcacggccggatcgccaagttcagcaaggtgagaaccatcaccacccgaagcaacagcatcaaacaaggcaaggaccagcactttcctgtgttcatgaacgagaaggaggacatcctgtggtgtaccgagatggagagagtgttcgggttcccagtccactacacagatgtcagcaacatgtctagactggccagacagagactgctgggaagaagctggtccgtccctgtgatcagacacctgttcgcccctctgaaggagtacttcgcctgcgtgagcagcggcaacagcaacgccaacagccggggccccagcttctctagcggcctggtgccactgtccctgagagggagccacatgggccccatggagatctacaaaaccgtgagcgcctggaagcggcagcctgtgcgcgtgctgagcctgtttcggaatatcgataaagtcctgaaaagcctgggattcctggagagcggctctggctccggcggtggcaccctgaagtacgtggaggatgtgacaaacgtggtcagacgggatgtggagaagtggggccccttcgatctggtgtacggcagcacccaacccctgggcagctcttgtgaccggtgccctggctggtacatgtttcagttccaccggatcctgcagtacgccctgccgagacaggagtcccagcggccattcttttggattttcatggacaacttgctgctgaccgaggatgaccaggaaactaccactcggttcctgcagaccgaagccgtgaccctgcaggacgtgagaggccgggactaccagaacgccatgcgggtgtggtccaacatccctggactgaaaagcaagcacgcacctctgacccctaaagaagaggagtacctgcaggcccaggtgcggagcagaagcaagctggacgcccctaaggtggatctgctggtgaagaattgcctcctgcccctgagagagtacttcaagtatttcagccagaatagtctgcccctgggaggcagcggcggcggcctgctgaccttcgaggacgtggccgtgagcttcagcgaggaggagtgggagctgctggaccccccccagaagaccctgtacaacgacgtgatgcaggagaactacgagaccgtgatcagcctgggcctgaagctgaagaacgacaccggcaacgaccagcccatcagcatcagcgccctggagatgcaggccagcggcagcaaggtgctgaggaaggccaggatgaaggtggcccagaagaccggcggcccaagcagcggcgcccctcctcccagcggcggcagcccagccggctccccaacctctaccgaggagggcacctctgagtccgccacccccgagagcggccctggcacctccaccgagcccagcgagggcagcgcacccggcagccctgccggcagccccacctccacagaggagggaaccagcaccgagcccagcgaaggcagcgccccaggcaccagcaccgagcctagtgagcaggagattaaacggatcaacaagatcagaagaagacttgtgaaagacagcaacaccaagaaggccggcaagacaggccccatgaaaaccctgctggttagagtgatgacacccgatctgagagagcggctggaaaacctgagaaagaagcctgaaaatatcccccagcccatcagcaatacatctagagccaacctgaataagctgctgaccgattacaccgaaatgaagaaggcgatcctgcatgtgtactgggaagagttccagaaggaccctgtgggcctgatgagccgggtggcccagcctgccagcaagaagatcgatcagaacaagctgaaacctgagatggacgagaagggcaacctgaccaccgccggctttgcctgctctcagtgtggccagcccctgttcgtgtacaagctggagcaggtgtctgagaagggcaaggcttacaccaactacttcggacggtgcaatgtggccgagcacgaaaagctgatcctgctggcccagctgaagcccgagaaggatagcgacgaagccgtgacatatagcctgggaaagtttgggcagagggccctggatttctacagcattcatgtgaccaaggagtccacccaccccgtgaagcccctggcccagatcgccggaaacagatacgcctccggacctgtgggaaaggccctgagcgacgcatgtatgggcacaatcgcctccttcctgtctaagtaccaggacatcatcatcgaacaccagaaggtggtgaagggcaaccagaagagactggagagcctgcgggagctggccggcaaggaaaacctggaataccctagcgtgaccctgccacctcagcctcacaccaaggagggcgttgatgcctacaacgaagtgatcgcccgggtgcgaatgtgggtgaacctgaacctgtggcagaagctgaagctaagcagagatgatgccaagcctctgctgagactgaagggattcccttcctttcctctggtcgagagacaggccaacgaagtggactggtgggacatggtgtgtaacgtgaagaagctgatcaacgagaaaaaggaggatggcaaggtgttttggcagaatctggctggctacaagagacaggaagccctgagaccatacctgagcagcgaggaagatcggaagaagggaaagaaattcgctcggtaccagctgggcgacctgctgctgcacctggaaaagaagcacggcgaggactggggaaaggtgtacgacgaggcctgggagcggattgacaagaaagtggaaggcctgagcaagcacatcaagctggaagaggaacggagaagcgaggacgcccagagcaaggccgccctgaccgactggctgcgggctaaggccagcttcgtgatcgagggcctgaaggaggccgacaaggacgagttctgcagatgcgagctgaagctgcagaagtggtacggggacctgcggggaaagcccttcgccatcgaagccgagaacagcatcctggacatcagcggcttcagcaagcagtacaactgtgccttcatctggcagaaggacggcgtgaagaagctgaacctgtacctgatcatcaactacttcaagggcggcaagctgcggttcaagaagatcaaacctgaagccttcgaagccaacagattctacaccgtgatcaacaaaaagagcggcgagatcgtgcccatggaggtgaacttcaacttcgacgaccccaacctgatcatcctgcctctggcctttggcaagagacagggcagagaattcatctggaacgacctgctgtccctggaaaccggcagcctgaagctggccaacggaagagtgatcgagaagacactgtacaacagaagaacccggcaggatgagcctgccctgttcgtggccctgaccttcgagcggcgggaggtcctggactcctccaatatcaaaccaatgaacctgatcggcgtggcaagaggcgaaaacatccccgccgtgatcgccctgaccgaccccgagggctgcccactgagccggtttaaggatagcctgggaaacccaacccacatcctgagaatcggcgagagctataaggagaagcagcggaccatccaggccaagaaggaggtggagcagcggagagccggcggctacagccggaagtacgccagcaaagccaagaatctggcagacgatatggtgagaaacaccgctagagatctgctgtactacgccgtgacccaggatgccatgctgatcttcgccaacctgagccggggcttcggccggcagggcaagcggaccttcatggccgagagacagtacacacggatggaggactggctgaccgccaagctggcctacgagggcctgagcaagacctacctgtccaagacactggcccagtacacctccaagacatgcagcaactgtgggtttaccatcaccagcgccgactacgacagggtgctggagaagctgaagaagacagcaacaggctggatgaccacaattaacggcaaggagctgaaggtggagggccagattacctactacaacagatacaagagacagaacgtagtcaaggacctgtccgtcgagctggatagactgagcgaagaatctgtgaacaacgacatctcctcctggacaaagggcagaagcggagaagctctgagcctcctgaagaaaagattctcccatagacccgtgcaggagaagttcgtgtgcctgaactgcggcttcgagacacacgcagccgagcaagccgccctgaacatcgccagatcctggctgttcctgcggagccaggagtacaagaaataccagacaaacaagacaaccggcaacaccgataagagagccttcgtcgagacctggcagtccttttaccggaagaagcttaaggaggtgtggaaacctgccgtgcggtctggcggatctggcggaggctccaccagccccaagaaaaagagaaaagtctaagctgccttctgcggggcttgccttctggccatgcccttcttctctcccttgcacctgtacctcttggtctttgaataaagcctgagtaggaaggctagcaaaaaaaaaaaaaaaaaaaaaaaaaaaaaaaaaaaaaaaaaaaaaaaaaaaaaaaaaaaaaaaaaaaaaaaaaaaaaaaa

SEQ ID NO: 12406 - RNA, 5785 nt, synthetic construct
  source 1..5785: mol_type = other RNA
aggaaataagagagaaaagaagagtaagaagaaatataagagccaccatggcccctaagaagaagcgtaaagtgagccggatggaacgcctcgtctacgaggtgcggcagaagtgcagaaacatcgaggacatctgcatctcctgcggatctctgaacgtgaccctggagcacccactgttcatcggcggcatgtgccagaactgtaaaaactgttttctggagtgtgcctatcaatacgacgatgacggctaccagagctactgcaccatctgttgcggcggaagagaggtgctgatgtgtggaaataacaactgctgccggtgcttctgcgtggaatgcgtggacctgctggtgggccccggcgccgcccaggccgctattaaggaagatccttggaactgctacatgtgcggccacaagggcacatacggcctgctgagacggagagaggactggcctagcagactgcagatgttcttcgccaataaccacgaccaggagttcgacccccctaaggtgtaccctcccgtccccgccgagaagagaaagcccatccgggtcctgagcctgttcgatggcatcgccaccggtctgctggtgctgaaggacctgggcatccaggtggataggtacattgcctccgaggtgtgcgaggactccatcaccgtgggaatggtgcgtcatcagggcaagatcatgtacgtgggcgacgtgcggagcgtgacacagaagcatatccaggagtggggccctttcgacctggtgatcggcggcagcccttgcaatgacctgagcatcgtgaacccagcccggaagggcctgtacgagggaaccggcagactgttcttcgagttttacagactgctgcacgacgcccggcctaaggaaggcgacgaccggcccttcttttggctgttcgagaatgtggtggccatgggagtcagcgacaagcgggatattagccggttcctggagagcaaccccgtgatgatcgatgccaaggaagtgagcgccgcccaccgggccagatacttctggggcaatctgcctggcatgaacagacccctggccagcaccgtgaacgacaagctggagctgcaggagtgcctggagcacggccggatcgccaagttcagcaaggtgagaaccatcaccacccgaagcaacagcatcaaacaaggcaaggaccagcactttcctgtgttcatgaacgagaaggaggacatcctgtggtgtaccgagatggagagagtgttcgggttcccagtccactacacagatgtcagcaacatgtctagactggccagacagagactgctgggaagaagctggtccgtccctgtgatcagacacctgttcgcccctctgaaggagtacttcgcctgcgtgagcagcggcaacagcaacgccaacagccggggccccagcttctctagcggcctggtgccactgtccctgagagggagccacatgggccccatggagatctacaaaaccgtgagcgcctggaagcggcagcctgtgcgcgtgctgagcctgtttcggaatatcgataaagtcctgaaaagcctgggattcctggagagcggctctggctccggcggtggcaccctgaagtacgtggaggatgtgacaaacgtggtcagacgggatgtggagaagtggggccccttcgatctggtgtacggcagcacccaacccctgggcagctcttgtgaccggtgccctggctggtacatgtttcagttccaccggatcctgcagtacgccctgccgagacaggagtcccagcggccattcttttggattttcatggacaacttgctgctgaccgaggatgaccaggaaactaccactcggttcctgcagaccgaagccgtgaccctgcaggacgtgagaggccgggactaccagaacgccatgcgggtgtggtccaacatccctggactgaaaagcaagcacgcacctctgacccctaaagaagaggagtacctgcaggcccaggtgcggagcagaagcaagctggacgcccctaaggtggatctgctggtgaagaattgcctcctgcccctgagagagtacttcaagtatttcagccagaatagtctgcccctgggaggcagcggcggcggcgagcccgtgagcttcgaggaggtggccgtgtacttcagcagggaggagtgggccctgctggaccccgcccagagggccctgtacaggcacgtgatgctggagacctacgagtgcgtggccagcctggcccccctgcccgcccccaagcccatggtgatcagcctgctggaggagggcgaggagccctggatccccgacgagggcagcaggcaggccgtggccggcgacgtgagccccggcgagggcggcccaagcagcggcgcccctcctcccagcggcggcagcccagccggctccccaacctctaccgaggagggcacctctgagtccgccacccccgagagcggccctggcacctccaccgagcccagcgagggcagcgcacccggcagccctgccggcagccccacctccacagaggagggaaccagcaccgagcccagcgaaggcagcgccccaggcaccagcaccgagcctagtgagcaggagattaaacggatcaacaagatcagaagaagacttgtgaaagacagcaacaccaagaaggccggcaagacaggccccatgaaaaccctgctggttagagtgatgacacccgatctgagagagcggctggaaaacctgagaaagaagcctgaaaatatcccccagcccatcagcaatacatctagagccaacctgaataagctgctgaccgattacaccgaaatgaagaaggcgatcctgcatgtgtactgggaagagttccagaaggaccctgtgggcctgatgagccgggtggcccagcctgccagcaagaagatcgatcagaacaagctgaaacctgagatggacgagaagggcaacctgaccaccgccggctttgcctgctctcagtgtggccagcccctgttcgtgtacaagctggagcaggtgtctgagaagggcaaggcttacaccaactacttcggacggtgcaatgtggccgagcacgaaaagctgatcctgctggcccagctgaagcccgagaaggatagcgacgaagccgtgacatatagcctgggaaagtttgggcagagggccctggatttctacagcattcatgtgaccaaggagtccacccaccccgtgaagcccctggcccagatcgccggaaacagatacgcctccggacctgtgggaaaggccctgagcgacgcatgtatgggcacaatcgcctccttcctgtctaagtaccaggacatcatcatcgaacaccagaaggtggtgaagggcaaccagaagagactggagagcctgcgggagctggccggcaaggaaaacctggaataccctagcgtgaccctgccacctcagcctcacaccaaggagggcgttgatgcctacaacgaagtgatcgcccgggtgcgaatgtgggtgaacctgaacctgtggcagaagctgaagctaagcagagatgatgccaagcctctgctgagactgaagggattcccttcctttcctctggtcgagagacaggccaacgaagtggactggtgggacatggtgtgtaacgtgaagaagctgatcaacgagaaaaaggaggatggcaaggtgttttggcagaatctggctggctacaagagacaggaagccctgagaccatacctgagcagcgaggaagatcggaagaagggaaagaaattcgctcggtaccagctgggcgacctgctgctgcacctggaaaagaagcacggcgaggactggggaaaggtgtacgacgaggcctgggagcggattgacaagaaagtggaaggcctgagcaagcacatcaagctggaagaggaacggagaagcgaggacgcccagagcaaggccgccctgaccgactggctgcgggctaaggccagcttcgtgatcgagggcctgaaggaggccgacaaggacgagttctgcagatgcgagctgaagctgcagaagtggtacggggacctgcggggaaagcccttcgccatcgaagccgagaacagcatcctggacatcagcggcttcagcaagcagtacaactgtgccttcatctggcagaaggacggcgtgaagaagctgaacctgtacctgatcatcaactacttcaagggcggcaagctgcggttcaagaagatcaaacctgaagccttcgaagccaacagattctacaccgtgatcaacaaaaagagcggcgagatcgtgcccatggaggtgaacttcaacttcgacgaccccaacctgatcatcctgcctctggcctttggcaagagacagggcagagaattcatctggaacgacctgctgtccctggaaaccggcagcctgaagctggccaacggaagagtgatcgagaagacactgtacaacagaagaacccggcaggatgagcctgccctgttcgtggccctgaccttcgagcggcgggaggtcctggactcctccaatatcaaaccaatgaacctgatcggcgtggcaagaggcgaaaacatccccgccgtgatcgccctgaccgaccccgagggctgcccactgagccggtttaaggatagcctgggaaacccaacccacatcctgagaatcggcgagagctataaggagaagcagcggaccatccaggccaagaaggaggtggagcagcggagagccggcggctacagccggaagtacgccagcaaagccaagaatctggcagacgatatggtgagaaacaccgctagagatctgctgtactacgccgtgacccaggatgccatgctgatcttcgccaacctgagccggggcttcggccggcagggcaagcggaccttcatggccgagagacagtacacacggatggaggactggctgaccgccaagctggcctacgagggcctgagcaagacctacctgtccaagacactggcccagtacacctccaagacatgcagcaactgtgggtttaccatcaccagcgccgactacgacagggtgctggagaagctgaagaagacagcaacaggctggatgaccacaattaacggcaaggagctgaaggtggagggccagattacctactacaacagatacaagagacagaacgtagtcaaggacctgtccgtcgagctggatagactgagcgaagaatctgtgaacaacgacatctcctcctggacaaagggcagaagcggagaagctctgagcctcctgaagaaaagattctcccatagacccgtgcaggagaagttcgtgtgcctgaactgcggcttcgagacacacgcagccgagcaagccgccctgaacatcgccagatcctggctgttcctgcggagccaggagtacaagaaataccagacaaacaagacaaccggcaacaccgataagagagccttcgtcgagacctggcagtccttttaccggaagaagcttaaggaggtgtggaaacctgccgtgcggtctggcggatctggcggaggctccaccagccccaagaaaaagagaaaagtctaagctgccttctgcggggcttgccttctggccatgcccttcttctctcccttgcacctgtacctcttggtctttgaataaagcctgagtaggaaggctagcaaaaaaaaaaaaaaaaaaaaaaaaaaaaaaaaaaaaaaaaaaaaaaaaaaaaaaaaaaaaaaaaaaaaaaaaaaaaaaaa

SEQ ID NO: 12407 - RNA, 5785 nt, synthetic construct
  source 1..5785: mol_type = other RNA
aggaaataagagagaaaagaagagtaagaagaaatataagagccaccatggcccctaagaagaagcgtaaagtgagccggatggaacgcctcgtctacgaggtgcggcagaagtgcagaaacatcgaggacatctgcatctcctgcggatctctgaacgtgaccctggagcacccactgttcatcggcggcatgtgccagaactgtaaaaactgttttctggagtgtgcctatcaatacgacgatgacggctaccagagctactgcaccatctgttgcggcggaagagaggtgctgatgtgtggaaataacaactgctgccggtgcttctgcgtggaatgcgtggacctgctggtgggccccggcgccgcccaggccgctattaaggaagatccttggaactgctacatgtgcggccacaagggcacatacggcctgctgagacggagagaggactggcctagcagactgcagatgttcttcgccaataaccacgaccaggagttcgacccccctaaggtgtaccctcccgtccccgccgagaagagaaagcccatccgggtcctgagcctgttcgatggcatcgccaccggtctgctggtgctgaaggacctgggcatccaggtggataggtacattgcctccgaggtgtgcgaggactccatcaccgtgggaatggtgcgtcatcagggcaagatcatgtacgtgggcgacgtgcggagcgtgacacagaagcatatccaggagtggggccctttcgacctggtgatcggcggcagcccttgcaatgacctgagcatcgtgaacccagcccggaagggcctgtacgagggaaccggcagactgttcttcgagttttacagactgctgcacgacgcccggcctaaggaaggcgacgaccggcccttcttttggctgttcgagaatgtggtggccatgggagtcagcgacaagcgggatattagccggttcctggagagcaaccccgtgatgatcgatgccaaggaagtgagcgccgcccaccgggccagatacttctggggcaatctgcctggcatgaacagacccctggccagcaccgtgaacgacaagctggagctgcaggagtgcctggagcacggccggatcgccaagttcagcaaggtgagaaccatcaccacccgaagcaacagcatcaaacaaggcaaggaccagcactttcctgtgttcatgaacgagaaggaggacatcctgtggtgtaccgagatggagagagtgttcgggttcccagtccactacacagatgtcagcaacatgtctagactggccagacagagactgctgggaagaagctggtccgtccctgtgatcagacacctgttcgcccctctgaaggagtacttcgcctgcgtgagcagcggcaacagcaacgccaacagccggggccccagcttctctagcggcctggtgccactgtccctgagagggagccacatgggccccatggagatctacaaaaccgtgagcgcctggaagcggcagcctgtgcgcgtgctgagcctgtttcggaatatcgataaagtcctgaaaagcctgggattcctggagagcggctctggctccggcggtggcaccctgaagtacgtggaggatgtgacaaacgtggtcagacgggatgtggagaagtggggccccttcgatctggtgtacggcagcacccaacccctgggcagctcttgtgaccggtgccctggctggtacatgtttcagttccaccggatcctgcagtacgccctgccgagacaggagtcccagcggccattcttttggattttcatggacaacttgctgctgaccgaggatgaccaggaaactaccactcggttcctgcagaccgaagccgtgaccctgcaggacgtgagaggccgggactaccagaacgccatgcgggtgtggtccaacatccctggactgaaaagcaagcacgcacctctgacccctaaagaagaggagtacctgcaggcccaggtgcggagcagaagcaagctggacgcccctaaggtggatctgctggtgaagaattgcctcctgcccctgagagagtacttcaagtatttcagccagaatagtctgcccctgggaggcagcggcggcggccaggccgaggtgaccttcgaggacgtggccgtgctgttcagcagggaggagtggggcaggctgggccccgcccagaggggcctgtacagggacgtgatgctggagacctacaggaacctggtgagcctgggcgccggccccgccggccccaagcccggcgtgatcacccagctggagaggggcgacgagccctgggtgctggacgcccagggcaccgagggcaaggagaggctgagggtgagcggcggcccaagcagcggcgcccctcctcccagcggcggcagcccagccggctccccaacctctaccgaggagggcacctctgagtccgccacccccgagagcggccctggcacctccaccgagcccagcgagggcagcgcacccggcagccctgccggcagccccacctccacagaggagggaaccagcaccgagcccagcgaaggcagcgccccaggcaccagcaccgagcctagtgagcaggagattaaacggatcaacaagatcagaagaagacttgtgaaagacagcaacaccaagaaggccggcaagacaggccccatgaaaaccctgctggttagagtgatgacacccgatctgagagagcggctggaaaacctgagaaagaagcctgaaaatatcccccagcccatcagcaatacatctagagccaacctgaataagctgctgaccgattacaccgaaatgaagaaggcgatcctgcatgtgtactgggaagagttccagaaggaccctgtgggcctgatgagccgggtggcccagcctgccagcaagaagatcgatcagaacaagctgaaacctgagatggacgagaagggcaacctgaccaccgccggctttgcctgctctcagtgtggccagcccctgttcgtgtacaagctggagcaggtgtctgagaagggcaaggcttacaccaactacttcggacggtgcaatgtggccgagcacgaaaagctgatcctgctggcccagctgaagcccgagaaggatagcgacgaagccgtgacatatagcctgggaaagtttgggcagagggccctggatttctacagcattcatgtgaccaaggagtccacccaccccgtgaagcccctggcccagatcgccggaaacagatacgcctccggacctgtgggaaaggccctgagcgacgcatgtatgggcacaatcgcctccttcctgtctaagtaccaggacatcatcatcgaacaccagaaggtggtgaagggcaaccagaagagactggagagcctgcgggagctggccggcaaggaaaacctggaataccctagcgtgaccctgccacctcagcctcacaccaaggagggcgttgatgcctacaacgaagtgatcgcccgggtgcgaatgtgggtgaacctgaacctgtggcagaagctgaagctaagcagagatgatgccaagcctctgctgagactgaagggattcccttcctttcctctggtcgagagacaggccaacgaagtggactggtgggacatggtgtgtaacgtgaagaagctgatcaacgagaaaaaggaggatggcaaggtgttttggcagaatctggctggctacaagagacaggaagccctgagaccatacctgagcagcgaggaagatcggaagaagggaaagaaattcgctcggtaccagctgggcgacctgctgctgcacctggaaaagaagcacggcgaggactggggaaaggtgtacgacgaggcctgggagcggattgacaagaaagtggaaggcctgagcaagcacatcaagctggaagaggaacggagaagcgaggacgcccagagcaaggccgccctgaccgactggctgcgggctaaggccagcttcgtgatcgagggcctgaaggaggccgacaaggacgagttctgcagatgcgagctgaagctgcagaagtggtacggggacctgcggggaaagcccttcgccatcgaagccgagaacagcatcctggacatcagcggcttcagcaagcagtacaactgtgccttcatctggcagaaggacggcgtgaagaagctgaacctgtacctgatcatcaactacttcaagggcggcaagctgcggttcaagaagatcaaacctgaagccttcgaagccaacagattctacaccgtgatcaacaaaaagagcggcgagatcgtgcccatggaggtgaacttcaacttcgacgaccccaacctgatcatcctgcctctggcctttggcaagagacagggcagagaattcatctggaacgacctgctgtccctggaaaccggcagcctgaagctggccaacggaagagtgatcgagaagacactgtacaacagaagaacccggcaggatgagcctgccctgttcgtggccctgaccttcgagcggcgggaggtcctggactcctccaatatcaaaccaatgaacctgatcggcgtggcaagaggcgaaaacatccccgccgtgatcgccctgaccgaccccgagggctgcccactgagccggtttaaggatagcctgggaaacccaacccacatcctgagaatcggcgagagctataaggagaagcagcggaccatccaggccaagaaggaggtggagcagcggagagccggcggctacagccggaagtacgccagcaaagccaagaatctggcagacgatatggtgagaaacaccgctagagatctgctgtactacgccgtgacccaggatgccatgctgatcttcgccaacctgagccggggcttcggccggcagggcaagcggaccttcatggccgagagacagtacacacggatggaggactggctgaccgccaagctggcctacgagggcctgagcaagacctacctgtccaagacactggcccagtacacctccaagacatgcagcaactgtgggtttaccatcaccagcgccgactacgacagggtgctggagaagctgaagaagacagcaacaggctggatgaccacaattaacggcaaggagctgaaggtggagggccagattacctactacaacagatacaagagacagaacgtagtcaaggacctgtccgtcgagctggatagactgagcgaagaatctgtgaacaacgacatctcctcctggacaaagggcagaagcggagaagctctgagcctcctgaagaaaagattctcccatagacccgtgcaggagaagttcgtgtgcctgaactgcggcttcgagacacacgcagccgagcaagccgccctgaacatcgccagatcctggctgttcctgcggagccaggagtacaagaaataccagacaaacaagacaaccggcaacaccgataagagagccttcgtcgagacctggcagtccttttaccggaagaagcttaaggaggtgtggaaacctgccgtgcggtctggcggatctggcggaggctccaccagccccaagaaaaagagaaaagtctaagctgccttctgcggggcttgccttctggccatgcccttcttctctcccttgcacctgtacctcttggtctttgaataaagcctgagtaggaaggctagcaaaaaaaaaaaaaaaaaaaaaaaaaaaaaaaaaaaaaaaaaaaaaaaaaaaaaaaaaaaaaaaaaaaaaaaaaaaaaaaa

SEQ ID NO: 12408 - RNA, 5785 nt, synthetic construct
  source 1..5785: mol_type = other RNA
aggaaataagagagaaaagaagagtaagaagaaatataagagccaccatggcccctaagaagaagcgtaaagtgagccggatggaacgcctcgtctacgaggtgcggcagaagtgcagaaacatcgaggacatctgcatctcctgcggatctctgaacgtgaccctggagcacccactgttcatcggcggcatgtgccagaactgtaaaaactgttttctggagtgtgcctatcaatacgacgatgacggctaccagagctactgcaccatctgttgcggcggaagagaggtgctgatgtgtggaaataacaactgctgccggtgcttctgcgtggaatgcgtggacctgctggtgggccccggcgccgcccaggccgctattaaggaagatccttggaactgctacatgtgcggccacaagggcacatacggcctgctgagacggagagaggactggcctagcagactgcagatgttcttcgccaataaccacgaccaggagttcgacccccctaaggtgtaccctcccgtccccgccgagaagagaaagcccatccgggtcctgagcctgttcgatggcatcgccaccggtctgctggtgctgaaggacctgggcatccaggtggataggtacattgcctccgaggtgtgcgaggactccatcaccgtgggaatggtgcgtcatcagggcaagatcatgtacgtgggcgacgtgcggagcgtgacacagaagcatatccaggagtggggccctttcgacctggtgatcggcggcagcccttgcaatgacctgagcatcgtgaacccagcccggaagggcctgtacgagggaaccggcagactgttcttcgagttttacagactgctgcacgacgcccggcctaaggaaggcgacgaccggcccttcttttggctgttcgagaatgtggtggccatgggagtcagcgacaagcgggatattagccggttcctggagagcaaccccgtgatgatcgatgccaaggaagtgagcgccgcccaccgggccagatacttctggggcaatctgcctggcatgaacagacccctggccagcaccgtgaacgacaagctggagctgcaggagtgcctggagcacggccggatcgccaagttcagcaaggtgagaaccatcaccacccgaagcaacagcatcaaacaaggcaaggaccagcactttcctgtgttcatgaacgagaaggaggacatcctgtggtgtaccgagatggagagagtgttcgggttcccagtccactacacagatgtcagcaacatgtctagactggccagacagagactgctgggaagaagctggtccgtccctgtgatcagacacctgttcgcccctctgaaggagtacttcgcctgcgtgagcagcggcaacagcaacgccaacagccggggccccagcttctctagcggcctggtgccactgtccctgagagggagccacatgggccccatggagatctacaaaaccgtgagcgcctggaagcggcagcctgtgcgcgtgctgagcctgtttcggaatatcgataaagtcctgaaaagcctgggattcctggagagcggctctggctccggcggtggcaccctgaagtacgtggaggatgtgacaaacgtggtcagacgggatgtggagaagtggggccccttcgatctggtgtacggcagcacccaacccctgggcagctcttgtgaccggtgccctggctggtacatgtttcagttccaccggatcctgcagtacgccctgccgagacaggagtcccagcggccattcttttggattttcatggacaacttgctgctgaccgaggatgaccaggaaactaccactcggttcctgcagaccgaagccgtgaccctgcaggacgtgagaggccgggactaccagaacgccatgcgggtgtggtccaacatccctggactgaaaagcaagcacgcacctctgacccctaaagaagaggagtacctgcaggcccaggtgcggagcagaagcaagctggacgcccctaaggtggatctgctggtgaagaattgcctcctgcccctgagagagtacttcaagtatttcagccagaatagtctgcccctgggaggcagcggcggcggccagccccagggcaccgtgaccttcaaggacgtggaggtgaccttcagccaggacgagtggggcctgctggacgccagccagaggaacctgtacagggacgtgatgctggagaactacggcaacatggccagcgtggtgggccccttcaccaagcccgccctgatcagctggctggaggccagggagccctggggcctgaacgtgcagggcgtgcagctgaagggcaaccccggcgccgcccccggcggcccaagcagcggcgcccctcctcccagcggcggcagcccagccggctccccaacctctaccgaggagggcacctctgagtccgccacccccgagagcggccctggcacctccaccgagcccagcgagggcagcgcacccggcagccctgccggcagccccacctccacagaggagggaaccagcaccgagcccagcgaaggcagcgccccaggcaccagcaccgagcctagtgagcaggagattaaacggatcaacaagatcagaagaagacttgtgaaagacagcaacaccaagaaggccggcaagacaggccccatgaaaaccctgctggttagagtgatgacacccgatctgagagagcggctggaaaacctgagaaagaagcctgaaaatatcccccagcccatcagcaatacatctagagccaacctgaataagctgctgaccgattacaccgaaatgaagaaggcgatcctgcatgtgtactgggaagagttccagaaggaccctgtgggcctgatgagccgggtggcccagcctgccagcaagaagatcgatcagaacaagctgaaacctgagatggacgagaagggcaacctgaccaccgccggctttgcctgctctcagtgtggccagcccctgttcgtgtacaagctggagcaggtgtctgagaagggcaaggcttacaccaactacttcggacggtgcaatgtggccgagcacgaaaagctgatcctgctggcccagctgaagcccgagaaggatagcgacgaagccgtgacatatagcctgggaaagtttgggcagagggccctggatttctacagcattcatgtgaccaaggagtccacccaccccgtgaagcccctggcccagatcgccggaaacagatacgcctccggacctgtgggaaaggccctgagcgacgcatgtatgggcacaatcgcctccttcctgtctaagtaccaggacatcatcatcgaacaccagaaggtggtgaagggcaaccagaagagactggagagcctgcgggagctggccggcaaggaaaacctggaataccctagcgtgaccctgccacctcagcctcacaccaaggagggcgttgatgcctacaacgaagtgatcgcccgggtgcgaatgtgggtgaacctgaacctgtggcagaagctgaagctaagcagagatgatgccaagcctctgctgagactgaagggattcccttcctttcctctggtcgagagacaggccaacgaagtggactggtgggacatggtgtgtaacgtgaagaagctgatcaacgagaaaaaggaggatggcaaggtgttttggcagaatctggctggctacaagagacaggaagccctgagaccatacctgagcagcgaggaagatcggaagaagggaaagaaattcgctcggtaccagctgggcgacctgctgctgcacctggaaaagaagcacggcgaggactggggaaaggtgtacgacgaggcctgggagcggattgacaagaaagtggaaggcctgagcaagcacatcaagctggaagaggaacggagaagcgaggacgcccagagcaaggccgccctgaccgactggctgcgggctaaggccagcttcgtgatcgagggcctgaaggaggccgacaaggacgagttctgcagatgcgagctgaagctgcagaagtggtacggggacctgcggggaaagcccttcgccatcgaagccgagaacagcatcctggacatcagcggcttcagcaagcagtacaactgtgccttcatctggcagaaggacggcgtgaagaagctgaacctgtacctgatcatcaactacttcaagggcggcaagctgcggttcaagaagatcaaacctgaagccttcgaagccaacagattctacaccgtgatcaacaaaaagagcggcgagatcgtgcccatggaggtgaacttcaacttcgacgaccccaacctgatcatcctgcctctggcctttggcaagagacagggcagagaattcatctggaacgacctgctgtccctggaaaccggcagcctgaagctggccaacggaagagtgatcgagaagacactgtacaacagaagaacccggcaggatgagcctgccctgttcgtggccctgaccttcgagcggcgggaggtcctggactcctccaatatcaaaccaatgaacctgatcggcgtggcaagaggcgaaaacatccccgccgtgatcgccctgaccgaccccgagggctgcccactgagccggtttaaggatagcctgggaaacccaacccacatcctgagaatcggcgagagctataaggagaagcagcggaccatccaggccaagaaggaggtggagcagcggagagccggcggctacagccggaagtacgccagcaaagccaagaatctggcagacgatatggtgagaaacaccgctagagatctgctgtactacgccgtgacccaggatgccatgctgatcttcgccaacctgagccggggcttcggccggcagggcaagcggaccttcatggccgagagacagtacacacggatggaggactggctgaccgccaagctggcctacgagggcctgagcaagacctacctgtccaagacactggcccagtacacctccaagacatgcagcaactgtgggtttaccatcaccagcgccgactacgacagggtgctggagaagctgaagaagacagcaacaggctggatgaccacaattaacggcaaggagctgaaggtggagggccagattacctactacaacagatacaagagacagaacgtagtcaaggacctgtccgtcgagctggatagactgagcgaagaatctgtgaacaacgacatctcctcctggacaaagggcagaagcggagaagctctgagcctcctgaagaaaagattctcccatagacccgtgcaggagaagttcgtgtgcctgaactgcggcttcgagacacacgcagccgagcaagccgccctgaacatcgccagatcctggctgttcctgcggagccaggagtacaagaaataccagacaaacaagacaaccggcaacaccgataagagagccttcgtcgagacctggcagtccttttaccggaagaagcttaaggaggtgtggaaacctgccgtgcggtctggcggatctggcggaggctccaccagccccaagaaaaagagaaaagtctaagctgccttctgcggggcttgccttctggccatgcccttcttctctcccttgcacctgtacctcttggtctttgaataaagcctgagtaggaaggctagcaaaaaaaaaaaaaaaaaaaaaaaaaaaaaaaaaaaaaaaaaaaaaaaaaaaaaaaaaaaaaaaaaaaaaaaaaaaaaaaa

SEQ ID NO: 12409 - RNA, 5785 nt, synthetic construct
  source 1..5785: mol_type = other RNA
aggaaataagagagaaaagaagagtaagaagaaatataagagccaccatggcccctaagaagaagcgtaaagtgagccggatggaacgcctcgtctacgaggtgcggcagaagtgcagaaacatcgaggacatctgcatctcctgcggatctctgaacgtgaccctggagcacccactgttcatcggcggcatgtgccagaactgtaaaaactgttttctggagtgtgcctatcaatacgacgatgacggctaccagagctactgcaccatctgttgcggcggaagagaggtgctgatgtgtggaaataacaactgctgccggtgcttctgcgtggaatgcgtggacctgctggtgggccccggcgccgcccaggccgctattaaggaagatccttggaactgctacatgtgcggccacaagggcacatacggcctgctgagacggagagaggactggcctagcagactgcagatgttcttcgccaataaccacgaccaggagttcgacccccctaaggtgtaccctcccgtccccgccgagaagagaaagcccatccgggtcctgagcctgttcgatggcatcgccaccggtctgctggtgctgaaggacctgggcatccaggtggataggtacattgcctccgaggtgtgcgaggactccatcaccgtgggaatggtgcgtcatcagggcaagatcatgtacgtgggcgacgtgcggagcgtgacacagaagcatatccaggagtggggccctttcgacctggtgatcggcggcagcccttgcaatgacctgagcatcgtgaacccagcccggaagggcctgtacgagggaaccggcagactgttcttcgagttttacagactgctgcacgacgcccggcctaaggaaggcgacgaccggcccttcttttggctgttcgagaatgtggtggccatgggagtcagcgacaagcgggatattagccggttcctggagagcaaccccgtgatgatcgatgccaaggaagtgagcgccgcccaccgggccagatacttctggggcaatctgcctggcatgaacagacccctggccagcaccgtgaacgacaagctggagctgcaggagtgcctggagcacggccggatcgccaagttcagcaaggtgagaaccatcaccacccgaagcaacagcatcaaacaaggcaaggaccagcactttcctgtgttcatgaacgagaaggaggacatcctgtggtgtaccgagatggagagagtgttcgggttcccagtccactacacagatgtcagcaacatgtctagactggccagacagagactgctgggaagaagctggtccgtccctgtgatcagacacctgttcgcccctctgaaggagtacttcgcctgcgtgagcagcggcaacagcaacgccaacagccggggccccagcttctctagcggcctggtgccactgtccctgagagggagccacatgggccccatggagatctacaaaaccgtgagcgcctggaagcggcagcctgtgcgcgtgctgagcctgtttcggaatatcgataaagtcctgaaaagcctgggattcctggagagcggctctggctccggcggtggcaccctgaagtacgtggaggatgtgacaaacgtggtcagacgggatgtggagaagtggggccccttcgatctggtgtacggcagcacccaacccctgggcagctcttgtgaccggtgccctggctggtacatgtttcagttccaccggatcctgcagtacgccctgccgagacaggagtcccagcggccattcttttggattttcatggacaacttgctgctgaccgaggatgaccaggaaactaccactcggttcctgcagaccgaagccgtgaccctgcaggacgtgagaggccgggactaccagaacgccatgcgggtgtggtccaacatccctggactgaaaagcaagcacgcacctctgacccctaaagaagaggagtacctgcaggcccaggtgcggagcagaagcaagctggacgcccctaaggtggatctgctggtgaagaattgcctcctgcccctgagagagtacttcaagtatttcagccagaatagtctgcccctgggaggcagcggcggcggccagccccagggcaccgtgaccttcaaggacgtggaggtgaccttcagccaggacgagtggggcctgctggacgccagccagaggaacctgtacagggacgtgatgctggagaactacggcaacatggccagcgtggtgggccccttcaccaagcccgccctgatcagctggctggaggccagggagccctggggcctgaacgtgcagggcgtgcagttcaagggcaaccccggcgccgcccccggcggcccaagcagcggcgcccctcctcccagcggcggcagcccagccggctccccaacctctaccgaggagggcacctctgagtccgccacccccgagagcggccctggcacctccaccgagcccagcgagggcagcgcacccggcagccctgccggcagccccacctccacagaggagggaaccagcaccgagcccagcgaaggcagcgccccaggcaccagcaccgagcctagtgagcaggagattaaacggatcaacaagatcagaagaagacttgtgaaagacagcaacaccaagaaggccggcaagacaggccccatgaaaaccctgctggttagagtgatgacacccgatctgagagagcggctggaaaacctgagaaagaagcctgaaaatatcccccagcccatcagcaatacatctagagccaacctgaataagctgctgaccgattacaccgaaatgaagaaggcgatcctgcatgtgtactgggaagagttccagaaggaccctgtgggcctgatgagccgggtggcccagcctgccagcaagaagatcgatcagaacaagctgaaacctgagatggacgagaagggcaacctgaccaccgccggctttgcctgctctcagtgtggccagcccctgttcgtgtacaagctggagcaggtgtctgagaagggcaaggcttacaccaactacttcggacggtgcaatgtggccgagcacgaaaagctgatcctgctggcccagctgaagcccgagaaggatagcgacgaagccgtgacatatagcctgggaaagtttgggcagagggccctggatttctacagcattcatgtgaccaaggagtccacccaccccgtgaagcccctggcccagatcgccggaaacagatacgcctccggacctgtgggaaaggccctgagcgacgcatgtatgggcacaatcgcctccttcctgtctaagtaccaggacatcatcatcgaacaccagaaggtggtgaagggcaaccagaagagactggagagcctgcgggagctggccggcaaggaaaacctggaataccctagcgtgaccctgccacctcagcctcacaccaaggagggcgttgatgcctacaacgaagtgatcgcccgggtgcgaatgtgggtgaacctgaacctgtggcagaagctgaagctaagcagagatgatgccaagcctctgctgagactgaagggattcccttcctttcctctggtcgagagacaggccaacgaagtggactggtgggacatggtgtgtaacgtgaagaagctgatcaacgagaaaaaggaggatggcaaggtgttttggcagaatctggctggctacaagagacaggaagccctgagaccatacctgagcagcgaggaagatcggaagaagggaaagaaattcgctcggtaccagctgggcgacctgctgctgcacctggaaaagaagcacggcgaggactggggaaaggtgtacgacgaggcctgggagcggattgacaagaaagtggaaggcctgagcaagcacatcaagctggaagaggaacggagaagcgaggacgcccagagcaaggccgccctgaccgactggctgcgggctaaggccagcttcgtgatcgagggcctgaaggaggccgacaaggacgagttctgcagatgcgagctgaagctgcagaagtggtacggggacctgcggggaaagcccttcgccatcgaagccgagaacagcatcctggacatcagcggcttcagcaagcagtacaactgtgccttcatctggcagaaggacggcgtgaagaagctgaacctgtacctgatcatcaactacttcaagggcggcaagctgcggttcaagaagatcaaacctgaagccttcgaagccaacagattctacaccgtgatcaacaaaaagagcggcgagatcgtgcccatggaggtgaacttcaacttcgacgaccccaacctgatcatcctgcctctggcctttggcaagagacagggcagagaattcatctggaacgacctgctgtccctggaaaccggcagcctgaagctggccaacggaagagtgatcgagaagacactgtacaacagaagaacccggcaggatgagcctgccctgttcgtggccctgaccttcgagcggcgggaggtcctggactcctccaatatcaaaccaatgaacctgatcggcgtggcaagaggcgaaaacatccccgccgtgatcgccctgaccgaccccgagggctgcccactgagccggtttaaggatagcctgggaaacccaacccacatcctgagaatcggcgagagctataaggagaagcagcggaccatccaggccaagaaggaggtggagcagcggagagccggcggctacagccggaagtacgccagcaaagccaagaatctggcagacgatatggtgagaaacaccgctagagatctgctgtactacgccgtgacccaggatgccatgctgatcttcgccaacctgagccggggcttcggccggcagggcaagcggaccttcatggccgagagacagtacacacggatggaggactggctgaccgccaagctggcctacgagggcctgagcaagacctacctgtccaagacactggcccagtacacctccaagacatgcagcaactgtgggtttaccatcaccagcgccgactacgacagggtgctggagaagctgaagaagacagcaacaggctggatgaccacaattaacggcaaggagctgaaggtggagggccagattacctactacaacagatacaagagacagaacgtagtcaaggacctgtccgtcgagctggatagactgagcgaagaatctgtgaacaacgacatctcctcctggacaaagggcagaagcggagaagctctgagcctcctgaagaaaagattctcccatagacccgtgcaggagaagttcgtgtgcctgaactgcggcttcgagacacacgcagccgagcaagccgccctgaacatcgccagatcctggctgttcctgcggagccaggagtacaagaaataccagacaaacaagacaaccggcaacaccgataagagagccttcgtcgagacctggcagtccttttaccggaagaagcttaaggaggtgtggaaacctgccgtgcggtctggcggatctggcggaggctccaccagccccaagaaaaagagaaaagtctaagctgccttctgcggggcttgccttctggccatgcccttcttctctcccttgcacctgtacctcttggtctttgaataaagcctgagtaggaaggctagcaaaaaaaaaaaaaaaaaaaaaaaaaaaaaaaaaaaaaaaaaaaaaaaaaaaaaaaaaaaaaaaaaaaaaaaaaaaaaaaa

SEQ ID NO: 12410 - RNA, 5785 nt, synthetic construct
  source 1..5785: mol_type = other RNA
aggaaataagagagaaaagaagagtaagaagaaatataagagccaccatggcccctaagaagaagcgtaaagtgagccggatggaacgcctcgtctacgaggtgcggcagaagtgcagaaacatcgaggacatctgcatctcctgcggatctctgaacgtgaccctggagcacccactgttcatcggcggcatgtgccagaactgtaaaaactgttttctggagtgtgcctatcaatacgacgatgacggctaccagagctactgcaccatctgttgcggcggaagagaggtgctgatgtgtggaaataacaactgctgccggtgcttctgcgtggaatgcgtggacctgctggtgggccccggcgccgcccaggccgctattaaggaagatccttggaactgctacatgtgcggccacaagggcacatacggcctgctgagacggagagaggactggcctagcagactgcagatgttcttcgccaataaccacgaccaggagttcgacccccctaaggtgtaccctcccgtccccgccgagaagagaaagcccatccgggtcctgagcctgttcgatggcatcgccaccggtctgctggtgctgaaggacctgggcatccaggtggataggtacattgcctccgaggtgtgcgaggactccatcaccgtgggaatggtgcgtcatcagggcaagatcatgtacgtgggcgacgtgcggagcgtgacacagaagcatatccaggagtggggccctttcgacctggtgatcggcggcagcccttgcaatgacctgagcatcgtgaacccagcccggaagggcctgtacgagggaaccggcagactgttcttcgagttttacagactgctgcacgacgcccggcctaaggaaggcgacgaccggcccttcttttggctgttcgagaatgtggtggccatgggagtcagcgacaagcgggatattagccggttcctggagagcaaccccgtgatgatcgatgccaaggaagtgagcgccgcccaccgggccagatacttctggggcaatctgcctggcatgaacagacccctggccagcaccgtgaacgacaagctggagctgcaggagtgcctggagcacggccggatcgccaagttcagcaaggtgagaaccatcaccacccgaagcaacagcatcaaacaaggcaaggaccagcactttcctgtgttcatgaacgagaaggaggacatcctgtggtgtaccgagatggagagagtgttcgggttcccagtccactacacagatgtcagcaacatgtctagactggccagacagagactgctgggaagaagctggtccgtccctgtgatcagacacctgttcgcccctctgaaggagtacttcgcctgcgtgagcagcggcaacagcaacgccaacagccggggccccagcttctctagcggcctggtgccactgtccctgagagggagccacatgggccccatggagatctacaaaaccgtgagcgcctggaagcggcagcctgtgcgcgtgctgagcctgtttcggaatatcgataaagtcctgaaaagcctgggattcctggagagcggctctggctccggcggtggcaccctgaagtacgtggaggatgtgacaaacgtggtcagacgggatgtggagaagtggggccccttcgatctggtgtacggcagcacccaacccctgggcagctcttgtgaccggtgccctggctggtacatgtttcagttccaccggatcctgcagtacgccctgccgagacaggagtcccagcggccattcttttggattttcatggacaacttgctgctgaccgaggatgaccaggaaactaccactcggttcctgcagaccgaagccgtgaccctgcaggacgtgagaggccgggactaccagaacgccatgcgggtgtggtccaacatccctggactgaaaagcaagcacgcacctctgacccctaaagaagaggagtacctgcaggcccaggtgcggagcagaagcaagctggacgcccctaaggtggatctgctggtgaagaattgcctcctgcccctgagagagtacttcaagtatttcagccagaatagtctgcccctgggaggcagcggcggcggcgtgcaggagcccgtgaccttcaaggacgtggccgtggacttcacccaggaggagtggggccagctggacctggtgcagaggaccctgtacagggacgtgatgctggagacctacggccacctgctgagcgtgggcaaccagatcgccaagcccgaggtgatcagcctgctggagcagggcgaggagccctggagcgtggagcaggcctgcccccagagggcctgccccgagtggatgaggaacggcggcccaagcagcggcgcccctcctcccagcggcggcagcccagccggctccccaacctctaccgaggagggcacctctgagtccgccacccccgagagcggccctggcacctccaccgagcccagcgagggcagcgcacccggcagccctgccggcagccccacctccacagaggagggaaccagcaccgagcccagcgaaggcagcgccccaggcaccagcaccgagcctagtgagcaggagattaaacggatcaacaagatcagaagaagacttgtgaaagacagcaacaccaagaaggccggcaagacaggccccatgaaaaccctgctggttagagtgatgacacccgatctgagagagcggctggaaaacctgagaaagaagcctgaaaatatcccccagcccatcagcaatacatctagagccaacctgaataagctgctgaccgattacaccgaaatgaagaaggcgatcctgcatgtgtactgggaagagttccagaaggaccctgtgggcctgatgagccgggtggcccagcctgccagcaagaagatcgatcagaacaagctgaaacctgagatggacgagaagggcaacctgaccaccgccggctttgcctgctctcagtgtggccagcccctgttcgtgtacaagctggagcaggtgtctgagaagggcaaggcttacaccaactacttcggacggtgcaatgtggccgagcacgaaaagctgatcctgctggcccagctgaagcccgagaaggatagcgacgaagccgtgacatatagcctgggaaagtttgggcagagggccctggatttctacagcattcatgtgaccaaggagtccacccaccccgtgaagcccctggcccagatcgccggaaacagatacgcctccggacctgtgggaaaggccctgagcgacgcatgtatgggcacaatcgcctccttcctgtctaagtaccaggacatcatcatcgaacaccagaaggtggtgaagggcaaccagaagagactggagagcctgcgggagctggccggcaaggaaaacctggaataccctagcgtgaccctgccacctcagcctcacaccaaggagggcgttgatgcctacaacgaagtgatcgcccgggtgcgaatgtgggtgaacctgaacctgtggcagaagctgaagctaagcagagatgatgccaagcctctgctgagactgaagggattcccttcctttcctctggtcgagagacaggccaacgaagtggactggtgggacatggtgtgtaacgtgaagaagctgatcaacgagaaaaaggaggatggcaaggtgttttggcagaatctggctggctacaagagacaggaagccctgagaccatacctgagcagcgaggaagatcggaagaagggaaagaaattcgctcggtaccagctgggcgacctgctgctgcacctggaaaagaagcacggcgaggactggggaaaggtgtacgacgaggcctgggagcggattgacaagaaagtggaaggcctgagcaagcacatcaagctggaagaggaacggagaagcgaggacgcccagagcaaggccgccctgaccgactggctgcgggctaaggccagcttcgtgatcgagggcctgaaggaggccgacaaggacgagttctgcagatgcgagctgaagctgcagaagtggtacggggacctgcggggaaagcccttcgccatcgaagccgagaacagcatcctggacatcagcggcttcagcaagcagtacaactgtgccttcatctggcagaaggacggcgtgaagaagctgaacctgtacctgatcatcaactacttcaagggcggcaagctgcggttcaagaagatcaaacctgaagccttcgaagccaacagattctacaccgtgatcaacaaaaagagcggcgagatcgtgcccatggaggtgaacttcaacttcgacgaccccaacctgatcatcctgcctctggcctttggcaagagacagggcagagaattcatctggaacgacctgctgtccctggaaaccggcagcctgaagctggccaacggaagagtgatcgagaagacactgtacaacagaagaacccggcaggatgagcctgccctgttcgtggccctgaccttcgagcggcgggaggtcctggactcctccaatatcaaaccaatgaacctgatcggcgtggcaagaggcgaaaacatccccgccgtgatcgccctgaccgaccccgagggctgcccactgagccggtttaaggatagcctgggaaacccaacccacatcctgagaatcggcgagagctataaggagaagcagcggaccatccaggccaagaaggaggtggagcagcggagagccggcggctacagccggaagtacgccagcaaagccaagaatctggcagacgatatggtgagaaacaccgctagagatctgctgtactacgccgtgacccaggatgccatgctgatcttcgccaacctgagccggggcttcggccggcagggcaagcggaccttcatggccgagagacagtacacacggatggaggactggctgaccgccaagctggcctacgagggcctgagcaagacctacctgtccaagacactggcccagtacacctccaagacatgcagcaactgtgggtttaccatcaccagcgccgactacgacagggtgctggagaagctgaagaagacagcaacaggctggatgaccacaattaacggcaaggagctgaaggtggagggccagattacctactacaacagatacaagagacagaacgtagtcaaggacctgtccgtcgagctggatagactgagcgaagaatctgtgaacaacgacatctcctcctggacaaagggcagaagcggagaagctctgagcctcctgaagaaaagattctcccatagacccgtgcaggagaagttcgtgtgcctgaactgcggcttcgagacacacgcagccgagcaagccgccctgaacatcgccagatcctggctgttcctgcggagccaggagtacaagaaataccagacaaacaagacaaccggcaacaccgataagagagccttcgtcgagacctggcagtccttttaccggaagaagcttaaggaggtgtggaaacctgccgtgcggtctggcggatctggcggaggctccaccagccccaagaaaaagagaaaagtctaagctgccttctgcggggcttgccttctggccatgcccttcttctctcccttgcacctgtacctcttggtctttgaataaagcctgagtaggaaggctagcaaaaaaaaaaaaaaaaaaaaaaaaaaaaaaaaaaaaaaaaaaaaaaaaaaaaaaaaaaaaaaaaaaaaaaaaaaaaaaaa

SEQ ID NO: 12411 - RNA, 5785 nt, synthetic construct
  source 1..5785: mol_type = other RNA
aggaaataagagagaaaagaagagtaagaagaaatataagagccaccatggcccctaagaagaagcgtaaagtgagccggatggaacgcctcgtctacgaggtgcggcagaagtgcagaaacatcgaggacatctgcatctcctgcggatctctgaacgtgaccctggagcacccactgttcatcggcggcatgtgccagaactgtaaaaactgttttctggagtgtgcctatcaatacgacgatgacggctaccagagctactgcaccatctgttgcggcggaagagaggtgctgatgtgtggaaataacaactgctgccggtgcttctgcgtggaatgcgtggacctgctggtgggccccggcgccgcccaggccgctattaaggaagatccttggaactgctacatgtgcggccacaagggcacatacggcctgctgagacggagagaggactggcctagcagactgcagatgttcttcgccaataaccacgaccaggagttcgacccccctaaggtgtaccctcccgtccccgccgagaagagaaagcccatccgggtcctgagcctgttcgatggcatcgccaccggtctgctggtgctgaaggacctgggcatccaggtggataggtacattgcctccgaggtgtgcgaggactccatcaccgtgggaatggtgcgtcatcagggcaagatcatgtacgtgggcgacgtgcggagcgtgacacagaagcatatccaggagtggggccctttcgacctggtgatcggcggcagcccttgcaatgacctgagcatcgtgaacccagcccggaagggcctgtacgagggaaccggcagactgttcttcgagttttacagactgctgcacgacgcccggcctaaggaaggcgacgaccggcccttcttttggctgttcgagaatgtggtggccatgggagtcagcgacaagcgggatattagccggttcctggagagcaaccccgtgatgatcgatgccaaggaagtgagcgccgcccaccgggccagatacttctggggcaatctgcctggcatgaacagacccctggccagcaccgtgaacgacaagctggagctgcaggagtgcctggagcacggccggatcgccaagttcagcaaggtgagaaccatcaccacccgaagcaacagcatcaaacaaggcaaggaccagcactttcctgtgttcatgaacgagaaggaggacatcctgtggtgtaccgagatggagagagtgttcgggttcccagtccactacacagatgtcagcaacatgtctagactggccagacagagactgctgggaagaagctggtccgtccctgtgatcagacacctgttcgcccctctgaaggagtacttcgcctgcgtgagcagcggcaacagcaacgccaacagccggggccccagcttctctagcggcctggtgccactgtccctgagagggagccacatgggccccatggagatctacaaaaccgtgagcgcctggaagcggcagcctgtgcgcgtgctgagcctgtttcggaatatcgataaagtcctgaaaagcctgggattcctggagagcggctctggctccggcggtggcaccctgaagtacgtggaggatgtgacaaacgtggtcagacgggatgtggagaagtggggccccttcgatctggtgtacggcagcacccaacccctgggcagctcttgtgaccggtgccctggctggtacatgtttcagttccaccggatcctgcagtacgccctgccgagacaggagtcccagcggccattcttttggattttcatggacaacttgctgctgaccgaggatgaccaggaaactaccactcggttcctgcagaccgaagccgtgaccctgcaggacgtgagaggccgggactaccagaacgccatgcgggtgtggtccaacatccctggactgaaaagcaagcacgcacctctgacccctaaagaagaggagtacctgcaggcccaggtgcggagcagaagcaagctggacgcccctaaggtggatctgctggtgaagaattgcctcctgcccctgagagagtacttcaagtatttcagccagaatagtctgcccctgggaggcagcggcggcggcatgaacgccgtgacctacgacgacgtgcacgtggacttcacctgggacgagtgggccctgctggaccccagccagaagaacctgtacaagaacgtgatgctggagacctacaggaacctgaccgccatcggctacaagtgggaggagcacaacatcaacgagaagttccagaggagcaggaggaacaggaggcacgagaggagccacaccggcgagaagagctacgagtgcaaccagtgcggcggcggcccaagcagcggcgcccctcctcccagcggcggcagcccagccggctccccaacctctaccgaggagggcacctctgagtccgccacccccgagagcggccctggcacctccaccgagcccagcgagggcagcgcacccggcagccctgccggcagccccacctccacagaggagggaaccagcaccgagcccagcgaaggcagcgccccaggcaccagcaccgagcctagtgagcaggagattaaacggatcaacaagatcagaagaagacttgtgaaagacagcaacaccaagaaggccggcaagacaggccccatgaaaaccctgctggttagagtgatgacacccgatctgagagagcggctggaaaacctgagaaagaagcctgaaaatatcccccagcccatcagcaatacatctagagccaacctgaataagctgctgaccgattacaccgaaatgaagaaggcgatcctgcatgtgtactgggaagagttccagaaggaccctgtgggcctgatgagccgggtggcccagcctgccagcaagaagatcgatcagaacaagctgaaacctgagatggacgagaagggcaacctgaccaccgccggctttgcctgctctcagtgtggccagcccctgttcgtgtacaagctggagcaggtgtctgagaagggcaaggcttacaccaactacttcggacggtgcaatgtggccgagcacgaaaagctgatcctgctggcccagctgaagcccgagaaggatagcgacgaagccgtgacatatagcctgggaaagtttgggcagagggccctggatttctacagcattcatgtgaccaaggagtccacccaccccgtgaagcccctggcccagatcgccggaaacagatacgcctccggacctgtgggaaaggccctgagcgacgcatgtatgggcacaatcgcctccttcctgtctaagtaccaggacatcatcatcgaacaccagaaggtggtgaagggcaaccagaagagactggagagcctgcgggagctggccggcaaggaaaacctggaataccctagcgtgaccctgccacctcagcctcacaccaaggagggcgttgatgcctacaacgaagtgatcgcccgggtgcgaatgtgggtgaacctgaacctgtggcagaagctgaagctaagcagagatgatgccaagcctctgctgagactgaagggattcccttcctttcctctggtcgagagacaggccaacgaagtggactggtgggacatggtgtgtaacgtgaagaagctgatcaacgagaaaaaggaggatggcaaggtgttttggcagaatctggctggctacaagagacaggaagccctgagaccatacctgagcagcgaggaagatcggaagaagggaaagaaattcgctcggtaccagctgggcgacctgctgctgcacctggaaaagaagcacggcgaggactggggaaaggtgtacgacgaggcctgggagcggattgacaagaaagtggaaggcctgagcaagcacatcaagctggaagaggaacggagaagcgaggacgcccagagcaaggccgccctgaccgactggctgcgggctaaggccagcttcgtgatcgagggcctgaaggaggccgacaaggacgagttctgcagatgcgagctgaagctgcagaagtggtacggggacctgcggggaaagcccttcgccatcgaagccgagaacagcatcctggacatcagcggcttcagcaagcagtacaactgtgccttcatctggcagaaggacggcgtgaagaagctgaacctgtacctgatcatcaactacttcaagggcggcaagctgcggttcaagaagatcaaacctgaagccttcgaagccaacagattctacaccgtgatcaacaaaaagagcggcgagatcgtgcccatggaggtgaacttcaacttcgacgaccccaacctgatcatcctgcctctggcctttggcaagagacagggcagagaattcatctggaacgacctgctgtccctggaaaccggcagcctgaagctggccaacggaagagtgatcgagaagacactgtacaacagaagaacccggcaggatgagcctgccctgttcgtggccctgaccttcgagcggcgggaggtcctggactcctccaatatcaaaccaatgaacctgatcggcgtggcaagaggcgaaaacatccccgccgtgatcgccctgaccgaccccgagggctgcccactgagccggtttaaggatagcctgggaaacccaacccacatcctgagaatcggcgagagctataaggagaagcagcggaccatccaggccaagaaggaggtggagcagcggagagccggcggctacagccggaagtacgccagcaaagccaagaatctggcagacgatatggtgagaaacaccgctagagatctgctgtactacgccgtgacccaggatgccatgctgatcttcgccaacctgagccggggcttcggccggcagggcaagcggaccttcatggccgagagacagtacacacggatggaggactggctgaccgccaagctggcctacgagggcctgagcaagacctacctgtccaagacactggcccagtacacctccaagacatgcagcaactgtgggtttaccatcaccagcgccgactacgacagggtgctggagaagctgaagaagacagcaacaggctggatgaccacaattaacggcaaggagctgaaggtggagggccagattacctactacaacagatacaagagacagaacgtagtcaaggacctgtccgtcgagctggatagactgagcgaagaatctgtgaacaacgacatctcctcctggacaaagggcagaagcggagaagctctgagcctcctgaagaaaagattctcccatagacccgtgcaggagaagttcgtgtgcctgaactgcggcttcgagacacacgcagccgagcaagccgccctgaacatcgccagatcctggctgttcctgcggagccaggagtacaagaaataccagacaaacaagacaaccggcaacaccgataagagagccttcgtcgagacctggcagtccttttaccggaagaagcttaaggaggtgtggaaacctgccgtgcggtctggcggatctggcggaggctccaccagccccaagaaaaagagaaaagtctaagctgccttctgcggggcttgccttctggccatgcccttcttctctcccttgcacctgtacctcttggtctttgaataaagcctgagtaggaaggctagcaaaaaaaaaaaaaaaaaaaaaaaaaaaaaaaaaaaaaaaaaaaaaaaaaaaaaaaaaaaaaaaaaaaaaaaaaaaaaaaa

SEQ ID NO: 12412 - RNA, 5785 nt, synthetic construct
  source 1..5785: mol_type = other RNA
aggaaataagagagaaaagaagagtaagaagaaatataagagccaccatggcccctaagaagaagcgtaaagtgagccggatggaacgcctcgtctacgaggtgcggcagaagtgcagaaacatcgaggacatctgcatctcctgcggatctctgaacgtgaccctggagcacccactgttcatcggcggcatgtgccagaactgtaaaaactgttttctggagtgtgcctatcaatacgacgatgacggctaccagagctactgcaccatctgttgcggcggaagagaggtgctgatgtgtggaaataacaactgctgccggtgcttctgcgtggaatgcgtggacctgctggtgggccccggcgccgcccaggccgctattaaggaagatccttggaactgctacatgtgcggccacaagggcacatacggcctgctgagacggagagaggactggcctagcagactgcagatgttcttcgccaataaccacgaccaggagttcgacccccctaaggtgtaccctcccgtccccgccgagaagagaaagcccatccgggtcctgagcctgttcgatggcatcgccaccggtctgctggtgctgaaggacctgggcatccaggtggataggtacattgcctccgaggtgtgcgaggactccatcaccgtgggaatggtgcgtcatcagggcaagatcatgtacgtgggcgacgtgcggagcgtgacacagaagcatatccaggagtggggccctttcgacctggtgatcggcggcagcccttgcaatgacctgagcatcgtgaacccagcccggaagggcctgtacgagggaaccggcagactgttcttcgagttttacagactgctgcacgacgcccggcctaaggaaggcgacgaccggcccttcttttggctgttcgagaatgtggtggccatgggagtcagcgacaagcgggatattagccggttcctggagagcaaccccgtgatgatcgatgccaaggaagtgagcgccgcccaccgggccagatacttctggggcaatctgcctggcatgaacagacccctggccagcaccgtgaacgacaagctggagctgcaggagtgcctggagcacggccggatcgccaagttcagcaaggtgagaaccatcaccacccgaagcaacagcatcaaacaaggcaaggaccagcactttcctgtgttcatgaacgagaaggaggacatcctgtggtgtaccgagatggagagagtgttcgggttcccagtccactacacagatgtcagcaacatgtctagactggccagacagagactgctgggaagaagctggtccgtccctgtgatcagacacctgttcgcccctctgaaggagtacttcgcctgcgtgagcagcggcaacagcaacgccaacagccggggccccagcttctctagcggcctggtgccactgtccctgagagggagccacatgggccccatggagatctacaaaaccgtgagcgcctggaagcggcagcctgtgcgcgtgctgagcctgtttcggaatatcgataaagtcctgaaaagcctgggattcctggagagcggctctggctccggcggtggcaccctgaagtacgtggaggatgtgacaaacgtggtcagacgggatgtggagaagtggggccccttcgatctggtgtacggcagcacccaacccctgggcagctcttgtgaccggtgccctggctggtacatgtttcagttccaccggatcctgcagtacgccctgccgagacaggagtcccagcggccattcttttggattttcatggacaacttgctgctgaccgaggatgaccaggaaactaccactcggttcctgcagaccgaagccgtgaccctgcaggacgtgagaggccgggactaccagaacgccatgcgggtgtggtccaacatccctggactgaaaagcaagcacgcacctctgacccctaaagaagaggagtacctgcaggcccaggtgcggagcagaagcaagctggacgcccctaaggtggatctgctggtgaagaattgcctcctgcccctgagagagtacttcaagtatttcagccagaatagtctgcccctgggaggcagcggcggcggcgtgaacgacctggtgaccttcaaggacgtggccatcgacttcagccaggaggagtggcagtggatgaaccccgcccagaagaggctgtacaggagcatgatgctggagaactaccagagcctggtgagcctgggcctgtgcgtgagcaagccctacgtgatcagcctgctggagcagggcagggagccctgggagatgaccagcgagatgaggaggagccccttcagcgactgggagagcatcggcggcccaagcagcggcgcccctcctcccagcggcggcagcccagccggctccccaacctctaccgaggagggcacctctgagtccgccacccccgagagcggccctggcacctccaccgagcccagcgagggcagcgcacccggcagccctgccggcagccccacctccacagaggagggaaccagcaccgagcccagcgaaggcagcgccccaggcaccagcaccgagcctagtgagcaggagattaaacggatcaacaagatcagaagaagacttgtgaaagacagcaacaccaagaaggccggcaagacaggccccatgaaaaccctgctggttagagtgatgacacccgatctgagagagcggctggaaaacctgagaaagaagcctgaaaatatcccccagcccatcagcaatacatctagagccaacctgaataagctgctgaccgattacaccgaaatgaagaaggcgatcctgcatgtgtactgggaagagttccagaaggaccctgtgggcctgatgagccgggtggcccagcctgccagcaagaagatcgatcagaacaagctgaaacctgagatggacgagaagggcaacctgaccaccgccggctttgcctgctctcagtgtggccagcccctgttcgtgtacaagctggagcaggtgtctgagaagggcaaggcttacaccaactacttcggacggtgcaatgtggccgagcacgaaaagctgatcctgctggcccagctgaagcccgagaaggatagcgacgaagccgtgacatatagcctgggaaagtttgggcagagggccctggatttctacagcattcatgtgaccaaggagtccacccaccccgtgaagcccctggcccagatcgccggaaacagatacgcctccggacctgtgggaaaggccctgagcgacgcatgtatgggcacaatcgcctccttcctgtctaagtaccaggacatcatcatcgaacaccagaaggtggtgaagggcaaccagaagagactggagagcctgcgggagctggccggcaaggaaaacctggaataccctagcgtgaccctgccacctcagcctcacaccaaggagggcgttgatgcctacaacgaagtgatcgcccgggtgcgaatgtgggtgaacctgaacctgtggcagaagctgaagctaagcagagatgatgccaagcctctgctgagactgaagggattcccttcctttcctctggtcgagagacaggccaacgaagtggactggtgggacatggtgtgtaacgtgaagaagctgatcaacgagaaaaaggaggatggcaaggtgttttggcagaatctggctggctacaagagacaggaagccctgagaccatacctgagcagcgaggaagatcggaagaagggaaagaaattcgctcggtaccagctgggcgacctgctgctgcacctggaaaagaagcacggcgaggactggggaaaggtgtacgacgaggcctgggagcggattgacaagaaagtggaaggcctgagcaagcacatcaagctggaagaggaacggagaagcgaggacgcccagagcaaggccgccctgaccgactggctgcgggctaaggccagcttcgtgatcgagggcctgaaggaggccgacaaggacgagttctgcagatgcgagctgaagctgcagaagtggtacggggacctgcggggaaagcccttcgccatcgaagccgagaacagcatcctggacatcagcggcttcagcaagcagtacaactgtgccttcatctggcagaaggacggcgtgaagaagctgaacctgtacctgatcatcaactacttcaagggcggcaagctgcggttcaagaagatcaaacctgaagccttcgaagccaacagattctacaccgtgatcaacaaaaagagcggcgagatcgtgcccatggaggtgaacttcaacttcgacgaccccaacctgatcatcctgcctctggcctttggcaagagacagggcagagaattcatctggaacgacctgctgtccctggaaaccggcagcctgaagctggccaacggaagagtgatcgagaagacactgtacaacagaagaacccggcaggatgagcctgccctgttcgtggccctgaccttcgagcggcgggaggtcctggactcctccaatatcaaaccaatgaacctgatcggcgtggcaagaggcgaaaacatccccgccgtgatcgccctgaccgaccccgagggctgcccactgagccggtttaaggatagcctgggaaacccaacccacatcctgagaatcggcgagagctataaggagaagcagcggaccatccaggccaagaaggaggtggagcagcggagagccggcggctacagccggaagtacgccagcaaagccaagaatctggcagacgatatggtgagaaacaccgctagagatctgctgtactacgccgtgacccaggatgccatgctgatcttcgccaacctgagccggggcttcggccggcagggcaagcggaccttcatggccgagagacagtacacacggatggaggactggctgaccgccaagctggcctacgagggcctgagcaagacctacctgtccaagacactggcccagtacacctccaagacatgcagcaactgtgggtttaccatcaccagcgccgactacgacagggtgctggagaagctgaagaagacagcaacaggctggatgaccacaattaacggcaaggagctgaaggtggagggccagattacctactacaacagatacaagagacagaacgtagtcaaggacctgtccgtcgagctggatagactgagcgaagaatctgtgaacaacgacatctcctcctggacaaagggcagaagcggagaagctctgagcctcctgaagaaaagattctcccatagacccgtgcaggagaagttcgtgtgcctgaactgcggcttcgagacacacgcagccgagcaagccgccctgaacatcgccagatcctggctgttcctgcggagccaggagtacaagaaataccagacaaacaagacaaccggcaacaccgataagagagccttcgtcgagacctggcagtccttttaccggaagaagcttaaggaggtgtggaaacctgccgtgcggtctggcggatctggcggaggctccaccagccccaagaaaaagagaaaagtctaagctgccttctgcggggcttgccttctggccatgcccttcttctctcccttgcacctgtacctcttggtctttgaataaagcctgagtaggaaggctagcaaaaaaaaaaaaaaaaaaaaaaaaaaaaaaaaaaaaaaaaaaaaaaaaaaaaaaaaaaaaaaaaaaaaaaaaaaaaaaaa

SEQ ID NO: 12413 - RNA, 5794 nt, synthetic construct
  source 1..5794: mol_type = other RNA
aggaaataagagagaaaagaagagtaagaagaaatataagagccaccatggcccctaagaagaagcgtaaagtgagccggatggaacgcctcgtctacgaggtgcggcagaagtgcagaaacatcgaggacatctgcatctcctgcggatctctgaacgtgaccctggagcacccactgttcatcggcggcatgtgccagaactgtaaaaactgttttctggagtgtgcctatcaatacgacgatgacggctaccagagctactgcaccatctgttgcggcggaagagaggtgctgatgtgtggaaataacaactgctgccggtgcttctgcgtggaatgcgtggacctgctggtgggccccggcgccgcccaggccgctattaaggaagatccttggaactgctacatgtgcggccacaagggcacatacggcctgctgagacggagagaggactggcctagcagactgcagatgttcttcgccaataaccacgaccaggagttcgacccccctaaggtgtaccctcccgtccccgccgagaagagaaagcccatccgggtcctgagcctgttcgatggcatcgccaccggtctgctggtgctgaaggacctgggcatccaggtggataggtacattgcctccgaggtgtgcgaggactccatcaccgtgggaatggtgcgtcatcagggcaagatcatgtacgtgggcgacgtgcggagcgtgacacagaagcatatccaggagtggggccctttcgacctggtgatcggcggcagcccttgcaatgacctgagcatcgtgaacccagcccggaagggcctgtacgagggaaccggcagactgttcttcgagttttacagactgctgcacgacgcccggcctaaggaaggcgacgaccggcccttcttttggctgttcgagaatgtggtggccatgggagtcagcgacaagcgggatattagccggttcctggagagcaaccccgtgatgatcgatgccaaggaagtgagcgccgcccaccgggccagatacttctggggcaatctgcctggcatgaacagacccctggccagcaccgtgaacgacaagctggagctgcaggagtgcctggagcacggccggatcgccaagttcagcaaggtgagaaccatcaccacccgaagcaacagcatcaaacaaggcaaggaccagcactttcctgtgttcatgaacgagaaggaggacatcctgtggtgtaccgagatggagagagtgttcgggttcccagtccactacacagatgtcagcaacatgtctagactggccagacagagactgctgggaagaagctggtccgtccctgtgatcagacacctgttcgcccctctgaaggagtacttcgcctgcgtgagcagcggcaacagcaacgccaacagccggggccccagcttctctagcggcctggtgccactgtccctgagagggagccacatgggccccatggagatctacaaaaccgtgagcgcctggaagcggcagcctgtgcgcgtgctgagcctgtttcggaatatcgataaagtcctgaaaagcctgggattcctggagagcggctctggctccggcggtggcaccctgaagtacgtggaggatgtgacaaacgtggtcagacgggatgtggagaagtggggccccttcgatctggtgtacggcagcacccaacccctgggcagctcttgtgaccggtgccctggctggtacatgtttcagttccaccggatcctgcagtacgccctgccgagacaggagtcccagcggccattcttttggattttcatggacaacttgctgctgaccgaggatgaccaggaaactaccactcggttcctgcagaccgaagccgtgaccctgcaggacgtgagaggccgggactaccagaacgccatgcgggtgtggtccaacatccctggactgaaaagcaagcacgcacctctgacccctaaagaagaggagtacctgcaggcccaggtgcggagcagaagcaagctggacgcccctaaggtggatctgctggtgaagaattgcctcctgcccctgagagagtacttcaagtatttcagccagaatagtctgcccctgggaggcagcggcggcggcatcacctacgacgacgtgcacgtgaacttcacctgggaggagtggaccctgctggaccccttccagaagaacctgtacaaggacgtgatgctggagacctacaggaacctgaccaccatcggctacagctgggaggacagcaacatcgaggtgcactgccagagcagcggcaggcacgagaggcacgagaggagccacaccggcgagaagcccagcgtgtacacccagtgcgtggagaccttcgcccaccacggcggcccaagcagcggcgcccctcctcccagcggcggcagcccagccggctccccaacctctaccgaggagggcacctctgagtccgccacccccgagagcggccctggcacctccaccgagcccagcgagggcagcgcacccggcagccctgccggcagccccacctccacagaggagggaaccagcaccgagcccagcgaaggcagcgccccaggcaccagcaccgagcctagtgagcaggagattaaacggatcaacaagatcagaagaagacttgtgaaagacagcaacaccaagaaggccggcaagacaggccccatgaaaaccctgctggttagagtgatgacacccgatctgagagagcggctggaaaacctgagaaagaagcctgaaaatatcccccagcccatcagcaatacatctagagccaacctgaataagctgctgaccgattacaccgaaatgaagaaggcgatcctgcatgtgtactgggaagagttccagaaggaccctgtgggcctgatgagccgggtggcccagcctgccagcaagaagatcgatcagaacaagctgaaacctgagatggacgagaagggcaacctgaccaccgccggctttgcctgctctcagtgtggccagcccctgttcgtgtacaagctggagcaggtgtctgagaagggcaaggcttacaccaactacttcggacggtgcaatgtggccgagcacgaaaagctgatcctgctggcccagctgaagcccgagaaggatagcgacgaagccgtgacatatagcctgggaaagtttgggcagagggccctggatttctacagcattcatgtgaccaaggagtccacccaccccgtgaagcccctggcccagatcgccggaaacagatacgcctccggacctgtgggaaaggccctgagcgacgcatgtatgggcacaatcgcctccttcctgtctaagtaccaggacatcatcatcgaacaccagaaggtggtgaagggcaaccagaagagactggagagcctgcgggagctggccggcaaggaaaacctggaataccctagcgtgaccctgccacctcagcctcacaccaaggagggcgttgatgcctacaacgaagtgatcgcccgggtgcgaatgtgggtgaacctgaacctgtggcagaagctgaagctaagcagagatgatgccaagcctctgctgagactgaagggattcccttcctttcctctggtcgagagacaggccaacgaagtggactggtgggacatggtgtgtaacgtgaagaagctgatcaacgagaaaaaggaggatggcaaggtgttttggcagaatctggctggctacaagagacaggaagccctgagaccatacctgagcagcgaggaagatcggaagaagggaaagaaattcgctcggtaccagctgggcgacctgctgctgcacctggaaaagaagcacggcgaggactggggaaaggtgtacgacgaggcctgggagcggattgacaagaaagtggaaggcctgagcaagcacatcaagctggaagaggaacggagaagcgaggacgcccagagcaaggccgccctgaccgactggctgcgggctaaggccagcttcgtgatcgagggcctgaaggaggccgacaaggacgagttctgcagatgcgagctgaagctgcagaagtggtacggggacctgcggggaaagcccttcgccatcgaagccgagaacagcatcctggacatcagcggcttcagcaagcagtacaactgtgccttcatctggcagaaggacggcgtgaagaagctgaacctgtacctgatcatcaactacttcaagggcggcaagctgcggttcaagaagatcaaacctgaagccttcgaagccaacagattctacaccgtgatcaacaaaaagagcggcgagatcgtgcccatggaggtgaacttcaacttcgacgaccccaacctgatcatcctgcctctggcctttggcaagagacagggcagagaattcatctggaacgacctgctgtccctggaaaccggcagcctgaagctggccaacggaagagtgatcgagaagacactgtacaacagaagaacccggcaggatgagcctgccctgttcgtggccctgaccttcgagcggcgggaggtcctggactcctccaatatcaaaccaatgaacctgatcggcgtggcaagaggcgaaaacatccccgccgtgatcgccctgaccgaccccgagggctgcccactgagccggtttaaggatagcctgggaaacccaacccacatcctgagaatcggcgagagctataaggagaagcagcggaccatccaggccaagaaggaggtggagcagcggagagccggcggctacagccggaagtacgccagcaaagccaagaatctggcagacgatatggtgagaaacaccgctagagatctgctgtactacgccgtgacccaggatgccatgctgatcttcgccaacctgagccggggcttcggccggcagggcaagcggaccttcatggccgagagacagtacacacggatggaggactggctgaccgccaagctggcctacgagggcctgagcaagacctacctgtccaagacactggcccagtacacctccaagacatgcagcaactgtgggtttaccatcaccagcgccgactacgacagggtgctggagaagctgaagaagacagcaacaggctggatgaccacaattaacggcaaggagctgaaggtggagggccagattacctactacaacagatacaagagacagaacgtagtcaaggacctgtccgtcgagctggatagactgagcgaagaatctgtgaacaacgacatctcctcctggacaaagggcagaagcggagaagctctgagcctcctgaagaaaagattctcccatagacccgtgcaggagaagttcgtgtgcctgaactgcggcttcgagacacacgcagccgagcaagccgccctgaacatcgccagatcctggctgttcctgcggagccaggagtacaagaaataccagacaaacaagacaaccggcaacaccgataagagagccttcgtcgagacctggcagtccttttaccggaagaagcttaaggaggtgtggaaacctgccgtgcggtctggcggatctggcggaggctccaccagccccaagaaaaagagaaaagtctaagctgccttctgcggggcttgccttctggccatgcccttcttctctcccttgcacctgtacctcttggtctttgaataaagcctgagtaggaaggctagcaaaaaaaaaaaaaaaaaaaaaaaaaaaaaaaaaaaaaaaaaaaaaaaaaaaaaaaaaaaaaaaaaaaaaaaaaaaaaaaa

SEQ ID NO: 12414 - RNA, 5785 nt, synthetic construct
  source 1..5785: mol_type = other RNA
aggaaataagagagaaaagaagagtaagaagaaatataagagccaccatggcccctaagaagaagcgtaaagtgagccggatggaacgcctcgtctacgaggtgcggcagaagtgcagaaacatcgaggacatctgcatctcctgcggatctctgaacgtgaccctggagcacccactgttcatcggcggcatgtgccagaactgtaaaaactgttttctggagtgtgcctatcaatacgacgatgacggctaccagagctactgcaccatctgttgcggcggaagagaggtgctgatgtgtggaaataacaactgctgccggtgcttctgcgtggaatgcgtggacctgctggtgggccccggcgccgcccaggccgctattaaggaagatccttggaactgctacatgtgcggccacaagggcacatacggcctgctgagacggagagaggactggcctagcagactgcagatgttcttcgccaataaccacgaccaggagttcgacccccctaaggtgtaccctcccgtccccgccgagaagagaaagcccatccgggtcctgagcctgttcgatggcatcgccaccggtctgctggtgctgaaggacctgggcatccaggtggataggtacattgcctccgaggtgtgcgaggactccatcaccgtgggaatggtgcgtcatcagggcaagatcatgtacgtgggcgacgtgcggagcgtgacacagaagcatatccaggagtggggccctttcgacctggtgatcggcggcagcccttgcaatgacctgagcatcgtgaacccagcccggaagggcctgtacgagggaaccggcagactgttcttcgagttttacagactgctgcacgacgcccggcctaaggaaggcgacgaccggcccttcttttggctgttcgagaatgtggtggccatgggagtcagcgacaagcgggatattagccggttcctggagagcaaccccgtgatgatcgatgccaaggaagtgagcgccgcccaccgggccagatacttctggggcaatctgcctggcatgaacagacccctggccagcaccgtgaacgacaagctggagctgcaggagtgcctggagcacggccggatcgccaagttcagcaaggtgagaaccatcaccacccgaagcaacagcatcaaacaaggcaaggaccagcactttcctgtgttcatgaacgagaaggaggacatcctgtggtgtaccgagatggagagagtgttcgggttcccagtccactacacagatgtcagcaacatgtctagactggccagacagagactgctgggaagaagctggtccgtccctgtgatcagacacctgttcgcccctctgaaggagtacttcgcctgcgtgagcagcggcaacagcaacgccaacagccggggccccagcttctctagcggcctggtgccactgtccctgagagggagccacatgggccccatggagatctacaaaaccgtgagcgcctggaagcggcagcctgtgcgcgtgctgagcctgtttcggaatatcgataaagtcctgaaaagcctgggattcctggagagcggctctggctccggcggtggcaccctgaagtacgtggaggatgtgacaaacgtggtcagacgggatgtggagaagtggggccccttcgatctggtgtacggcagcacccaacccctgggcagctcttgtgaccggtgccctggctggtacatgtttcagttccaccggatcctgcagtacgccctgccgagacaggagtcccagcggccattcttttggattttcatggacaacttgctgctgaccgaggatgaccaggaaactaccactcggttcctgcagaccgaagccgtgaccctgcaggacgtgagaggccgggactaccagaacgccatgcgggtgtggtccaacatccctggactgaaaagcaagcacgcacctctgacccctaaagaagaggagtacctgcaggcccaggtgcggagcagaagcaagctggacgcccctaaggtggatctgctggtgaagaattgcctcctgcccctgagagagtacttcaagtatttcagccagaatagtctgcccctgggaggcagcggcggcggcgacgccgtgacctaccaggacctgcacatcaccttcacccaggaggagtgggccctgctggacagcagccagaggaacctgtacaaggacgtgatgctggagacctacatgaacctgaacgccatcggctacaagtgggaggacaacgacatcgagcagcactgcaggagcccccagaggcacggcaggcacgagaggagccccaccagggagaagcccagcgcctacatgcagtgcgacaagggcggcccaagcagcggcgcccctcctcccagcggcggcagcccagccggctccccaacctctaccgaggagggcacctctgagtccgccacccccgagagcggccctggcacctccaccgagcccagcgagggcagcgcacccggcagccctgccggcagccccacctccacagaggagggaaccagcaccgagcccagcgaaggcagcgccccaggcaccagcaccgagcctagtgagcaggagattaaacggatcaacaagatcagaagaagacttgtgaaagacagcaacaccaagaaggccggcaagacaggccccatgaaaaccctgctggttagagtgatgacacccgatctgagagagcggctggaaaacctgagaaagaagcctgaaaatatcccccagcccatcagcaatacatctagagccaacctgaataagctgctgaccgattacaccgaaatgaagaaggcgatcctgcatgtgtactgggaagagttccagaaggaccctgtgggcctgatgagccgggtggcccagcctgccagcaagaagatcgatcagaacaagctgaaacctgagatggacgagaagggcaacctgaccaccgccggctttgcctgctctcagtgtggccagcccctgttcgtgtacaagctggagcaggtgtctgagaagggcaaggcttacaccaactacttcggacggtgcaatgtggccgagcacgaaaagctgatcctgctggcccagctgaagcccgagaaggatagcgacgaagccgtgacatatagcctgggaaagtttgggcagagggccctggatttctacagcattcatgtgaccaaggagtccacccaccccgtgaagcccctggcccagatcgccggaaacagatacgcctccggacctgtgggaaaggccctgagcgacgcatgtatgggcacaatcgcctccttcctgtctaagtaccaggacatcatcatcgaacaccagaaggtggtgaagggcaaccagaagagactggagagcctgcgggagctggccggcaaggaaaacctggaataccctagcgtgaccctgccacctcagcctcacaccaaggagggcgttgatgcctacaacgaagtgatcgcccgggtgcgaatgtgggtgaacctgaacctgtggcagaagctgaagctaagcagagatgatgccaagcctctgctgagactgaagggattcccttcctttcctctggtcgagagacaggccaacgaagtggactggtgggacatggtgtgtaacgtgaagaagctgatcaacgagaaaaaggaggatggcaaggtgttttggcagaatctggctggctacaagagacaggaagccctgagaccatacctgagcagcgaggaagatcggaagaagggaaagaaattcgctcggtaccagctgggcgacctgctgctgcacctggaaaagaagcacggcgaggactggggaaaggtgtacgacgaggcctgggagcggattgacaagaaagtggaaggcctgagcaagcacatcaagctggaagaggaacggagaagcgaggacgcccagagcaaggccgccctgaccgactggctgcgggctaaggccagcttcgtgatcgagggcctgaaggaggccgacaaggacgagttctgcagatgcgagctgaagctgcagaagtggtacggggacctgcggggaaagcccttcgccatcgaagccgagaacagcatcctggacatcagcggcttcagcaagcagtacaactgtgccttcatctggcagaaggacggcgtgaagaagctgaacctgtacctgatcatcaactacttcaagggcggcaagctgcggttcaagaagatcaaacctgaagccttcgaagccaacagattctacaccgtgatcaacaaaaagagcggcgagatcgtgcccatggaggtgaacttcaacttcgacgaccccaacctgatcatcctgcctctggcctttggcaagagacagggcagagaattcatctggaacgacctgctgtccctggaaaccggcagcctgaagctggccaacggaagagtgatcgagaagacactgtacaacagaagaacccggcaggatgagcctgccctgttcgtggccctgaccttcgagcggcgggaggtcctggactcctccaatatcaaaccaatgaacctgatcggcgtggcaagaggcgaaaacatccccgccgtgatcgccctgaccgaccccgagggctgcccactgagccggtttaaggatagcctgggaaacccaacccacatcctgagaatcggcgagagctataaggagaagcagcggaccatccaggccaagaaggaggtggagcagcggagagccggcggctacagccggaagtacgccagcaaagccaagaatctggcagacgatatggtgagaaacaccgctagagatctgctgtactacgccgtgacccaggatgccatgctgatcttcgccaacctgagccggggcttcggccggcagggcaagcggaccttcatggccgagagacagtacacacggatggaggactggctgaccgccaagctggcctacgagggcctgagcaagacctacctgtccaagacactggcccagtacacctccaagacatgcagcaactgtgggtttaccatcaccagcgccgactacgacagggtgctggagaagctgaagaagacagcaacaggctggatgaccacaattaacggcaaggagctgaaggtggagggccagattacctactacaacagatacaagagacagaacgtagtcaaggacctgtccgtcgagctggatagactgagcgaagaatctgtgaacaacgacatctcctcctggacaaagggcagaagcggagaagctctgagcctcctgaagaaaagattctcccatagacccgtgcaggagaagttcgtgtgcctgaactgcggcttcgagacacacgcagccgagcaagccgccctgaacatcgccagatcctggctgttcctgcggagccaggagtacaagaaataccagacaaacaagacaaccggcaacaccgataagagagccttcgtcgagacctggcagtccttttaccggaagaagcttaaggaggtgtggaaacctgccgtgcggtctggcggatctggcggaggctccaccagccccaagaaaaagagaaaagtctaagctgccttctgcggggcttgccttctggccatgcccttcttctctcccttgcacctgtacctcttggtctttgaataaagcctgagtaggaaggctagcaaaaaaaaaaaaaaaaaaaaaaaaaaaaaaaaaaaaaaaaaaaaaaaaaaaaaaaaaaaaaaaaaaaaaaaaaaaaaaaa

SEQ ID NO: 12415 - RNA, 5785 nt, synthetic construct
  source 1..5785: mol_type = other RNA
aggaaataagagagaaaagaagagtaagaagaaatataagagccaccatggcccctaagaagaagcgtaaagtgagccggatggaacgcctcgtctacgaggtgcggcagaagtgcagaaacatcgaggacatctgcatctcctgcggatctctgaacgtgaccctggagcacccactgttcatcggcggcatgtgccagaactgtaaaaactgttttctggagtgtgcctatcaatacgacgatgacggctaccagagctactgcaccatctgttgcggcggaagagaggtgctgatgtgtggaaataacaactgctgccggtgcttctgcgtggaatgcgtggacctgctggtgggccccggcgccgcccaggccgctattaaggaagatccttggaactgctacatgtgcggccacaagggcacatacggcctgctgagacggagagaggactggcctagcagactgcagatgttcttcgccaataaccacgaccaggagttcgacccccctaaggtgtaccctcccgtccccgccgagaagagaaagcccatccgggtcctgagcctgttcgatggcatcgccaccggtctgctggtgctgaaggacctgggcatccaggtggataggtacattgcctccgaggtgtgcgaggactccatcaccgtgggaatggtgcgtcatcagggcaagatcatgtacgtgggcgacgtgcggagcgtgacacagaagcatatccaggagtggggccctttcgacctggtgatcggcggcagcccttgcaatgacctgagcatcgtgaacccagcccggaagggcctgtacgagggaaccggcagactgttcttcgagttttacagactgctgcacgacgcccggcctaaggaaggcgacgaccggcccttcttttggctgttcgagaatgtggtggccatgggagtcagcgacaagcgggatattagccggttcctggagagcaaccccgtgatgatcgatgccaaggaagtgagcgccgcccaccgggccagatacttctggggcaatctgcctggcatgaacagacccctggccagcaccgtgaacgacaagctggagctgcaggagtgcctggagcacggccggatcgccaagttcagcaaggtgagaaccatcaccacccgaagcaacagcatcaaacaaggcaaggaccagcactttcctgtgttcatgaacgagaaggaggacatcctgtggtgtaccgagatggagagagtgttcgggttcccagtccactacacagatgtcagcaacatgtctagactggccagacagagactgctgggaagaagctggtccgtccctgtgatcagacacctgttcgcccctctgaaggagtacttcgcctgcgtgagcagcggcaacagcaacgccaacagccggggccccagcttctctagcggcctggtgccactgtccctgagagggagccacatgggccccatggagatctacaaaaccgtgagcgcctggaagcggcagcctgtgcgcgtgctgagcctgtttcggaatatcgataaagtcctgaaaagcctgggattcctggagagcggctctggctccggcggtggcaccctgaagtacgtggaggatgtgacaaacgtggtcagacgggatgtggagaagtggggccccttcgatctggtgtacggcagcacccaacccctgggcagctcttgtgaccggtgccctggctggtacatgtttcagttccaccggatcctgcagtacgccctgccgagacaggagtcccagcggccattcttttggattttcatggacaacttgctgctgaccgaggatgaccaggaaactaccactcggttcctgcagaccgaagccgtgaccctgcaggacgtgagaggccgggactaccagaacgccatgcgggtgtggtccaacatccctggactgaaaagcaagcacgcacctctgacccctaaagaagaggagtacctgcaggcccaggtgcggagcagaagcaagctggacgcccctaaggtggatctgctggtgaagaattgcctcctgcccctgagagagtacttcaagtatttcagccagaatagtctgcccctgggaggcagcggcggcggcagccagagcctggtgaccttcggcgacgtggccgtggacttcagcagggaggagtgggagtggctgagcagcgcccagaggaacctgtacaggaccgtgatgctggagaactacaggaacctggtgagcctgggcctgtgcatcagcaagcccgagatgatcagcagcctggagcagaggaaggagccctggatggccaagaggaggctgaccaggggcaggtgccccgacctgaagatcgtgggcggcccaagcagcggcgcccctcctcccagcggcggcagcccagccggctccccaacctctaccgaggagggcacctctgagtccgccacccccgagagcggccctggcacctccaccgagcccagcgagggcagcgcacccggcagccctgccggcagccccacctccacagaggagggaaccagcaccgagcccagcgaaggcagcgccccaggcaccagcaccgagcctagtgagcaggagattaaacggatcaacaagatcagaagaagacttgtgaaagacagcaacaccaagaaggccggcaagacaggccccatgaaaaccctgctggttagagtgatgacacccgatctgagagagcggctggaaaacctgagaaagaagcctgaaaatatcccccagcccatcagcaatacatctagagccaacctgaataagctgctgaccgattacaccgaaatgaagaaggcgatcctgcatgtgtactgggaagagttccagaaggaccctgtgggcctgatgagccgggtggcccagcctgccagcaagaagatcgatcagaacaagctgaaacctgagatggacgagaagggcaacctgaccaccgccggctttgcctgctctcagtgtggccagcccctgttcgtgtacaagctggagcaggtgtctgagaagggcaaggcttacaccaactacttcggacggtgcaatgtggccgagcacgaaaagctgatcctgctggcccagctgaagcccgagaaggatagcgacgaagccgtgacatatagcctgggaaagtttgggcagagggccctggatttctacagcattcatgtgaccaaggagtccacccaccccgtgaagcccctggcccagatcgccggaaacagatacgcctccggacctgtgggaaaggccctgagcgacgcatgtatgggcacaatcgcctccttcctgtctaagtaccaggacatcatcatcgaacaccagaaggtggtgaagggcaaccagaagagactggagagcctgcgggagctggccggcaaggaaaacctggaataccctagcgtgaccctgccacctcagcctcacaccaaggagggcgttgatgcctacaacgaagtgatcgcccgggtgcgaatgtgggtgaacctgaacctgtggcagaagctgaagctaagcagagatgatgccaagcctctgctgagactgaagggattcccttcctttcctctggtcgagagacaggccaacgaagtggactggtgggacatggtgtgtaacgtgaagaagctgatcaacgagaaaaaggaggatggcaaggtgttttggcagaatctggctggctacaagagacaggaagccctgagaccatacctgagcagcgaggaagatcggaagaagggaaagaaattcgctcggtaccagctgggcgacctgctgctgcacctggaaaagaagcacggcgaggactggggaaaggtgtacgacgaggcctgggagcggattgacaagaaagtggaaggcctgagcaagcacatcaagctggaagaggaacggagaagcgaggacgcccagagcaaggccgccctgaccgactggctgcgggctaaggccagcttcgtgatcgagggcctgaaggaggccgacaaggacgagttctgcagatgcgagctgaagctgcagaagtggtacggggacctgcggggaaagcccttcgccatcgaagccgagaacagcatcctggacatcagcggcttcagcaagcagtacaactgtgccttcatctggcagaaggacggcgtgaagaagctgaacctgtacctgatcatcaactacttcaagggcggcaagctgcggttcaagaagatcaaacctgaagccttcgaagccaacagattctacaccgtgatcaacaaaaagagcggcgagatcgtgcccatggaggtgaacttcaacttcgacgaccccaacctgatcatcctgcctctggcctttggcaagagacagggcagagaattcatctggaacgacctgctgtccctggaaaccggcagcctgaagctggccaacggaagagtgatcgagaagacactgtacaacagaagaacccggcaggatgagcctgccctgttcgtggccctgaccttcgagcggcgggaggtcctggactcctccaatatcaaaccaatgaacctgatcggcgtggcaagaggcgaaaacatccccgccgtgatcgccctgaccgaccccgagggctgcccactgagccggtttaaggatagcctgggaaacccaacccacatcctgagaatcggcgagagctataaggagaagcagcggaccatccaggccaagaaggaggtggagcagcggagagccggcggctacagccggaagtacgccagcaaagccaagaatctggcagacgatatggtgagaaacaccgctagagatctgctgtactacgccgtgacccaggatgccatgctgatcttcgccaacctgagccggggcttcggccggcagggcaagcggaccttcatggccgagagacagtacacacggatggaggactggctgaccgccaagctggcctacgagggcctgagcaagacctacctgtccaagacactggcccagtacacctccaagacatgcagcaactgtgggtttaccatcaccagcgccgactacgacagggtgctggagaagctgaagaagacagcaacaggctggatgaccacaattaacggcaaggagctgaaggtggagggccagattacctactacaacagatacaagagacagaacgtagtcaaggacctgtccgtcgagctggatagactgagcgaagaatctgtgaacaacgacatctcctcctggacaaagggcagaagcggagaagctctgagcctcctgaagaaaagattctcccatagacccgtgcaggagaagttcgtgtgcctgaactgcggcttcgagacacacgcagccgagcaagccgccctgaacatcgccagatcctggctgttcctgcggagccaggagtacaagaaataccagacaaacaagacaaccggcaacaccgataagagagccttcgtcgagacctggcagtccttttaccggaagaagcttaaggaggtgtggaaacctgccgtgcggtctggcggatctggcggaggctccaccagccccaagaaaaagagaaaagtctaagctgccttctgcggggcttgccttctggccatgcccttcttctctcccttgcacctgtacctcttggtctttgaataaagcctgagtaggaaggctagcaaaaaaaaaaaaaaaaaaaaaaaaaaaaaaaaaaaaaaaaaaaaaaaaaaaaaaaaaaaaaaaaaaaaaaaaaaaaaaaa

SEQ ID NO: 12416 - RNA, 5785 nt, synthetic construct
  source 1..5785: mol_type = other RNA
aggaaataagagagaaaagaagagtaagaagaaatataagagccaccatggcccctaagaagaagcgtaaagtgagccggatggaacgcctcgtctacgaggtgcggcagaagtgcagaaacatcgaggacatctgcatctcctgcggatctctgaacgtgaccctggagcacccactgttcatcggcggcatgtgccagaactgtaaaaactgttttctggagtgtgcctatcaatacgacgatgacggctaccagagctactgcaccatctgttgcggcggaagagaggtgctgatgtgtggaaataacaactgctgccggtgcttctgcgtggaatgcgtggacctgctggtgggccccggcgccgcccaggccgctattaaggaagatccttggaactgctacatgtgcggccacaagggcacatacggcctgctgagacggagagaggactggcctagcagactgcagatgttcttcgccaataaccacgaccaggagttcgacccccctaaggtgtaccctcccgtccccgccgagaagagaaagcccatccgggtcctgagcctgttcgatggcatcgccaccggtctgctggtgctgaaggacctgggcatccaggtggataggtacattgcctccgaggtgtgcgaggactccatcaccgtgggaatggtgcgtcatcagggcaagatcatgtacgtgggcgacgtgcggagcgtgacacagaagcatatccaggagtggggccctttcgacctggtgatcggcggcagcccttgcaatgacctgagcatcgtgaacccagcccggaagggcctgtacgagggaaccggcagactgttcttcgagttttacagactgctgcacgacgcccggcctaaggaaggcgacgaccggcccttcttttggctgttcgagaatgtggtggccatgggagtcagcgacaagcgggatattagccggttcctggagagcaaccccgtgatgatcgatgccaaggaagtgagcgccgcccaccgggccagatacttctggggcaatctgcctggcatgaacagacccctggccagcaccgtgaacgacaagctggagctgcaggagtgcctggagcacggccggatcgccaagttcagcaaggtgagaaccatcaccacccgaagcaacagcatcaaacaaggcaaggaccagcactttcctgtgttcatgaacgagaaggaggacatcctgtggtgtaccgagatggagagagtgttcgggttcccagtccactacacagatgtcagcaacatgtctagactggccagacagagactgctgggaagaagctggtccgtccctgtgatcagacacctgttcgcccctctgaaggagtacttcgcctgcgtgagcagcggcaacagcaacgccaacagccggggccccagcttctctagcggcctggtgccactgtccctgagagggagccacatgggccccatggagatctacaaaaccgtgagcgcctggaagcggcagcctgtgcgcgtgctgagcctgtttcggaatatcgataaagtcctgaaaagcctgggattcctggagagcggctctggctccggcggtggcaccctgaagtacgtggaggatgtgacaaacgtggtcagacgggatgtggagaagtggggccccttcgatctggtgtacggcagcacccaacccctgggcagctcttgtgaccggtgccctggctggtacatgtttcagttccaccggatcctgcagtacgccctgccgagacaggagtcccagcggccattcttttggattttcatggacaacttgctgctgaccgaggatgaccaggaaactaccactcggttcctgcagaccgaagccgtgaccctgcaggacgtgagaggccgggactaccagaacgccatgcgggtgtggtccaacatccctggactgaaaagcaagcacgcacctctgacccctaaagaagaggagtacctgcaggcccaggtgcggagcagaagcaagctggacgcccctaaggtggatctgctggtgaagaattgcctcctgcccctgagagagtacttcaagtatttcagccagaatagtctgcccctgggaggcagcggcggcggcagccagggcctggtgagcttcaaggacgtggccgtggacttcacccaggacgagtggcagcagctggaccccgcccagaggaccctgtacagggacgtgatgctggagaactacagccacctggtgagcatgggctaccccgtgagcaagcccgacgtgatcagcaagctggagcagggcgaggacccctggatcatcaagagggacatcagcaactggatctaccccgacgagaaccaggccggcggcccaagcagcggcgcccctcctcccagcggcggcagcccagccggctccccaacctctaccgaggagggcacctctgagtccgccacccccgagagcggccctggcacctccaccgagcccagcgagggcagcgcacccggcagccctgccggcagccccacctccacagaggagggaaccagcaccgagcccagcgaaggcagcgccccaggcaccagcaccgagcctagtgagcaggagattaaacggatcaacaagatcagaagaagacttgtgaaagacagcaacaccaagaaggccggcaagacaggccccatgaaaaccctgctggttagagtgatgacacccgatctgagagagcggctggaaaacctgagaaagaagcctgaaaatatcccccagcccatcagcaatacatctagagccaacctgaataagctgctgaccgattacaccgaaatgaagaaggcgatcctgcatgtgtactgggaagagttccagaaggaccctgtgggcctgatgagccgggtggcccagcctgccagcaagaagatcgatcagaacaagctgaaacctgagatggacgagaagggcaacctgaccaccgccggctttgcctgctctcagtgtggccagcccctgttcgtgtacaagctggagcaggtgtctgagaagggcaaggcttacaccaactacttcggacggtgcaatgtggccgagcacgaaaagctgatcctgctggcccagctgaagcccgagaaggatagcgacgaagccgtgacatatagcctgggaaagtttgggcagagggccctggatttctacagcattcatgtgaccaaggagtccacccaccccgtgaagcccctggcccagatcgccggaaacagatacgcctccggacctgtgggaaaggccctgagcgacgcatgtatgggcacaatcgcctccttcctgtctaagtaccaggacatcatcatcgaacaccagaaggtggtgaagggcaaccagaagagactggagagcctgcgggagctggccggcaaggaaaacctggaataccctagcgtgaccctgccacctcagcctcacaccaaggagggcgttgatgcctacaacgaagtgatcgcccgggtgcgaatgtgggtgaacctgaacctgtggcagaagctgaagctaagcagagatgatgccaagcctctgctgagactgaagggattcccttcctttcctctggtcgagagacaggccaacgaagtggactggtgggacatggtgtgtaacgtgaagaagctgatcaacgagaaaaaggaggatggcaaggtgttttggcagaatctggctggctacaagagacaggaagccctgagaccatacctgagcagcgaggaagatcggaagaagggaaagaaattcgctcggtaccagctgggcgacctgctgctgcacctggaaaagaagcacggcgaggactggggaaaggtgtacgacgaggcctgggagcggattgacaagaaagtggaaggcctgagcaagcacatcaagctggaagaggaacggagaagcgaggacgcccagagcaaggccgccctgaccgactggctgcgggctaaggccagcttcgtgatcgagggcctgaaggaggccgacaaggacgagttctgcagatgcgagctgaagctgcagaagtggtacggggacctgcggggaaagcccttcgccatcgaagccgagaacagcatcctggacatcagcggcttcagcaagcagtacaactgtgccttcatctggcagaaggacggcgtgaagaagctgaacctgtacctgatcatcaactacttcaagggcggcaagctgcggttcaagaagatcaaacctgaagccttcgaagccaacagattctacaccgtgatcaacaaaaagagcggcgagatcgtgcccatggaggtgaacttcaacttcgacgaccccaacctgatcatcctgcctctggcctttggcaagagacagggcagagaattcatctggaacgacctgctgtccctggaaaccggcagcctgaagctggccaacggaagagtgatcgagaagacactgtacaacagaagaacccggcaggatgagcctgccctgttcgtggccctgaccttcgagcggcgggaggtcctggactcctccaatatcaaaccaatgaacctgatcggcgtggcaagaggcgaaaacatccccgccgtgatcgccctgaccgaccccgagggctgcccactgagccggtttaaggatagcctgggaaacccaacccacatcctgagaatcggcgagagctataaggagaagcagcggaccatccaggccaagaaggaggtggagcagcggagagccggcggctacagccggaagtacgccagcaaagccaagaatctggcagacgatatggtgagaaacaccgctagagatctgctgtactacgccgtgacccaggatgccatgctgatcttcgccaacctgagccggggcttcggccggcagggcaagcggaccttcatggccgagagacagtacacacggatggaggactggctgaccgccaagctggcctacgagggcctgagcaagacctacctgtccaagacactggcccagtacacctccaagacatgcagcaactgtgggtttaccatcaccagcgccgactacgacagggtgctggagaagctgaagaagacagcaacaggctggatgaccacaattaacggcaaggagctgaaggtggagggccagattacctactacaacagatacaagagacagaacgtagtcaaggacctgtccgtcgagctggatagactgagcgaagaatctgtgaacaacgacatctcctcctggacaaagggcagaagcggagaagctctgagcctcctgaagaaaagattctcccatagacccgtgcaggagaagttcgtgtgcctgaactgcggcttcgagacacacgcagccgagcaagccgccctgaacatcgccagatcctggctgttcctgcggagccaggagtacaagaaataccagacaaacaagacaaccggcaacaccgataagagagccttcgtcgagacctggcagtccttttaccggaagaagcttaaggaggtgtggaaacctgccgtgcggtctggcggatctggcggaggctccaccagccccaagaaaaagagaaaagtctaagctgccttctgcggggcttgccttctggccatgcccttcttctctcccttgcacctgtacctcttggtctttgaataaagcctgagtaggaaggctagcaaaaaaaaaaaaaaaaaaaaaaaaaaaaaaaaaaaaaaaaaaaaaaaaaaaaaaaaaaaaaaaaaaaaaaaaaaaaaaaa

SEQ ID NO: 12417 - RNA, 5785 nt, synthetic construct
  source 1..5785: mol_type = other RNA
aggaaataagagagaaaagaagagtaagaagaaatataagagccaccatggcccctaagaagaagcgtaaagtgagccggatggaacgcctcgtctacgaggtgcggcagaagtgcagaaacatcgaggacatctgcatctcctgcggatctctgaacgtgaccctggagcacccactgttcatcggcggcatgtgccagaactgtaaaaactgttttctggagtgtgcctatcaatacgacgatgacggctaccagagctactgcaccatctgttgcggcggaagagaggtgctgatgtgtggaaataacaactgctgccggtgcttctgcgtggaatgcgtggacctgctggtgggccccggcgccgcccaggccgctattaaggaagatccttggaactgctacatgtgcggccacaagggcacatacggcctgctgagacggagagaggactggcctagcagactgcagatgttcttcgccaataaccacgaccaggagttcgacccccctaaggtgtaccctcccgtccccgccgagaagagaaagcccatccgggtcctgagcctgttcgatggcatcgccaccggtctgctggtgctgaaggacctgggcatccaggtggataggtacattgcctccgaggtgtgcgaggactccatcaccgtgggaatggtgcgtcatcagggcaagatcatgtacgtgggcgacgtgcggagcgtgacacagaagcatatccaggagtggggccctttcgacctggtgatcggcggcagcccttgcaatgacctgagcatcgtgaacccagcccggaagggcctgtacgagggaaccggcagactgttcttcgagttttacagactgctgcacgacgcccggcctaaggaaggcgacgaccggcccttcttttggctgttcgagaatgtggtggccatgggagtcagcgacaagcgggatattagccggttcctggagagcaaccccgtgatgatcgatgccaaggaagtgagcgccgcccaccgggccagatacttctggggcaatctgcctggcatgaacagacccctggccagcaccgtgaacgacaagctggagctgcaggagtgcctggagcacggccggatcgccaagttcagcaaggtgagaaccatcaccacccgaagcaacagcatcaaacaaggcaaggaccagcactttcctgtgttcatgaacgagaaggaggacatcctgtggtgtaccgagatggagagagtgttcgggttcccagtccactacacagatgtcagcaacatgtctagactggccagacagagactgctgggaagaagctggtccgtccctgtgatcagacacctgttcgcccctctgaaggagtacttcgcctgcgtgagcagcggcaacagcaacgccaacagccggggccccagcttctctagcggcctggtgccactgtccctgagagggagccacatgggccccatggagatctacaaaaccgtgagcgcctggaagcggcagcctgtgcgcgtgctgagcctgtttcggaatatcgataaagtcctgaaaagcctgggattcctggagagcggctctggctccggcggtggcaccctgaagtacgtggaggatgtgacaaacgtggtcagacgggatgtggagaagtggggccccttcgatctggtgtacggcagcacccaacccctgggcagctcttgtgaccggtgccctggctggtacatgtttcagttccaccggatcctgcagtacgccctgccgagacaggagtcccagcggccattcttttggattttcatggacaacttgctgctgaccgaggatgaccaggaaactaccactcggttcctgcagaccgaagccgtgaccctgcaggacgtgagaggccgggactaccagaacgccatgcgggtgtggtccaacatccctggactgaaaagcaagcacgcacctctgacccctaaagaagaggagtacctgcaggcccaggtgcggagcagaagcaagctggacgcccctaaggtggatctgctggtgaagaattgcctcctgcccctgagagagtacttcaagtatttcagccagaatagtctgcccctgggaggcagcggcggcggcgtgcacggcagcgtgaccttcagggacgtggccatcgacttcagccaggaggagtgggagtgcctgcagcccgagcagaggaccctgtacagggacgtgatgctggagaactacagccacctgatcagcctgggcagcagcatcagcaagcccgacgtgatcaccctgctggagcaggagaaggagccctggatggtggtgaggaaggagaccagcaggtggtaccccgacctggagagcaagggcggcccaagcagcggcgcccctcctcccagcggcggcagcccagccggctccccaacctctaccgaggagggcacctctgagtccgccacccccgagagcggccctggcacctccaccgagcccagcgagggcagcgcacccggcagccctgccggcagccccacctccacagaggagggaaccagcaccgagcccagcgaaggcagcgccccaggcaccagcaccgagcctagtgagcaggagattaaacggatcaacaagatcagaagaagacttgtgaaagacagcaacaccaagaaggccggcaagacaggccccatgaaaaccctgctggttagagtgatgacacccgatctgagagagcggctggaaaacctgagaaagaagcctgaaaatatcccccagcccatcagcaatacatctagagccaacctgaataagctgctgaccgattacaccgaaatgaagaaggcgatcctgcatgtgtactgggaagagttccagaaggaccctgtgggcctgatgagccgggtggcccagcctgccagcaagaagatcgatcagaacaagctgaaacctgagatggacgagaagggcaacctgaccaccgccggctttgcctgctctcagtgtggccagcccctgttcgtgtacaagctggagcaggtgtctgagaagggcaaggcttacaccaactacttcggacggtgcaatgtggccgagcacgaaaagctgatcctgctggcccagctgaagcccgagaaggatagcgacgaagccgtgacatatagcctgggaaagtttgggcagagggccctggatttctacagcattcatgtgaccaaggagtccacccaccccgtgaagcccctggcccagatcgccggaaacagatacgcctccggacctgtgggaaaggccctgagcgacgcatgtatgggcacaatcgcctccttcctgtctaagtaccaggacatcatcatcgaacaccagaaggtggtgaagggcaaccagaagagactggagagcctgcgggagctggccggcaaggaaaacctggaataccctagcgtgaccctgccacctcagcctcacaccaaggagggcgttgatgcctacaacgaagtgatcgcccgggtgcgaatgtgggtgaacctgaacctgtggcagaagctgaagctaagcagagatgatgccaagcctctgctgagactgaagggattcccttcctttcctctggtcgagagacaggccaacgaagtggactggtgggacatggtgtgtaacgtgaagaagctgatcaacgagaaaaaggaggatggcaaggtgttttggcagaatctggctggctacaagagacaggaagccctgagaccatacctgagcagcgaggaagatcggaagaagggaaagaaattcgctcggtaccagctgggcgacctgctgctgcacctggaaaagaagcacggcgaggactggggaaaggtgtacgacgaggcctgggagcggattgacaagaaagtggaaggcctgagcaagcacatcaagctggaagaggaacggagaagcgaggacgcccagagcaaggccgccctgaccgactggctgcgggctaaggccagcttcgtgatcgagggcctgaaggaggccgacaaggacgagttctgcagatgcgagctgaagctgcagaagtggtacggggacctgcggggaaagcccttcgccatcgaagccgagaacagcatcctggacatcagcggcttcagcaagcagtacaactgtgccttcatctggcagaaggacggcgtgaagaagctgaacctgtacctgatcatcaactacttcaagggcggcaagctgcggttcaagaagatcaaacctgaagccttcgaagccaacagattctacaccgtgatcaacaaaaagagcggcgagatcgtgcccatggaggtgaacttcaacttcgacgaccccaacctgatcatcctgcctctggcctttggcaagagacagggcagagaattcatctggaacgacctgctgtccctggaaaccggcagcctgaagctggccaacggaagagtgatcgagaagacactgtacaacagaagaacccggcaggatgagcctgccctgttcgtggccctgaccttcgagcggcgggaggtcctggactcctccaatatcaaaccaatgaacctgatcggcgtggcaagaggcgaaaacatccccgccgtgatcgccctgaccgaccccgagggctgcccactgagccggtttaaggatagcctgggaaacccaacccacatcctgagaatcggcgagagctataaggagaagcagcggaccatccaggccaagaaggaggtggagcagcggagagccggcggctacagccggaagtacgccagcaaagccaagaatctggcagacgatatggtgagaaacaccgctagagatctgctgtactacgccgtgacccaggatgccatgctgatcttcgccaacctgagccggggcttcggccggcagggcaagcggaccttcatggccgagagacagtacacacggatggaggactggctgaccgccaagctggcctacgagggcctgagcaagacctacctgtccaagacactggcccagtacacctccaagacatgcagcaactgtgggtttaccatcaccagcgccgactacgacagggtgctggagaagctgaagaagacagcaacaggctggatgaccacaattaacggcaaggagctgaaggtggagggccagattacctactacaacagatacaagagacagaacgtagtcaaggacctgtccgtcgagctggatagactgagcgaagaatctgtgaacaacgacatctcctcctggacaaagggcagaagcggagaagctctgagcctcctgaagaaaagattctcccatagacccgtgcaggagaagttcgtgtgcctgaactgcggcttcgagacacacgcagccgagcaagccgccctgaacatcgccagatcctggctgttcctgcggagccaggagtacaagaaataccagacaaacaagacaaccggcaacaccgataagagagccttcgtcgagacctggcagtccttttaccggaagaagcttaaggaggtgtggaaacctgccgtgcggtctggcggatctggcggaggctccaccagccccaagaaaaagagaaaagtctaagctgccttctgcggggcttgccttctggccatgcccttcttctctcccttgcacctgtacctcttggtctttgaataaagcctgagtaggaaggctagcaaaaaaaaaaaaaaaaaaaaaaaaaaaaaaaaaaaaaaaaaaaaaaaaaaaaaaaaaaaaaaaaaaaaaaaaaaaaaaaa

SEQ ID NO: 12418 - RNA, 5785 nt, synthetic construct
  source 1..5785: mol_type = other RNA
aggaaataagagagaaaagaagagtaagaagaaatataagagccaccatggcccctaagaagaagcgtaaagtgagccggatggaacgcctcgtctacgaggtgcggcagaagtgcagaaacatcgaggacatctgcatctcctgcggatctctgaacgtgaccctggagcacccactgttcatcggcggcatgtgccagaactgtaaaaactgttttctggagtgtgcctatcaatacgacgatgacggctaccagagctactgcaccatctgttgcggcggaagagaggtgctgatgtgtggaaataacaactgctgccggtgcttctgcgtggaatgcgtggacctgctggtgggccccggcgccgcccaggccgctattaaggaagatccttggaactgctacatgtgcggccacaagggcacatacggcctgctgagacggagagaggactggcctagcagactgcagatgttcttcgccaataaccacgaccaggagttcgacccccctaaggtgtaccctcccgtccccgccgagaagagaaagcccatccgggtcctgagcctgttcgatggcatcgccaccggtctgctggtgctgaaggacctgggcatccaggtggataggtacattgcctccgaggtgtgcgaggactccatcaccgtgggaatggtgcgtcatcagggcaagatcatgtacgtgggcgacgtgcggagcgtgacacagaagcatatccaggagtggggccctttcgacctggtgatcggcggcagcccttgcaatgacctgagcatcgtgaacccagcccggaagggcctgtacgagggaaccggcagactgttcttcgagttttacagactgctgcacgacgcccggcctaaggaaggcgacgaccggcccttcttttggctgttcgagaatgtggtggccatgggagtcagcgacaagcgggatattagccggttcctggagagcaaccccgtgatgatcgatgccaaggaagtgagcgccgcccaccgggccagatacttctggggcaatctgcctggcatgaacagacccctggccagcaccgtgaacgacaagctggagctgcaggagtgcctggagcacggccggatcgccaagttcagcaaggtgagaaccatcaccacccgaagcaacagcatcaaacaaggcaaggaccagcactttcctgtgttcatgaacgagaaggaggacatcctgtggtgtaccgagatggagagagtgttcgggttcccagtccactacacagatgtcagcaacatgtctagactggccagacagagactgctgggaagaagctggtccgtccctgtgatcagacacctgttcgcccctctgaaggagtacttcgcctgcgtgagcagcggcaacagcaacgccaacagccggggccccagcttctctagcggcctggtgccactgtccctgagagggagccacatgggccccatggagatctacaaaaccgtgagcgcctggaagcggcagcctgtgcgcgtgctgagcctgtttcggaatatcgataaagtcctgaaaagcctgggattcctggagagcggctctggctccggcggtggcaccctgaagtacgtggaggatgtgacaaacgtggtcagacgggatgtggagaagtggggccccttcgatctggtgtacggcagcacccaacccctgggcagctcttgtgaccggtgccctggctggtacatgtttcagttccaccggatcctgcagtacgccctgccgagacaggagtcccagcggccattcttttggattttcatggacaacttgctgctgaccgaggatgaccaggaaactaccactcggttcctgcagaccgaagccgtgaccctgcaggacgtgagaggccgggactaccagaacgccatgcgggtgtggtccaacatccctggactgaaaagcaagcacgcacctctgacccctaaagaagaggagtacctgcaggcccaggtgcggagcagaagcaagctggacgcccctaaggtggatctgctggtgaagaattgcctcctgcccctgagagagtacttcaagtatttcagccagaatagtctgcccctgggaggcagcggcggcggcgccctgaggagcgtgatgttcagcgacgtgagcatcgacttcagccccgaggagtgggagtacctggacctggagcagaaggacctgtacagggacgtgatgctggagaactacagcaacctggtgagcctggccggctgcttcatcagcaagcccgacgtgatcagcagcctggagcagggcaaggagccctggaaggtggtgaggaagggcaggaggcagtaccccgacctggagaccaagggcggcccaagcagcggcgcccctcctcccagcggcggcagcccagccggctccccaacctctaccgaggagggcacctctgagtccgccacccccgagagcggccctggcacctccaccgagcccagcgagggcagcgcacccggcagccctgccggcagccccacctccacagaggagggaaccagcaccgagcccagcgaaggcagcgccccaggcaccagcaccgagcctagtgagcaggagattaaacggatcaacaagatcagaagaagacttgtgaaagacagcaacaccaagaaggccggcaagacaggccccatgaaaaccctgctggttagagtgatgacacccgatctgagagagcggctggaaaacctgagaaagaagcctgaaaatatcccccagcccatcagcaatacatctagagccaacctgaataagctgctgaccgattacaccgaaatgaagaaggcgatcctgcatgtgtactgggaagagttccagaaggaccctgtgggcctgatgagccgggtggcccagcctgccagcaagaagatcgatcagaacaagctgaaacctgagatggacgagaagggcaacctgaccaccgccggctttgcctgctctcagtgtggccagcccctgttcgtgtacaagctggagcaggtgtctgagaagggcaaggcttacaccaactacttcggacggtgcaatgtggccgagcacgaaaagctgatcctgctggcccagctgaagcccgagaaggatagcgacgaagccgtgacatatagcctgggaaagtttgggcagagggccctggatttctacagcattcatgtgaccaaggagtccacccaccccgtgaagcccctggcccagatcgccggaaacagatacgcctccggacctgtgggaaaggccctgagcgacgcatgtatgggcacaatcgcctccttcctgtctaagtaccaggacatcatcatcgaacaccagaaggtggtgaagggcaaccagaagagactggagagcctgcgggagctggccggcaaggaaaacctggaataccctagcgtgaccctgccacctcagcctcacaccaaggagggcgttgatgcctacaacgaagtgatcgcccgggtgcgaatgtgggtgaacctgaacctgtggcagaagctgaagctaagcagagatgatgccaagcctctgctgagactgaagggattcccttcctttcctctggtcgagagacaggccaacgaagtggactggtgggacatggtgtgtaacgtgaagaagctgatcaacgagaaaaaggaggatggcaaggtgttttggcagaatctggctggctacaagagacaggaagccctgagaccatacctgagcagcgaggaagatcggaagaagggaaagaaattcgctcggtaccagctgggcgacctgctgctgcacctggaaaagaagcacggcgaggactggggaaaggtgtacgacgaggcctgggagcggattgacaagaaagtggaaggcctgagcaagcacatcaagctggaagaggaacggagaagcgaggacgcccagagcaaggccgccctgaccgactggctgcgggctaaggccagcttcgtgatcgagggcctgaaggaggccgacaaggacgagttctgcagatgcgagctgaagctgcagaagtggtacggggacctgcggggaaagcccttcgccatcgaagccgagaacagcatcctggacatcagcggcttcagcaagcagtacaactgtgccttcatctggcagaaggacggcgtgaagaagctgaacctgtacctgatcatcaactacttcaagggcggcaagctgcggttcaagaagatcaaacctgaagccttcgaagccaacagattctacaccgtgatcaacaaaaagagcggcgagatcgtgcccatggaggtgaacttcaacttcgacgaccccaacctgatcatcctgcctctggcctttggcaagagacagggcagagaattcatctggaacgacctgctgtccctggaaaccggcagcctgaagctggccaacggaagagtgatcgagaagacactgtacaacagaagaacccggcaggatgagcctgccctgttcgtggccctgaccttcgagcggcgggaggtcctggactcctccaatatcaaaccaatgaacctgatcggcgtggcaagaggcgaaaacatccccgccgtgatcgccctgaccgaccccgagggctgcccactgagccggtttaaggatagcctgggaaacccaacccacatcctgagaatcggcgagagctataaggagaagcagcggaccatccaggccaagaaggaggtggagcagcggagagccggcggctacagccggaagtacgccagcaaagccaagaatctggcagacgatatggtgagaaacaccgctagagatctgctgtactacgccgtgacccaggatgccatgctgatcttcgccaacctgagccggggcttcggccggcagggcaagcggaccttcatggccgagagacagtacacacggatggaggactggctgaccgccaagctggcctacgagggcctgagcaagacctacctgtccaagacactggcccagtacacctccaagacatgcagcaactgtgggtttaccatcaccagcgccgactacgacagggtgctggagaagctgaagaagacagcaacaggctggatgaccacaattaacggcaaggagctgaaggtggagggccagattacctactacaacagatacaagagacagaacgtagtcaaggacctgtccgtcgagctggatagactgagcgaagaatctgtgaacaacgacatctcctcctggacaaagggcagaagcggagaagctctgagcctcctgaagaaaagattctcccatagacccgtgcaggagaagttcgtgtgcctgaactgcggcttcgagacacacgcagccgagcaagccgccctgaacatcgccagatcctggctgttcctgcggagccaggagtacaagaaataccagacaaacaagacaaccggcaacaccgataagagagccttcgtcgagacctggcagtccttttaccggaagaagcttaaggaggtgtggaaacctgccgtgcggtctggcggatctggcggaggctccaccagccccaagaaaaagagaaaagtctaagctgccttctgcggggcttgccttctggccatgcccttcttctctcccttgcacctgtacctcttggtctttgaataaagcctgagtaggaaggctagcaaaaaaaaaaaaaaaaaaaaaaaaaaaaaaaaaaaaaaaaaaaaaaaaaaaaaaaaaaaaaaaaaaaaaaaaaaaaaaaa

SEQ ID NO: 12419 - RNA, 5785 nt, synthetic construct
  source 1..5785: mol_type = other RNA
aggaaataagagagaaaagaagagtaagaagaaatataagagccaccatggcccctaagaagaagcgtaaagtgagccggatggaacgcctcgtctacgaggtgcggcagaagtgcagaaacatcgaggacatctgcatctcctgcggatctctgaacgtgaccctggagcacccactgttcatcggcggcatgtgccagaactgtaaaaactgttttctggagtgtgcctatcaatacgacgatgacggctaccagagctactgcaccatctgttgcggcggaagagaggtgctgatgtgtggaaataacaactgctgccggtgcttctgcgtggaatgcgtggacctgctggtgggccccggcgccgcccaggccgctattaaggaagatccttggaactgctacatgtgcggccacaagggcacatacggcctgctgagacggagagaggactggcctagcagactgcagatgttcttcgccaataaccacgaccaggagttcgacccccctaaggtgtaccctcccgtccccgccgagaagagaaagcccatccgggtcctgagcctgttcgatggcatcgccaccggtctgctggtgctgaaggacctgggcatccaggtggataggtacattgcctccgaggtgtgcgaggactccatcaccgtgggaatggtgcgtcatcagggcaagatcatgtacgtgggcgacgtgcggagcgtgacacagaagcatatccaggagtggggccctttcgacctggtgatcggcggcagcccttgcaatgacctgagcatcgtgaacccagcccggaagggcctgtacgagggaaccggcagactgttcttcgagttttacagactgctgcacgacgcccggcctaaggaaggcgacgaccggcccttcttttggctgttcgagaatgtggtggccatgggagtcagcgacaagcgggatattagccggttcctggagagcaaccccgtgatgatcgatgccaaggaagtgagcgccgcccaccgggccagatacttctggggcaatctgcctggcatgaacagacccctggccagcaccgtgaacgacaagctggagctgcaggagtgcctggagcacggccggatcgccaagttcagcaaggtgagaaccatcaccacccgaagcaacagcatcaaacaaggcaaggaccagcactttcctgtgttcatgaacgagaaggaggacatcctgtggtgtaccgagatggagagagtgttcgggttcccagtccactacacagatgtcagcaacatgtctagactggccagacagagactgctgggaagaagctggtccgtccctgtgatcagacacctgttcgcccctctgaaggagtacttcgcctgcgtgagcagcggcaacagcaacgccaacagccggggccccagcttctctagcggcctggtgccactgtccctgagagggagccacatgggccccatggagatctacaaaaccgtgagcgcctggaagcggcagcctgtgcgcgtgctgagcctgtttcggaatatcgataaagtcctgaaaagcctgggattcctggagagcggctctggctccggcggtggcaccctgaagtacgtggaggatgtgacaaacgtggtcagacgggatgtggagaagtggggccccttcgatctggtgtacggcagcacccaacccctgggcagctcttgtgaccggtgccctggctggtacatgtttcagttccaccggatcctgcagtacgccctgccgagacaggagtcccagcggccattcttttggattttcatggacaacttgctgctgaccgaggatgaccaggaaactaccactcggttcctgcagaccgaagccgtgaccctgcaggacgtgagaggccgggactaccagaacgccatgcgggtgtggtccaacatccctggactgaaaagcaagcacgcacctctgacccctaaagaagaggagtacctgcaggcccaggtgcggagcagaagcaagctggacgcccctaaggtggatctgctggtgaagaattgcctcctgcccctgagagagtacttcaagtatttcagccagaatagtctgcccctgggaggcagcggcggcggcgagatggacagcgtgaccttcgaggacgtggccgtgaacttcaccagcgaggagtgggccctgctggaccccagccagaagaagctgtacagggccgtgatgagggagaccttcaggaacctggccagcatcggcctgaacctgggcaagaagtgggaggaccacaacatcgaggacaggtacaagacccacggcaagaagctgaggagccacatggtggagaagctgcacgagagcaaggagggcggcccaagcagcggcgcccctcctcccagcggcggcagcccagccggctccccaacctctaccgaggagggcacctctgagtccgccacccccgagagcggccctggcacctccaccgagcccagcgagggcagcgcacccggcagccctgccggcagccccacctccacagaggagggaaccagcaccgagcccagcgaaggcagcgccccaggcaccagcaccgagcctagtgagcaggagattaaacggatcaacaagatcagaagaagacttgtgaaagacagcaacaccaagaaggccggcaagacaggccccatgaaaaccctgctggttagagtgatgacacccgatctgagagagcggctggaaaacctgagaaagaagcctgaaaatatcccccagcccatcagcaatacatctagagccaacctgaataagctgctgaccgattacaccgaaatgaagaaggcgatcctgcatgtgtactgggaagagttccagaaggaccctgtgggcctgatgagccgggtggcccagcctgccagcaagaagatcgatcagaacaagctgaaacctgagatggacgagaagggcaacctgaccaccgccggctttgcctgctctcagtgtggccagcccctgttcgtgtacaagctggagcaggtgtctgagaagggcaaggcttacaccaactacttcggacggtgcaatgtggccgagcacgaaaagctgatcctgctggcccagctgaagcccgagaaggatagcgacgaagccgtgacatatagcctgggaaagtttgggcagagggccctggatttctacagcattcatgtgaccaaggagtccacccaccccgtgaagcccctggcccagatcgccggaaacagatacgcctccggacctgtgggaaaggccctgagcgacgcatgtatgggcacaatcgcctccttcctgtctaagtaccaggacatcatcatcgaacaccagaaggtggtgaagggcaaccagaagagactggagagcctgcgggagctggccggcaaggaaaacctggaataccctagcgtgaccctgccacctcagcctcacaccaaggagggcgttgatgcctacaacgaagtgatcgcccgggtgcgaatgtgggtgaacctgaacctgtggcagaagctgaagctaagcagagatgatgccaagcctctgctgagactgaagggattcccttcctttcctctggtcgagagacaggccaacgaagtggactggtgggacatggtgtgtaacgtgaagaagctgatcaacgagaaaaaggaggatggcaaggtgttttggcagaatctggctggctacaagagacaggaagccctgagaccatacctgagcagcgaggaagatcggaagaagggaaagaaattcgctcggtaccagctgggcgacctgctgctgcacctggaaaagaagcacggcgaggactggggaaaggtgtacgacgaggcctgggagcggattgacaagaaagtggaaggcctgagcaagcacatcaagctggaagaggaacggagaagcgaggacgcccagagcaaggccgccctgaccgactggctgcgggctaaggccagcttcgtgatcgagggcctgaaggaggccgacaaggacgagttctgcagatgcgagctgaagctgcagaagtggtacggggacctgcggggaaagcccttcgccatcgaagccgagaacagcatcctggacatcagcggcttcagcaagcagtacaactgtgccttcatctggcagaaggacggcgtgaagaagctgaacctgtacctgatcatcaactacttcaagggcggcaagctgcggttcaagaagatcaaacctgaagccttcgaagccaacagattctacaccgtgatcaacaaaaagagcggcgagatcgtgcccatggaggtgaacttcaacttcgacgaccccaacctgatcatcctgcctctggcctttggcaagagacagggcagagaattcatctggaacgacctgctgtccctggaaaccggcagcctgaagctggccaacggaagagtgatcgagaagacactgtacaacagaagaacccggcaggatgagcctgccctgttcgtggccctgaccttcgagcggcgggaggtcctggactcctccaatatcaaaccaatgaacctgatcggcgtggcaagaggcgaaaacatccccgccgtgatcgccctgaccgaccccgagggctgcccactgagccggtttaaggatagcctgggaaacccaacccacatcctgagaatcggcgagagctataaggagaagcagcggaccatccaggccaagaaggaggtggagcagcggagagccggcggctacagccggaagtacgccagcaaagccaagaatctggcagacgatatggtgagaaacaccgctagagatctgctgtactacgccgtgacccaggatgccatgctgatcttcgccaacctgagccggggcttcggccggcagggcaagcggaccttcatggccgagagacagtacacacggatggaggactggctgaccgccaagctggcctacgagggcctgagcaagacctacctgtccaagacactggcccagtacacctccaagacatgcagcaactgtgggtttaccatcaccagcgccgactacgacagggtgctggagaagctgaagaagacagcaacaggctggatgaccacaattaacggcaaggagctgaaggtggagggccagattacctactacaacagatacaagagacagaacgtagtcaaggacctgtccgtcgagctggatagactgagcgaagaatctgtgaacaacgacatctcctcctggacaaagggcagaagcggagaagctctgagcctcctgaagaaaagattctcccatagacccgtgcaggagaagttcgtgtgcctgaactgcggcttcgagacacacgcagccgagcaagccgccctgaacatcgccagatcctggctgttcctgcggagccaggagtacaagaaataccagacaaacaagacaaccggcaacaccgataagagagccttcgtcgagacctggcagtccttttaccggaagaagcttaaggaggtgtggaaacctgccgtgcggtctggcggatctggcggaggctccaccagccccaagaaaaagagaaaagtctaagctgccttctgcggggcttgccttctggccatgcccttcttctctcccttgcacctgtacctcttggtctttgaataaagcctgagtaggaaggctagcaaaaaaaaaaaaaaaaaaaaaaaaaaaaaaaaaaaaaaaaaaaaaaaaaaaaaaaaaaaaaaaaaaaaaaaaaaaaaaaa

SEQ ID NO: 12420 - RNA, 5785 nt, synthetic construct
  source 1..5785: mol_type = other RNA
aggaaataagagagaaaagaagagtaagaagaaatataagagccaccatggcccctaagaagaagcgtaaagtgagccggatggaacgcctcgtctacgaggtgcggcagaagtgcagaaacatcgaggacatctgcatctcctgcggatctctgaacgtgaccctggagcacccactgttcatcggcggcatgtgccagaactgtaaaaactgttttctggagtgtgcctatcaatacgacgatgacggctaccagagctactgcaccatctgttgcggcggaagagaggtgctgatgtgtggaaataacaactgctgccggtgcttctgcgtggaatgcgtggacctgctggtgggccccggcgccgcccaggccgctattaaggaagatccttggaactgctacatgtgcggccacaagggcacatacggcctgctgagacggagagaggactggcctagcagactgcagatgttcttcgccaataaccacgaccaggagttcgacccccctaaggtgtaccctcccgtccccgccgagaagagaaagcccatccgggtcctgagcctgttcgatggcatcgccaccggtctgctggtgctgaaggacctgggcatccaggtggataggtacattgcctccgaggtgtgcgaggactccatcaccgtgggaatggtgcgtcatcagggcaagatcatgtacgtgggcgacgtgcggagcgtgacacagaagcatatccaggagtggggccctttcgacctggtgatcggcggcagcccttgcaatgacctgagcatcgtgaacccagcccggaagggcctgtacgagggaaccggcagactgttcttcgagttttacagactgctgcacgacgcccggcctaaggaaggcgacgaccggcccttcttttggctgttcgagaatgtggtggccatgggagtcagcgacaagcgggatattagccggttcctggagagcaaccccgtgatgatcgatgccaaggaagtgagcgccgcccaccgggccagatacttctggggcaatctgcctggcatgaacagacccctggccagcaccgtgaacgacaagctggagctgcaggagtgcctggagcacggccggatcgccaagttcagcaaggtgagaaccatcaccacccgaagcaacagcatcaaacaaggcaaggaccagcactttcctgtgttcatgaacgagaaggaggacatcctgtggtgtaccgagatggagagagtgttcgggttcccagtccactacacagatgtcagcaacatgtctagactggccagacagagactgctgggaagaagctggtccgtccctgtgatcagacacctgttcgcccctctgaaggagtacttcgcctgcgtgagcagcggcaacagcaacgccaacagccggggccccagcttctctagcggcctggtgccactgtccctgagagggagccacatgggccccatggagatctacaaaaccgtgagcgcctggaagcggcagcctgtgcgcgtgctgagcctgtttcggaatatcgataaagtcctgaaaagcctgggattcctggagagcggctctggctccggcggtggcaccctgaagtacgtggaggatgtgacaaacgtggtcagacgggatgtggagaagtggggccccttcgatctggtgtacggcagcacccaacccctgggcagctcttgtgaccggtgccctggctggtacatgtttcagttccaccggatcctgcagtacgccctgccgagacaggagtcccagcggccattcttttggattttcatggacaacttgctgctgaccgaggatgaccaggaaactaccactcggttcctgcagaccgaagccgtgaccctgcaggacgtgagaggccgggactaccagaacgccatgcgggtgtggtccaacatccctggactgaaaagcaagcacgcacctctgacccctaaagaagaggagtacctgcaggcccaggtgcggagcagaagcaagctggacgcccctaaggtggatctgctggtgaagaattgcctcctgcccctgagagagtacttcaagtatttcagccagaatagtctgcccctgggaggcagcggcggcggcagccaggagagcgtgaccttccaggacgtggccgtggacttcaccagggaggagtggaagaggctggacagcgcccagagggacctgtacagggacgtgatgctggagaactaccagaacctggtgagcctgggcctgctggtgttccagagcgacgtgatcagccagctggagaacggcgaggtgcccctggtgcccggcggcgaggtgcccaggggcaccaggcccggcagcgtgaaccagggcggcccaagcagcggcgcccctcctcccagcggcggcagcccagccggctccccaacctctaccgaggagggcacctctgagtccgccacccccgagagcggccctggcacctccaccgagcccagcgagggcagcgcacccggcagccctgccggcagccccacctccacagaggagggaaccagcaccgagcccagcgaaggcagcgccccaggcaccagcaccgagcctagtgagcaggagattaaacggatcaacaagatcagaagaagacttgtgaaagacagcaacaccaagaaggccggcaagacaggccccatgaaaaccctgctggttagagtgatgacacccgatctgagagagcggctggaaaacctgagaaagaagcctgaaaatatcccccagcccatcagcaatacatctagagccaacctgaataagctgctgaccgattacaccgaaatgaagaaggcgatcctgcatgtgtactgggaagagttccagaaggaccctgtgggcctgatgagccgggtggcccagcctgccagcaagaagatcgatcagaacaagctgaaacctgagatggacgagaagggcaacctgaccaccgccggctttgcctgctctcagtgtggccagcccctgttcgtgtacaagctggagcaggtgtctgagaagggcaaggcttacaccaactacttcggacggtgcaatgtggccgagcacgaaaagctgatcctgctggcccagctgaagcccgagaaggatagcgacgaagccgtgacatatagcctgggaaagtttgggcagagggccctggatttctacagcattcatgtgaccaaggagtccacccaccccgtgaagcccctggcccagatcgccggaaacagatacgcctccggacctgtgggaaaggccctgagcgacgcatgtatgggcacaatcgcctccttcctgtctaagtaccaggacatcatcatcgaacaccagaaggtggtgaagggcaaccagaagagactggagagcctgcgggagctggccggcaaggaaaacctggaataccctagcgtgaccctgccacctcagcctcacaccaaggagggcgttgatgcctacaacgaagtgatcgcccgggtgcgaatgtgggtgaacctgaacctgtggcagaagctgaagctaagcagagatgatgccaagcctctgctgagactgaagggattcccttcctttcctctggtcgagagacaggccaacgaagtggactggtgggacatggtgtgtaacgtgaagaagctgatcaacgagaaaaaggaggatggcaaggtgttttggcagaatctggctggctacaagagacaggaagccctgagaccatacctgagcagcgaggaagatcggaagaagggaaagaaattcgctcggtaccagctgggcgacctgctgctgcacctggaaaagaagcacggcgaggactggggaaaggtgtacgacgaggcctgggagcggattgacaagaaagtggaaggcctgagcaagcacatcaagctggaagaggaacggagaagcgaggacgcccagagcaaggccgccctgaccgactggctgcgggctaaggccagcttcgtgatcgagggcctgaaggaggccgacaaggacgagttctgcagatgcgagctgaagctgcagaagtggtacggggacctgcggggaaagcccttcgccatcgaagccgagaacagcatcctggacatcagcggcttcagcaagcagtacaactgtgccttcatctggcagaaggacggcgtgaagaagctgaacctgtacctgatcatcaactacttcaagggcggcaagctgcggttcaagaagatcaaacctgaagccttcgaagccaacagattctacaccgtgatcaacaaaaagagcggcgagatcgtgcccatggaggtgaacttcaacttcgacgaccccaacctgatcatcctgcctctggcctttggcaagagacagggcagagaattcatctggaacgacctgctgtccctggaaaccggcagcctgaagctggccaacggaagagtgatcgagaagacactgtacaacagaagaacccggcaggatgagcctgccctgttcgtggccctgaccttcgagcggcgggaggtcctggactcctccaatatcaaaccaatgaacctgatcggcgtggcaagaggcgaaaacatccccgccgtgatcgccctgaccgaccccgagggctgcccactgagccggtttaaggatagcctgggaaacccaacccacatcctgagaatcggcgagagctataaggagaagcagcggaccatccaggccaagaaggaggtggagcagcggagagccggcggctacagccggaagtacgccagcaaagccaagaatctggcagacgatatggtgagaaacaccgctagagatctgctgtactacgccgtgacccaggatgccatgctgatcttcgccaacctgagccggggcttcggccggcagggcaagcggaccttcatggccgagagacagtacacacggatggaggactggctgaccgccaagctggcctacgagggcctgagcaagacctacctgtccaagacactggcccagtacacctccaagacatgcagcaactgtgggtttaccatcaccagcgccgactacgacagggtgctggagaagctgaagaagacagcaacaggctggatgaccacaattaacggcaaggagctgaaggtggagggccagattacctactacaacagatacaagagacagaacgtagtcaaggacctgtccgtcgagctggatagactgagcgaagaatctgtgaacaacgacatctcctcctggacaaagggcagaagcggagaagctctgagcctcctgaagaaaagattctcccatagacccgtgcaggagaagttcgtgtgcctgaactgcggcttcgagacacacgcagccgagcaagccgccctgaacatcgccagatcctggctgttcctgcggagccaggagtacaagaaataccagacaaacaagacaaccggcaacaccgataagagagccttcgtcgagacctggcagtccttttaccggaagaagcttaaggaggtgtggaaacctgccgtgcggtctggcggatctggcggaggctccaccagccccaagaaaaagagaaaagtctaagctgccttctgcggggcttgccttctggccatgcccttcttctctcccttgcacctgtacctcttggtctttgaataaagcctgagtaggaaggctagcaaaaaaaaaaaaaaaaaaaaaaaaaaaaaaaaaaaaaaaaaaaaaaaaaaaaaaaaaaaaaaaaaaaaaaaaaaaaaaaa

SEQ ID NO: 12421 - RNA, 5782 nt, synthetic construct
  source 1..5782: mol_type = other RNA
aggaaataagagagaaaagaagagtaagaagaaatataagagccaccatggcccctaagaagaagcgtaaagtgagccggatggaacgcctcgtctacgaggtgcggcagaagtgcagaaacatcgaggacatctgcatctcctgcggatctctgaacgtgaccctggagcacccactgttcatcggcggcatgtgccagaactgtaaaaactgttttctggagtgtgcctatcaatacgacgatgacggctaccagagctactgcaccatctgttgcggcggaagagaggtgctgatgtgtggaaataacaactgctgccggtgcttctgcgtggaatgcgtggacctgctggtgggccccggcgccgcccaggccgctattaaggaagatccttggaactgctacatgtgcggccacaagggcacatacggcctgctgagacggagagaggactggcctagcagactgcagatgttcttcgccaataaccacgaccaggagttcgacccccctaaggtgtaccctcccgtccccgccgagaagagaaagcccatccgggtcctgagcctgttcgatggcatcgccaccggtctgctggtgctgaaggacctgggcatccaggtggataggtacattgcctccgaggtgtgcgaggactccatcaccgtgggaatggtgcgtcatcagggcaagatcatgtacgtgggcgacgtgcggagcgtgacacagaagcatatccaggagtggggccctttcgacctggtgatcggcggcagcccttgcaatgacctgagcatcgtgaacccagcccggaagggcctgtacgagggaaccggcagactgttcttcgagttttacagactgctgcacgacgcccggcctaaggaaggcgacgaccggcccttcttttggctgttcgagaatgtggtggccatgggagtcagcgacaagcgggatattagccggttcctggagagcaaccccgtgatgatcgatgccaaggaagtgagcgccgcccaccgggccagatacttctggggcaatctgcctggcatgaacagacccctggccagcaccgtgaacgacaagctggagctgcaggagtgcctggagcacggccggatcgccaagttcagcaaggtgagaaccatcaccacccgaagcaacagcatcaaacaaggcaaggaccagcactttcctgtgttcatgaacgagaaggaggacatcctgtggtgtaccgagatggagagagtgttcgggttcccagtccactacacagatgtcagcaacatgtctagactggccagacagagactgctgggaagaagctggtccgtccctgtgatcagacacctgttcgcccctctgaaggagtacttcgcctgcgtgagcagcggcaacagcaacgccaacagccggggccccagcttctctagcggcctggtgccactgtccctgagagggagccacatgggccccatggagatctacaaaaccgtgagcgcctggaagcggcagcctgtgcgcgtgctgagcctgtttcggaatatcgataaagtcctgaaaagcctgggattcctggagagcggctctggctccggcggtggcaccctgaagtacgtggaggatgtgacaaacgtggtcagacgggatgtggagaagtggggccccttcgatctggtgtacggcagcacccaacccctgggcagctcttgtgaccggtgccctggctggtacatgtttcagttccaccggatcctgcagtacgccctgccgagacaggagtcccagcggccattcttttggattttcatggacaacttgctgctgaccgaggatgaccaggaaactaccactcggttcctgcagaccgaagccgtgaccctgcaggacgtgagaggccgggactaccagaacgccatgcgggtgtggtccaacatccctggactgaaaagcaagcacgcacctctgacccctaaagaagaggagtacctgcaggcccaggtgcggagcagaagcaagctggacgcccctaaggtggatctgctggtgaagaattgcctcctgcccctgagagagtacttcaagtatttcagccagaatagtctgcccctgggaggcagcggcggcggcctgcagaggctgctgaccttcggcgacgtggccatcgagttcagccaggaggagtggaggtgcctgagccacacccagagggagctgtacagggacgtgatgctggagaactacaggcacctgctgttcctgggcctgatcgtgagcaagcccgacctggtgagcctgctggagcagaggaaggagccctgggacgtgaagaggaagaagaccgtggtgttcgaccccggcaggtgggagggcggcccaagcagcggcgcccctcctcccagcggcggcagcccagccggctccccaacctctaccgaggagggcacctctgagtccgccacccccgagagcggccctggcacctccaccgagcccagcgagggcagcgcacccggcagccctgccggcagccccacctccacagaggagggaaccagcaccgagcccagcgaaggcagcgccccaggcaccagcaccgagcctagtgagcaggagattaaacggatcaacaagatcagaagaagacttgtgaaagacagcaacaccaagaaggccggcaagacaggccccatgaaaaccctgctggttagagtgatgacacccgatctgagagagcggctggaaaacctgagaaagaagcctgaaaatatcccccagcccatcagcaatacatctagagccaacctgaataagctgctgaccgattacaccgaaatgaagaaggcgatcctgcatgtgtactgggaagagttccagaaggaccctgtgggcctgatgagccgggtggcccagcctgccagcaagaagatcgatcagaacaagctgaaacctgagatggacgagaagggcaacctgaccaccgccggctttgcctgctctcagtgtggccagcccctgttcgtgtacaagctggagcaggtgtctgagaagggcaaggcttacaccaactacttcggacggtgcaatgtggccgagcacgaaaagctgatcctgctggcccagctgaagcccgagaaggatagcgacgaagccgtgacatatagcctgggaaagtttgggcagagggccctggatttctacagcattcatgtgaccaaggagtccacccaccccgtgaagcccctggcccagatcgccggaaacagatacgcctccggacctgtgggaaaggccctgagcgacgcatgtatgggcacaatcgcctccttcctgtctaagtaccaggacatcatcatcgaacaccagaaggtggtgaagggcaaccagaagagactggagagcctgcgggagctggccggcaaggaaaacctggaataccctagcgtgaccctgccacctcagcctcacaccaaggagggcgttgatgcctacaacgaagtgatcgcccgggtgcgaatgtgggtgaacctgaacctgtggcagaagctgaagctaagcagagatgatgccaagcctctgctgagactgaagggattcccttcctttcctctggtcgagagacaggccaacgaagtggactggtgggacatggtgtgtaacgtgaagaagctgatcaacgagaaaaaggaggatggcaaggtgttttggcagaatctggctggctacaagagacaggaagccctgagaccatacctgagcagcgaggaagatcggaagaagggaaagaaattcgctcggtaccagctgggcgacctgctgctgcacctggaaaagaagcacggcgaggactggggaaaggtgtacgacgaggcctgggagcggattgacaagaaagtggaaggcctgagcaagcacatcaagctggaagaggaacggagaagcgaggacgcccagagcaaggccgccctgaccgactggctgcgggctaaggccagcttcgtgatcgagggcctgaaggaggccgacaaggacgagttctgcagatgcgagctgaagctgcagaagtggtacggggacctgcggggaaagcccttcgccatcgaagccgagaacagcatcctggacatcagcggcttcagcaagcagtacaactgtgccttcatctggcagaaggacggcgtgaagaagctgaacctgtacctgatcatcaactacttcaagggcggcaagctgcggttcaagaagatcaaacctgaagccttcgaagccaacagattctacaccgtgatcaacaaaaagagcggcgagatcgtgcccatggaggtgaacttcaacttcgacgaccccaacctgatcatcctgcctctggcctttggcaagagacagggcagagaattcatctggaacgacctgctgtccctggaaaccggcagcctgaagctggccaacggaagagtgatcgagaagacactgtacaacagaagaacccggcaggatgagcctgccctgttcgtggccctgaccttcgagcggcgggaggtcctggactcctccaatatcaaaccaatgaacctgatcggcgtggcaagaggcgaaaacatccccgccgtgatcgccctgaccgaccccgagggctgcccactgagccggtttaaggatagcctgggaaacccaacccacatcctgagaatcggcgagagctataaggagaagcagcggaccatccaggccaagaaggaggtggagcagcggagagccggcggctacagccggaagtacgccagcaaagccaagaatctggcagacgatatggtgagaaacaccgctagagatctgctgtactacgccgtgacccaggatgccatgctgatcttcgccaacctgagccggggcttcggccggcagggcaagcggaccttcatggccgagagacagtacacacggatggaggactggctgaccgccaagctggcctacgagggcctgagcaagacctacctgtccaagacactggcccagtacacctccaagacatgcagcaactgtgggtttaccatcaccagcgccgactacgacagggtgctggagaagctgaagaagacagcaacaggctggatgaccacaattaacggcaaggagctgaaggtggagggccagattacctactacaacagatacaagagacagaacgtagtcaaggacctgtccgtcgagctggatagactgagcgaagaatctgtgaacaacgacatctcctcctggacaaagggcagaagcggagaagctctgagcctcctgaagaaaagattctcccatagacccgtgcaggagaagttcgtgtgcctgaactgcggcttcgagacacacgcagccgagcaagccgccctgaacatcgccagatcctggctgttcctgcggagccaggagtacaagaaataccagacaaacaagacaaccggcaacaccgataagagagccttcgtcgagacctggcagtccttttaccggaagaagcttaaggaggtgtggaaacctgccgtgcggtctggcggatctggcggaggctccaccagccccaagaaaaagagaaaagtctaagctgccttctgcggggcttgccttctggccatgcccttcttctctcccttgcacctgtacctcttggtctttgaataaagcctgagtaggaaggctagcaaaaaaaaaaaaaaaaaaaaaaaaaaaaaaaaaaaaaaaaaaaaaaaaaaaaaaaaaaaaaaaaaaaaaaaaaaaaaaaa

SEQ ID NO: 12422 - RNA, 5785 nt, synthetic construct
  source 1..5785: mol_type = other RNA
aggaaataagagagaaaagaagagtaagaagaaatataagagccaccatggcccctaagaagaagcgtaaagtgagccggatggaacgcctcgtctacgaggtgcggcagaagtgcagaaacatcgaggacatctgcatctcctgcggatctctgaacgtgaccctggagcacccactgttcatcggcggcatgtgccagaactgtaaaaactgttttctggagtgtgcctatcaatacgacgatgacggctaccagagctactgcaccatctgttgcggcggaagagaggtgctgatgtgtggaaataacaactgctgccggtgcttctgcgtggaatgcgtggacctgctggtgggccccggcgccgcccaggccgctattaaggaagatccttggaactgctacatgtgcggccacaagggcacatacggcctgctgagacggagagaggactggcctagcagactgcagatgttcttcgccaataaccacgaccaggagttcgacccccctaaggtgtaccctcccgtccccgccgagaagagaaagcccatccgggtcctgagcctgttcgatggcatcgccaccggtctgctggtgctgaaggacctgggcatccaggtggataggtacattgcctccgaggtgtgcgaggactccatcaccgtgggaatggtgcgtcatcagggcaagatcatgtacgtgggcgacgtgcggagcgtgacacagaagcatatccaggagtggggccctttcgacctggtgatcggcggcagcccttgcaatgacctgagcatcgtgaacccagcccggaagggcctgtacgagggaaccggcagactgttcttcgagttttacagactgctgcacgacgcccggcctaaggaaggcgacgaccggcccttcttttggctgttcgagaatgtggtggccatgggagtcagcgacaagcgggatattagccggttcctggagagcaaccccgtgatgatcgatgccaaggaagtgagcgccgcccaccgggccagatacttctggggcaatctgcctggcatgaacagacccctggccagcaccgtgaacgacaagctggagctgcaggagtgcctggagcacggccggatcgccaagttcagcaaggtgagaaccatcaccacccgaagcaacagcatcaaacaaggcaaggaccagcactttcctgtgttcatgaacgagaaggaggacatcctgtggtgtaccgagatggagagagtgttcgggttcccagtccactacacagatgtcagcaacatgtctagactggccagacagagactgctgggaagaagctggtccgtccctgtgatcagacacctgttcgcccctctgaaggagtacttcgcctgcgtgagcagcggcaacagcaacgccaacagccggggccccagcttctctagcggcctggtgccactgtccctgagagggagccacatgggccccatggagatctacaaaaccgtgagcgcctggaagcggcagcctgtgcgcgtgctgagcctgtttcggaatatcgataaagtcctgaaaagcctgggattcctggagagcggctctggctccggcggtggcaccctgaagtacgtggaggatgtgacaaacgtggtcagacgggatgtggagaagtggggccccttcgatctggtgtacggcagcacccaacccctgggcagctcttgtgaccggtgccctggctggtacatgtttcagttccaccggatcctgcagtacgccctgccgagacaggagtcccagcggccattcttttggattttcatggacaacttgctgctgaccgaggatgaccaggaaactaccactcggttcctgcagaccgaagccgtgaccctgcaggacgtgagaggccgggactaccagaacgccatgcgggtgtggtccaacatccctggactgaaaagcaagcacgcacctctgacccctaaagaagaggagtacctgcaggcccaggtgcggagcagaagcaagctggacgcccctaaggtggatctgctggtgaagaattgcctcctgcccctgagagagtacttcaagtatttcagccagaatagtctgcccctgggaggcagcggcggcggcgaccacgagctggtgaccttcagggacgtgatcatcaacttcagccaggacgagtgggagtacctgaacagcgcccagagggacctgtactgggacgtgatgatggagaactacagcaacctggtgagcctgggctgcttcatcagcaagcccgacgtgatcagcctgctggagcagggcaaggagccctggaaggtggtgaggaaggagaggaggaggtaccccgacctggagaccaggcacggcggcccaagcagcggcgcccctcctcccagcggcggcagcccagccggctccccaacctctaccgaggagggcacctctgagtccgccacccccgagagcggccctggcacctccaccgagcccagcgagggcagcgcacccggcagccctgccggcagccccacctccacagaggagggaaccagcaccgagcccagcgaaggcagcgccccaggcaccagcaccgagcctagtgagcaggagattaaacggatcaacaagatcagaagaagacttgtgaaagacagcaacaccaagaaggccggcaagacaggccccatgaaaaccctgctggttagagtgatgacacccgatctgagagagcggctggaaaacctgagaaagaagcctgaaaatatcccccagcccatcagcaatacatctagagccaacctgaataagctgctgaccgattacaccgaaatgaagaaggcgatcctgcatgtgtactgggaagagttccagaaggaccctgtgggcctgatgagccgggtggcccagcctgccagcaagaagatcgatcagaacaagctgaaacctgagatggacgagaagggcaacctgaccaccgccggctttgcctgctctcagtgtggccagcccctgttcgtgtacaagctggagcaggtgtctgagaagggcaaggcttacaccaactacttcggacggtgcaatgtggccgagcacgaaaagctgatcctgctggcccagctgaagcccgagaaggatagcgacgaagccgtgacatatagcctgggaaagtttgggcagagggccctggatttctacagcattcatgtgaccaaggagtccacccaccccgtgaagcccctggcccagatcgccggaaacagatacgcctccggacctgtgggaaaggccctgagcgacgcatgtatgggcacaatcgcctccttcctgtctaagtaccaggacatcatcatcgaacaccagaaggtggtgaagggcaaccagaagagactggagagcctgcgggagctggccggcaaggaaaacctggaataccctagcgtgaccctgccacctcagcctcacaccaaggagggcgttgatgcctacaacgaagtgatcgcccgggtgcgaatgtgggtgaacctgaacctgtggcagaagctgaagctaagcagagatgatgccaagcctctgctgagactgaagggattcccttcctttcctctggtcgagagacaggccaacgaagtggactggtgggacatggtgtgtaacgtgaagaagctgatcaacgagaaaaaggaggatggcaaggtgttttggcagaatctggctggctacaagagacaggaagccctgagaccatacctgagcagcgaggaagatcggaagaagggaaagaaattcgctcggtaccagctgggcgacctgctgctgcacctggaaaagaagcacggcgaggactggggaaaggtgtacgacgaggcctgggagcggattgacaagaaagtggaaggcctgagcaagcacatcaagctggaagaggaacggagaagcgaggacgcccagagcaaggccgccctgaccgactggctgcgggctaaggccagcttcgtgatcgagggcctgaaggaggccgacaaggacgagttctgcagatgcgagctgaagctgcagaagtggtacggggacctgcggggaaagcccttcgccatcgaagccgagaacagcatcctggacatcagcggcttcagcaagcagtacaactgtgccttcatctggcagaaggacggcgtgaagaagctgaacctgtacctgatcatcaactacttcaagggcggcaagctgcggttcaagaagatcaaacctgaagccttcgaagccaacagattctacaccgtgatcaacaaaaagagcggcgagatcgtgcccatggaggtgaacttcaacttcgacgaccccaacctgatcatcctgcctctggcctttggcaagagacagggcagagaattcatctggaacgacctgctgtccctggaaaccggcagcctgaagctggccaacggaagagtgatcgagaagacactgtacaacagaagaacccggcaggatgagcctgccctgttcgtggccctgaccttcgagcggcgggaggtcctggactcctccaatatcaaaccaatgaacctgatcggcgtggcaagaggcgaaaacatccccgccgtgatcgccctgaccgaccccgagggctgcccactgagccggtttaaggatagcctgggaaacccaacccacatcctgagaatcggcgagagctataaggagaagcagcggaccatccaggccaagaaggaggtggagcagcggagagccggcggctacagccggaagtacgccagcaaagccaagaatctggcagacgatatggtgagaaacaccgctagagatctgctgtactacgccgtgacccaggatgccatgctgatcttcgccaacctgagccggggcttcggccggcagggcaagcggaccttcatggccgagagacagtacacacggatggaggactggctgaccgccaagctggcctacgagggcctgagcaagacctacctgtccaagacactggcccagtacacctccaagacatgcagcaactgtgggtttaccatcaccagcgccgactacgacagggtgctggagaagctgaagaagacagcaacaggctggatgaccacaattaacggcaaggagctgaaggtggagggccagattacctactacaacagatacaagagacagaacgtagtcaaggacctgtccgtcgagctggatagactgagcgaagaatctgtgaacaacgacatctcctcctggacaaagggcagaagcggagaagctctgagcctcctgaagaaaagattctcccatagacccgtgcaggagaagttcgtgtgcctgaactgcggcttcgagacacacgcagccgagcaagccgccctgaacatcgccagatcctggctgttcctgcggagccaggagtacaagaaataccagacaaacaagacaaccggcaacaccgataagagagccttcgtcgagacctggcagtccttttaccggaagaagcttaaggaggtgtggaaacctgccgtgcggtctggcggatctggcggaggctccaccagccccaagaaaaagagaaaagtctaagctgccttctgcggggcttgccttctggccatgcccttcttctctcccttgcacctgtacctcttggtctttgaataaagcctgagtaggaaggctagcaaaaaaaaaaaaaaaaaaaaaaaaaaaaaaaaaaaaaaaaaaaaaaaaaaaaaaaaaaaaaaaaaaaaaaaaaaaaaaaa

SEQ ID NO: 12423 - RNA, 5785 nt, synthetic construct
  source 1..5785: mol_type = other RNA
aggaaataagagagaaaagaagagtaagaagaaatataagagccaccatggcccctaagaagaagcgtaaagtgagccggatggaacgcctcgtctacgaggtgcggcagaagtgcagaaacatcgaggacatctgcatctcctgcggatctctgaacgtgaccctggagcacccactgttcatcggcggcatgtgccagaactgtaaaaactgttttctggagtgtgcctatcaatacgacgatgacggctaccagagctactgcaccatctgttgcggcggaagagaggtgctgatgtgtggaaataacaactgctgccggtgcttctgcgtggaatgcgtggacctgctggtgggccccggcgccgcccaggccgctattaaggaagatccttggaactgctacatgtgcggccacaagggcacatacggcctgctgagacggagagaggactggcctagcagactgcagatgttcttcgccaataaccacgaccaggagttcgacccccctaaggtgtaccctcccgtccccgccgagaagagaaagcccatccgggtcctgagcctgttcgatggcatcgccaccggtctgctggtgctgaaggacctgggcatccaggtggataggtacattgcctccgaggtgtgcgaggactccatcaccgtgggaatggtgcgtcatcagggcaagatcatgtacgtgggcgacgtgcggagcgtgacacagaagcatatccaggagtggggccctttcgacctggtgatcggcggcagcccttgcaatgacctgagcatcgtgaacccagcccggaagggcctgtacgagggaaccggcagactgttcttcgagttttacagactgctgcacgacgcccggcctaaggaaggcgacgaccggcccttcttttggctgttcgagaatgtggtggccatgggagtcagcgacaagcgggatattagccggttcctggagagcaaccccgtgatgatcgatgccaaggaagtgagcgccgcccaccgggccagatacttctggggcaatctgcctggcatgaacagacccctggccagcaccgtgaacgacaagctggagctgcaggagtgcctggagcacggccggatcgccaagttcagcaaggtgagaaccatcaccacccgaagcaacagcatcaaacaaggcaaggaccagcactttcctgtgttcatgaacgagaaggaggacatcctgtggtgtaccgagatggagagagtgttcgggttcccagtccactacacagatgtcagcaacatgtctagactggccagacagagactgctgggaagaagctggtccgtccctgtgatcagacacctgttcgcccctctgaaggagtacttcgcctgcgtgagcagcggcaacagcaacgccaacagccggggccccagcttctctagcggcctggtgccactgtccctgagagggagccacatgggccccatggagatctacaaaaccgtgagcgcctggaagcggcagcctgtgcgcgtgctgagcctgtttcggaatatcgataaagtcctgaaaagcctgggattcctggagagcggctctggctccggcggtggcaccctgaagtacgtggaggatgtgacaaacgtggtcagacgggatgtggagaagtggggccccttcgatctggtgtacggcagcacccaacccctgggcagctcttgtgaccggtgccctggctggtacatgtttcagttccaccggatcctgcagtacgccctgccgagacaggagtcccagcggccattcttttggattttcatggacaacttgctgctgaccgaggatgaccaggaaactaccactcggttcctgcagaccgaagccgtgaccctgcaggacgtgagaggccgggactaccagaacgccatgcgggtgtggtccaacatccctggactgaaaagcaagcacgcacctctgacccctaaagaagaggagtacctgcaggcccaggtgcggagcagaagcaagctggacgcccctaaggtggatctgctggtgaagaattgcctcctgcccctgagagagtacttcaagtatttcagccagaatagtctgcccctgggaggcagcggcggcggccagctgggcagcgtggccttcgaggacgtggccgtggacttcacccaggaggagtggggctacctggcccccgcccagagggacctgcacagggaggtgatgctggagaactacaggaacctggtgttcctgggcctggtggccagcaagcccgacgtgatctgccacctggagcagaggaaggagccctggagcctgaggggcatcgagaagaggaaggccctgaggggcacctgccccgacggcggcccaagcagcggcgcccctcctcccagcggcggcagcccagccggctccccaacctctaccgaggagggcacctctgagtccgccacccccgagagcggccctggcacctccaccgagcccagcgagggcagcgcacccggcagccctgccggcagccccacctccacagaggagggaaccagcaccgagcccagcgaaggcagcgccccaggcaccagcaccgagcctagtgagcaggagattaaacggatcaacaagatcagaagaagacttgtgaaagacagcaacaccaagaaggccggcaagacaggccccatgaaaaccctgctggttagagtgatgacacccgatctgagagagcggctggaaaacctgagaaagaagcctgaaaatatcccccagcccatcagcaatacatctagagccaacctgaataagctgctgaccgattacaccgaaatgaagaaggcgatcctgcatgtgtactgggaagagttccagaaggaccctgtgggcctgatgagccgggtggcccagcctgccagcaagaagatcgatcagaacaagctgaaacctgagatggacgagaagggcaacctgaccaccgccggctttgcctgctctcagtgtggccagcccctgttcgtgtacaagctggagcaggtgtctgagaagggcaaggcttacaccaactacttcggacggtgcaatgtggccgagcacgaaaagctgatcctgctggcccagctgaagcccgagaaggatagcgacgaagccgtgacatatagcctgggaaagtttgggcagagggccctggatttctacagcattcatgtgaccaaggagtccacccaccccgtgaagcccctggcccagatcgccggaaacagatacgcctccggacctgtgggaaaggccctgagcgacgcatgtatgggcacaatcgcctccttcctgtctaagtaccaggacatcatcatcgaacaccagaaggtggtgaagggcaaccagaagagactggagagcctgcgggagctggccggcaaggaaaacctggaataccctagcgtgaccctgccacctcagcctcacaccaaggagggcgttgatgcctacaacgaagtgatcgcccgggtgcgaatgtgggtgaacctgaacctgtggcagaagctgaagctaagcagagatgatgccaagcctctgctgagactgaagggattcccttcctttcctctggtcgagagacaggccaacgaagtggactggtgggacatggtgtgtaacgtgaagaagctgatcaacgagaaaaaggaggatggcaaggtgttttggcagaatctggctggctacaagagacaggaagccctgagaccatacctgagcagcgaggaagatcggaagaagggaaagaaattcgctcggtaccagctgggcgacctgctgctgcacctggaaaagaagcacggcgaggactggggaaaggtgtacgacgaggcctgggagcggattgacaagaaagtggaaggcctgagcaagcacatcaagctggaagaggaacggagaagcgaggacgcccagagcaaggccgccctgaccgactggctgcgggctaaggccagcttcgtgatcgagggcctgaaggaggccgacaaggacgagttctgcagatgcgagctgaagctgcagaagtggtacggggacctgcggggaaagcccttcgccatcgaagccgagaacagcatcctggacatcagcggcttcagcaagcagtacaactgtgccttcatctggcagaaggacggcgtgaagaagctgaacctgtacctgatcatcaactacttcaagggcggcaagctgcggttcaagaagatcaaacctgaagccttcgaagccaacagattctacaccgtgatcaacaaaaagagcggcgagatcgtgcccatggaggtgaacttcaacttcgacgaccccaacctgatcatcctgcctctggcctttggcaagagacagggcagagaattcatctggaacgacctgctgtccctggaaaccggcagcctgaagctggccaacggaagagtgatcgagaagacactgtacaacagaagaacccggcaggatgagcctgccctgttcgtggccctgaccttcgagcggcgggaggtcctggactcctccaatatcaaaccaatgaacctgatcggcgtggcaagaggcgaaaacatccccgccgtgatcgccctgaccgaccccgagggctgcccactgagccggtttaaggatagcctgggaaacccaacccacatcctgagaatcggcgagagctataaggagaagcagcggaccatccaggccaagaaggaggtggagcagcggagagccggcggctacagccggaagtacgccagcaaagccaagaatctggcagacgatatggtgagaaacaccgctagagatctgctgtactacgccgtgacccaggatgccatgctgatcttcgccaacctgagccggggcttcggccggcagggcaagcggaccttcatggccgagagacagtacacacggatggaggactggctgaccgccaagctggcctacgagggcctgagcaagacctacctgtccaagacactggcccagtacacctccaagacatgcagcaactgtgggtttaccatcaccagcgccgactacgacagggtgctggagaagctgaagaagacagcaacaggctggatgaccacaattaacggcaaggagctgaaggtggagggccagattacctactacaacagatacaagagacagaacgtagtcaaggacctgtccgtcgagctggatagactgagcgaagaatctgtgaacaacgacatctcctcctggacaaagggcagaagcggagaagctctgagcctcctgaagaaaagattctcccatagacccgtgcaggagaagttcgtgtgcctgaactgcggcttcgagacacacgcagccgagcaagccgccctgaacatcgccagatcctggctgttcctgcggagccaggagtacaagaaataccagacaaacaagacaaccggcaacaccgataagagagccttcgtcgagacctggcagtccttttaccggaagaagcttaaggaggtgtggaaacctgccgtgcggtctggcggatctggcggaggctccaccagccccaagaaaaagagaaaagtctaagctgccttctgcggggcttgccttctggccatgcccttcttctctcccttgcacctgtacctcttggtctttgaataaagcctgagtaggaaggctagcaaaaaaaaaaaaaaaaaaaaaaaaaaaaaaaaaaaaaaaaaaaaaaaaaaaaaaaaaaaaaaaaaaaaaaaaaaaaaaaa

SEQ ID NO: 12424 - RNA, 5785 nt, synthetic construct
  source 1..5785: mol_type = other RNA
aggaaataagagagaaaagaagagtaagaagaaatataagagccaccatggcccctaagaagaagcgtaaagtgagccggatggaacgcctcgtctacgaggtgcggcagaagtgcagaaacatcgaggacatctgcatctcctgcggatctctgaacgtgaccctggagcacccactgttcatcggcggcatgtgccagaactgtaaaaactgttttctggagtgtgcctatcaatacgacgatgacggctaccagagctactgcaccatctgttgcggcggaagagaggtgctgatgtgtggaaataacaactgctgccggtgcttctgcgtggaatgcgtggacctgctggtgggccccggcgccgcccaggccgctattaaggaagatccttggaactgctacatgtgcggccacaagggcacatacggcctgctgagacggagagaggactggcctagcagactgcagatgttcttcgccaataaccacgaccaggagttcgacccccctaaggtgtaccctcccgtccccgccgagaagagaaagcccatccgggtcctgagcctgttcgatggcatcgccaccggtctgctggtgctgaaggacctgggcatccaggtggataggtacattgcctccgaggtgtgcgaggactccatcaccgtgggaatggtgcgtcatcagggcaagatcatgtacgtgggcgacgtgcggagcgtgacacagaagcatatccaggagtggggccctttcgacctggtgatcggcggcagcccttgcaatgacctgagcatcgtgaacccagcccggaagggcctgtacgagggaaccggcagactgttcttcgagttttacagactgctgcacgacgcccggcctaaggaaggcgacgaccggcccttcttttggctgttcgagaatgtggtggccatgggagtcagcgacaagcgggatattagccggttcctggagagcaaccccgtgatgatcgatgccaaggaagtgagcgccgcccaccgggccagatacttctggggcaatctgcctggcatgaacagacccctggccagcaccgtgaacgacaagctggagctgcaggagtgcctggagcacggccggatcgccaagttcagcaaggtgagaaccatcaccacccgaagcaacagcatcaaacaaggcaaggaccagcactttcctgtgttcatgaacgagaaggaggacatcctgtggtgtaccgagatggagagagtgttcgggttcccagtccactacacagatgtcagcaacatgtctagactggccagacagagactgctgggaagaagctggtccgtccctgtgatcagacacctgttcgcccctctgaaggagtacttcgcctgcgtgagcagcggcaacagcaacgccaacagccggggccccagcttctctagcggcctggtgccactgtccctgagagggagccacatgggccccatggagatctacaaaaccgtgagcgcctggaagcggcagcctgtgcgcgtgctgagcctgtttcggaatatcgataaagtcctgaaaagcctgggattcctggagagcggctctggctccggcggtggcaccctgaagtacgtggaggatgtgacaaacgtggtcagacgggatgtggagaagtggggccccttcgatctggtgtacggcagcacccaacccctgggcagctcttgtgaccggtgccctggctggtacatgtttcagttccaccggatcctgcagtacgccctgccgagacaggagtcccagcggccattcttttggattttcatggacaacttgctgctgaccgaggatgaccaggaaactaccactcggttcctgcagaccgaagccgtgaccctgcaggacgtgagaggccgggactaccagaacgccatgcgggtgtggtccaacatccctggactgaaaagcaagcacgcacctctgacccctaaagaagaggagtacctgcaggcccaggtgcggagcagaagcaagctggacgcccctaaggtggatctgctggtgaagaattgcctcctgcccctgagagagtacttcaagtatttcagccagaatagtctgcccctgggaggcagcggcggcggccccaccgcccccgtggccttcagcgacctgaccatctgcttcagccaggaggagtggggctggctgagccccacccagaagctgctgtacgaggaggtgatgctggagaactaccagaacctggtgagcgtgggcctgtgcaccaggaagccccacatcatcaccctgctggagaagggcaaggacccctggatcgccgagcccctgaggaagaggggcggccccgaccccgccagcaggtacggcggcccaagcagcggcgcccctcctcccagcggcggcagcccagccggctccccaacctctaccgaggagggcacctctgagtccgccacccccgagagcggccctggcacctccaccgagcccagcgagggcagcgcacccggcagccctgccggcagccccacctccacagaggagggaaccagcaccgagcccagcgaaggcagcgccccaggcaccagcaccgagcctagtgagcaggagattaaacggatcaacaagatcagaagaagacttgtgaaagacagcaacaccaagaaggccggcaagacaggccccatgaaaaccctgctggttagagtgatgacacccgatctgagagagcggctggaaaacctgagaaagaagcctgaaaatatcccccagcccatcagcaatacatctagagccaacctgaataagctgctgaccgattacaccgaaatgaagaaggcgatcctgcatgtgtactgggaagagttccagaaggaccctgtgggcctgatgagccgggtggcccagcctgccagcaagaagatcgatcagaacaagctgaaacctgagatggacgagaagggcaacctgaccaccgccggctttgcctgctctcagtgtggccagcccctgttcgtgtacaagctggagcaggtgtctgagaagggcaaggcttacaccaactacttcggacggtgcaatgtggccgagcacgaaaagctgatcctgctggcccagctgaagcccgagaaggatagcgacgaagccgtgacatatagcctgggaaagtttgggcagagggccctggatttctacagcattcatgtgaccaaggagtccacccaccccgtgaagcccctggcccagatcgccggaaacagatacgcctccggacctgtgggaaaggccctgagcgacgcatgtatgggcacaatcgcctccttcctgtctaagtaccaggacatcatcatcgaacaccagaaggtggtgaagggcaaccagaagagactggagagcctgcgggagctggccggcaaggaaaacctggaataccctagcgtgaccctgccacctcagcctcacaccaaggagggcgttgatgcctacaacgaagtgatcgcccgggtgcgaatgtgggtgaacctgaacctgtggcagaagctgaagctaagcagagatgatgccaagcctctgctgagactgaagggattcccttcctttcctctggtcgagagacaggccaacgaagtggactggtgggacatggtgtgtaacgtgaagaagctgatcaacgagaaaaaggaggatggcaaggtgttttggcagaatctggctggctacaagagacaggaagccctgagaccatacctgagcagcgaggaagatcggaagaagggaaagaaattcgctcggtaccagctgggcgacctgctgctgcacctggaaaagaagcacggcgaggactggggaaaggtgtacgacgaggcctgggagcggattgacaagaaagtggaaggcctgagcaagcacatcaagctggaagaggaacggagaagcgaggacgcccagagcaaggccgccctgaccgactggctgcgggctaaggccagcttcgtgatcgagggcctgaaggaggccgacaaggacgagttctgcagatgcgagctgaagctgcagaagtggtacggggacctgcggggaaagcccttcgccatcgaagccgagaacagcatcctggacatcagcggcttcagcaagcagtacaactgtgccttcatctggcagaaggacggcgtgaagaagctgaacctgtacctgatcatcaactacttcaagggcggcaagctgcggttcaagaagatcaaacctgaagccttcgaagccaacagattctacaccgtgatcaacaaaaagagcggcgagatcgtgcccatggaggtgaacttcaacttcgacgaccccaacctgatcatcctgcctctggcctttggcaagagacagggcagagaattcatctggaacgacctgctgtccctggaaaccggcagcctgaagctggccaacggaagagtgatcgagaagacactgtacaacagaagaacccggcaggatgagcctgccctgttcgtggccctgaccttcgagcggcgggaggtcctggactcctccaatatcaaaccaatgaacctgatcggcgtggcaagaggcgaaaacatccccgccgtgatcgccctgaccgaccccgagggctgcccactgagccggtttaaggatagcctgggaaacccaacccacatcctgagaatcggcgagagctataaggagaagcagcggaccatccaggccaagaaggaggtggagcagcggagagccggcggctacagccggaagtacgccagcaaagccaagaatctggcagacgatatggtgagaaacaccgctagagatctgctgtactacgccgtgacccaggatgccatgctgatcttcgccaacctgagccggggcttcggccggcagggcaagcggaccttcatggccgagagacagtacacacggatggaggactggctgaccgccaagctggcctacgagggcctgagcaagacctacctgtccaagacactggcccagtacacctccaagacatgcagcaactgtgggtttaccatcaccagcgccgactacgacagggtgctggagaagctgaagaagacagcaacaggctggatgaccacaattaacggcaaggagctgaaggtggagggccagattacctactacaacagatacaagagacagaacgtagtcaaggacctgtccgtcgagctggatagactgagcgaagaatctgtgaacaacgacatctcctcctggacaaagggcagaagcggagaagctctgagcctcctgaagaaaagattctcccatagacccgtgcaggagaagttcgtgtgcctgaactgcggcttcgagacacacgcagccgagcaagccgccctgaacatcgccagatcctggctgttcctgcggagccaggagtacaagaaataccagacaaacaagacaaccggcaacaccgataagagagccttcgtcgagacctggcagtccttttaccggaagaagcttaaggaggtgtggaaacctgccgtgcggtctggcggatctggcggaggctccaccagccccaagaaaaagagaaaagtctaagctgccttctgcggggcttgccttctggccatgcccttcttctctcccttgcacctgtacctcttggtctttgaataaagcctgagtaggaaggctagcaaaaaaaaaaaaaaaaaaaaaaaaaaaaaaaaaaaaaaaaaaaaaaaaaaaaaaaaaaaaaaaaaaaaaaaaaaaaaaaa

SEQ ID NO: 12425 - RNA, 5785 nt, synthetic construct
  source 1..5785: mol_type = other RNA
aggaaataagagagaaaagaagagtaagaagaaatataagagccaccatggcccctaagaagaagcgtaaagtgagccggatggaacgcctcgtctacgaggtgcggcagaagtgcagaaacatcgaggacatctgcatctcctgcggatctctgaacgtgaccctggagcacccactgttcatcggcggcatgtgccagaactgtaaaaactgttttctggagtgtgcctatcaatacgacgatgacggctaccagagctactgcaccatctgttgcggcggaagagaggtgctgatgtgtggaaataacaactgctgccggtgcttctgcgtggaatgcgtggacctgctggtgggccccggcgccgcccaggccgctattaaggaagatccttggaactgctacatgtgcggccacaagggcacatacggcctgctgagacggagagaggactggcctagcagactgcagatgttcttcgccaataaccacgaccaggagttcgacccccctaaggtgtaccctcccgtccccgccgagaagagaaagcccatccgggtcctgagcctgttcgatggcatcgccaccggtctgctggtgctgaaggacctgggcatccaggtggataggtacattgcctccgaggtgtgcgaggactccatcaccgtgggaatggtgcgtcatcagggcaagatcatgtacgtgggcgacgtgcggagcgtgacacagaagcatatccaggagtggggccctttcgacctggtgatcggcggcagcccttgcaatgacctgagcatcgtgaacccagcccggaagggcctgtacgagggaaccggcagactgttcttcgagttttacagactgctgcacgacgcccggcctaaggaaggcgacgaccggcccttcttttggctgttcgagaatgtggtggccatgggagtcagcgacaagcgggatattagccggttcctggagagcaaccccgtgatgatcgatgccaaggaagtgagcgccgcccaccgggccagatacttctggggcaatctgcctggcatgaacagacccctggccagcaccgtgaacgacaagctggagctgcaggagtgcctggagcacggccggatcgccaagttcagcaaggtgagaaccatcaccacccgaagcaacagcatcaaacaaggcaaggaccagcactttcctgtgttcatgaacgagaaggaggacatcctgtggtgtaccgagatggagagagtgttcgggttcccagtccactacacagatgtcagcaacatgtctagactggccagacagagactgctgggaagaagctggtccgtccctgtgatcagacacctgttcgcccctctgaaggagtacttcgcctgcgtgagcagcggcaacagcaacgccaacagccggggccccagcttctctagcggcctggtgccactgtccctgagagggagccacatgggccccatggagatctacaaaaccgtgagcgcctggaagcggcagcctgtgcgcgtgctgagcctgtttcggaatatcgataaagtcctgaaaagcctgggattcctggagagcggctctggctccggcggtggcaccctgaagtacgtggaggatgtgacaaacgtggtcagacgggatgtggagaagtggggccccttcgatctggtgtacggcagcacccaacccctgggcagctcttgtgaccggtgccctggctggtacatgtttcagttccaccggatcctgcagtacgccctgccgagacaggagtcccagcggccattcttttggattttcatggacaacttgctgctgaccgaggatgaccaggaaactaccactcggttcctgcagaccgaagccgtgaccctgcaggacgtgagaggccgggactaccagaacgccatgcgggtgtggtccaacatccctggactgaaaagcaagcacgcacctctgacccctaaagaagaggagtacctgcaggcccaggtgcggagcagaagcaagctggacgcccctaaggtggatctgctggtgaagaattgcctcctgcccctgagagagtacttcaagtatttcagccagaatagtctgcccctgggaggcagcggcggcggcgaggagccccccgtggtgttcgaggacgtggccgtgtacttcaccagggaggagtggggcaccctggtgaccaggcagaaggagctgtacagggacgtgatgaggctgaactacgagctgctggccagcctggagcccgccgccgccaagcccgacctgatcagcaagctggagaggagggccgccccctggatcagggaccccagcggccccaagtggggcaagggcaggccccccggcaagggcggcccaagcagcggcgcccctcctcccagcggcggcagcccagccggctccccaacctctaccgaggagggcacctctgagtccgccacccccgagagcggccctggcacctccaccgagcccagcgagggcagcgcacccggcagccctgccggcagccccacctccacagaggagggaaccagcaccgagcccagcgaaggcagcgccccaggcaccagcaccgagcctagtgagcaggagattaaacggatcaacaagatcagaagaagacttgtgaaagacagcaacaccaagaaggccggcaagacaggccccatgaaaaccctgctggttagagtgatgacacccgatctgagagagcggctggaaaacctgagaaagaagcctgaaaatatcccccagcccatcagcaatacatctagagccaacctgaataagctgctgaccgattacaccgaaatgaagaaggcgatcctgcatgtgtactgggaagagttccagaaggaccctgtgggcctgatgagccgggtggcccagcctgccagcaagaagatcgatcagaacaagctgaaacctgagatggacgagaagggcaacctgaccaccgccggctttgcctgctctcagtgtggccagcccctgttcgtgtacaagctggagcaggtgtctgagaagggcaaggcttacaccaactacttcggacggtgcaatgtggccgagcacgaaaagctgatcctgctggcccagctgaagcccgagaaggatagcgacgaagccgtgacatatagcctgggaaagtttgggcagagggccctggatttctacagcattcatgtgaccaaggagtccacccaccccgtgaagcccctggcccagatcgccggaaacagatacgcctccggacctgtgggaaaggccctgagcgacgcatgtatgggcacaatcgcctccttcctgtctaagtaccaggacatcatcatcgaacaccagaaggtggtgaagggcaaccagaagagactggagagcctgcgggagctggccggcaaggaaaacctggaataccctagcgtgaccctgccacctcagcctcacaccaaggagggcgttgatgcctacaacgaagtgatcgcccgggtgcgaatgtgggtgaacctgaacctgtggcagaagctgaagctaagcagagatgatgccaagcctctgctgagactgaagggattcccttcctttcctctggtcgagagacaggccaacgaagtggactggtgggacatggtgtgtaacgtgaagaagctgatcaacgagaaaaaggaggatggcaaggtgttttggcagaatctggctggctacaagagacaggaagccctgagaccatacctgagcagcgaggaagatcggaagaagggaaagaaattcgctcggtaccagctgggcgacctgctgctgcacctggaaaagaagcacggcgaggactggggaaaggtgtacgacgaggcctgggagcggattgacaagaaagtggaaggcctgagcaagcacatcaagctggaagaggaacggagaagcgaggacgcccagagcaaggccgccctgaccgactggctgcgggctaaggccagcttcgtgatcgagggcctgaaggaggccgacaaggacgagttctgcagatgcgagctgaagctgcagaagtggtacggggacctgcggggaaagcccttcgccatcgaagccgagaacagcatcctggacatcagcggcttcagcaagcagtacaactgtgccttcatctggcagaaggacggcgtgaagaagctgaacctgtacctgatcatcaactacttcaagggcggcaagctgcggttcaagaagatcaaacctgaagccttcgaagccaacagattctacaccgtgatcaacaaaaagagcggcgagatcgtgcccatggaggtgaacttcaacttcgacgaccccaacctgatcatcctgcctctggcctttggcaagagacagggcagagaattcatctggaacgacctgctgtccctggaaaccggcagcctgaagctggccaacggaagagtgatcgagaagacactgtacaacagaagaacccggcaggatgagcctgccctgttcgtggccctgaccttcgagcggcgggaggtcctggactcctccaatatcaaaccaatgaacctgatcggcgtggcaagaggcgaaaacatccccgccgtgatcgccctgaccgaccccgagggctgcccactgagccggtttaaggatagcctgggaaacccaacccacatcctgagaatcggcgagagctataaggagaagcagcggaccatccaggccaagaaggaggtggagcagcggagagccggcggctacagccggaagtacgccagcaaagccaagaatctggcagacgatatggtgagaaacaccgctagagatctgctgtactacgccgtgacccaggatgccatgctgatcttcgccaacctgagccggggcttcggccggcagggcaagcggaccttcatggccgagagacagtacacacggatggaggactggctgaccgccaagctggcctacgagggcctgagcaagacctacctgtccaagacactggcccagtacacctccaagacatgcagcaactgtgggtttaccatcaccagcgccgactacgacagggtgctggagaagctgaagaagacagcaacaggctggatgaccacaattaacggcaaggagctgaaggtggagggccagattacctactacaacagatacaagagacagaacgtagtcaaggacctgtccgtcgagctggatagactgagcgaagaatctgtgaacaacgacatctcctcctggacaaagggcagaagcggagaagctctgagcctcctgaagaaaagattctcccatagacccgtgcaggagaagttcgtgtgcctgaactgcggcttcgagacacacgcagccgagcaagccgccctgaacatcgccagatcctggctgttcctgcggagccaggagtacaagaaataccagacaaacaagacaaccggcaacaccgataagagagccttcgtcgagacctggcagtccttttaccggaagaagcttaaggaggtgtggaaacctgccgtgcggtctggcggatctggcggaggctccaccagccccaagaaaaagagaaaagtctaagctgccttctgcggggcttgccttctggccatgcccttcttctctcccttgcacctgtacctcttggtctttgaataaagcctgagtaggaaggctagcaaaaaaaaaaaaaaaaaaaaaaaaaaaaaaaaaaaaaaaaaaaaaaaaaaaaaaaaaaaaaaaaaaaaaaaaaaaaaaaa

SEQ ID NO: 12426 - RNA, 5785 nt, synthetic construct
  source 1..5785: mol_type = other RNA
aggaaataagagagaaaagaagagtaagaagaaatataagagccaccatggcccctaagaagaagcgtaaagtgagccggatggaacgcctcgtctacgaggtgcggcagaagtgcagaaacatcgaggacatctgcatctcctgcggatctctgaacgtgaccctggagcacccactgttcatcggcggcatgtgccagaactgtaaaaactgttttctggagtgtgcctatcaatacgacgatgacggctaccagagctactgcaccatctgttgcggcggaagagaggtgctgatgtgtggaaataacaactgctgccggtgcttctgcgtggaatgcgtggacctgctggtgggccccggcgccgcccaggccgctattaaggaagatccttggaactgctacatgtgcggccacaagggcacatacggcctgctgagacggagagaggactggcctagcagactgcagatgttcttcgccaataaccacgaccaggagttcgacccccctaaggtgtaccctcccgtccccgccgagaagagaaagcccatccgggtcctgagcctgttcgatggcatcgccaccggtctgctggtgctgaaggacctgggcatccaggtggataggtacattgcctccgaggtgtgcgaggactccatcaccgtgggaatggtgcgtcatcagggcaagatcatgtacgtgggcgacgtgcggagcgtgacacagaagcatatccaggagtggggccctttcgacctggtgatcggcggcagcccttgcaatgacctgagcatcgtgaacccagcccggaagggcctgtacgagggaaccggcagactgttcttcgagttttacagactgctgcacgacgcccggcctaaggaaggcgacgaccggcccttcttttggctgttcgagaatgtggtggccatgggagtcagcgacaagcgggatattagccggttcctggagagcaaccccgtgatgatcgatgccaaggaagtgagcgccgcccaccgggccagatacttctggggcaatctgcctggcatgaacagacccctggccagcaccgtgaacgacaagctggagctgcaggagtgcctggagcacggccggatcgccaagttcagcaaggtgagaaccatcaccacccgaagcaacagcatcaaacaaggcaaggaccagcactttcctgtgttcatgaacgagaaggaggacatcctgtggtgtaccgagatggagagagtgttcgggttcccagtccactacacagatgtcagcaacatgtctagactggccagacagagactgctgggaagaagctggtccgtccctgtgatcagacacctgttcgcccctctgaaggagtacttcgcctgcgtgagcagcggcaacagcaacgccaacagccggggccccagcttctctagcggcctggtgccactgtccctgagagggagccacatgggccccatggagatctacaaaaccgtgagcgcctggaagcggcagcctgtgcgcgtgctgagcctgtttcggaatatcgataaagtcctgaaaagcctgggattcctggagagcggctctggctccggcggtggcaccctgaagtacgtggaggatgtgacaaacgtggtcagacgggatgtggagaagtggggccccttcgatctggtgtacggcagcacccaacccctgggcagctcttgtgaccggtgccctggctggtacatgtttcagttccaccggatcctgcagtacgccctgccgagacaggagtcccagcggccattcttttggattttcatggacaacttgctgctgaccgaggatgaccaggaaactaccactcggttcctgcagaccgaagccgtgaccctgcaggacgtgagaggccgggactaccagaacgccatgcgggtgtggtccaacatccctggactgaaaagcaagcacgcacctctgacccctaaagaagaggagtacctgcaggcccaggtgcggagcagaagcaagctggacgcccctaaggtggatctgctggtgaagaattgcctcctgcccctgagagagtacttcaagtatttcagccagaatagtctgcccctgggaggcagcggcggcggccagggcagcgtgatgttcagcgacgtgagcatcatcttcagccaggaggagtgggagtacctggacagggagcagaggaacctgtacaggaacgtgatgatggagaactacagcaacctggtgagcctggccggctgcttcatcagcaagcccgacgtgatcaccctgctggagcagggcaaggacccctggaaggtggtgaggaagggcaggaagaggtacagcgacctggagaccagccacggcggcccaagcagcggcgcccctcctcccagcggcggcagcccagccggctccccaacctctaccgaggagggcacctctgagtccgccacccccgagagcggccctggcacctccaccgagcccagcgagggcagcgcacccggcagccctgccggcagccccacctccacagaggagggaaccagcaccgagcccagcgaaggcagcgccccaggcaccagcaccgagcctagtgagcaggagattaaacggatcaacaagatcagaagaagacttgtgaaagacagcaacaccaagaaggccggcaagacaggccccatgaaaaccctgctggttagagtgatgacacccgatctgagagagcggctggaaaacctgagaaagaagcctgaaaatatcccccagcccatcagcaatacatctagagccaacctgaataagctgctgaccgattacaccgaaatgaagaaggcgatcctgcatgtgtactgggaagagttccagaaggaccctgtgggcctgatgagccgggtggcccagcctgccagcaagaagatcgatcagaacaagctgaaacctgagatggacgagaagggcaacctgaccaccgccggctttgcctgctctcagtgtggccagcccctgttcgtgtacaagctggagcaggtgtctgagaagggcaaggcttacaccaactacttcggacggtgcaatgtggccgagcacgaaaagctgatcctgctggcccagctgaagcccgagaaggatagcgacgaagccgtgacatatagcctgggaaagtttgggcagagggccctggatttctacagcattcatgtgaccaaggagtccacccaccccgtgaagcccctggcccagatcgccggaaacagatacgcctccggacctgtgggaaaggccctgagcgacgcatgtatgggcacaatcgcctccttcctgtctaagtaccaggacatcatcatcgaacaccagaaggtggtgaagggcaaccagaagagactggagagcctgcgggagctggccggcaaggaaaacctggaataccctagcgtgaccctgccacctcagcctcacaccaaggagggcgttgatgcctacaacgaagtgatcgcccgggtgcgaatgtgggtgaacctgaacctgtggcagaagctgaagctaagcagagatgatgccaagcctctgctgagactgaagggattcccttcctttcctctggtcgagagacaggccaacgaagtggactggtgggacatggtgtgtaacgtgaagaagctgatcaacgagaaaaaggaggatggcaaggtgttttggcagaatctggctggctacaagagacaggaagccctgagaccatacctgagcagcgaggaagatcggaagaagggaaagaaattcgctcggtaccagctgggcgacctgctgctgcacctggaaaagaagcacggcgaggactggggaaaggtgtacgacgaggcctgggagcggattgacaagaaagtggaaggcctgagcaagcacatcaagctggaagaggaacggagaagcgaggacgcccagagcaaggccgccctgaccgactggctgcgggctaaggccagcttcgtgatcgagggcctgaaggaggccgacaaggacgagttctgcagatgcgagctgaagctgcagaagtggtacggggacctgcggggaaagcccttcgccatcgaagccgagaacagcatcctggacatcagcggcttcagcaagcagtacaactgtgccttcatctggcagaaggacggcgtgaagaagctgaacctgtacctgatcatcaactacttcaagggcggcaagctgcggttcaagaagatcaaacctgaagccttcgaagccaacagattctacaccgtgatcaacaaaaagagcggcgagatcgtgcccatggaggtgaacttcaacttcgacgaccccaacctgatcatcctgcctctggcctttggcaagagacagggcagagaattcatctggaacgacctgctgtccctggaaaccggcagcctgaagctggccaacggaagagtgatcgagaagacactgtacaacagaagaacccggcaggatgagcctgccctgttcgtggccctgaccttcgagcggcgggaggtcctggactcctccaatatcaaaccaatgaacctgatcggcgtggcaagaggcgaaaacatccccgccgtgatcgccctgaccgaccccgagggctgcccactgagccggtttaaggatagcctgggaaacccaacccacatcctgagaatcggcgagagctataaggagaagcagcggaccatccaggccaagaaggaggtggagcagcggagagccggcggctacagccggaagtacgccagcaaagccaagaatctggcagacgatatggtgagaaacaccgctagagatctgctgtactacgccgtgacccaggatgccatgctgatcttcgccaacctgagccggggcttcggccggcagggcaagcggaccttcatggccgagagacagtacacacggatggaggactggctgaccgccaagctggcctacgagggcctgagcaagacctacctgtccaagacactggcccagtacacctccaagacatgcagcaactgtgggtttaccatcaccagcgccgactacgacagggtgctggagaagctgaagaagacagcaacaggctggatgaccacaattaacggcaaggagctgaaggtggagggccagattacctactacaacagatacaagagacagaacgtagtcaaggacctgtccgtcgagctggatagactgagcgaagaatctgtgaacaacgacatctcctcctggacaaagggcagaagcggagaagctctgagcctcctgaagaaaagattctcccatagacccgtgcaggagaagttcgtgtgcctgaactgcggcttcgagacacacgcagccgagcaagccgccctgaacatcgccagatcctggctgttcctgcggagccaggagtacaagaaataccagacaaacaagacaaccggcaacaccgataagagagccttcgtcgagacctggcagtccttttaccggaagaagcttaaggaggtgtggaaacctgccgtgcggtctggcggatctggcggaggctccaccagccccaagaaaaagagaaaagtctaagctgccttctgcggggcttgccttctggccatgcccttcttctctcccttgcacctgtacctcttggtctttgaataaagcctgagtaggaaggctagcaaaaaaaaaaaaaaaaaaaaaaaaaaaaaaaaaaaaaaaaaaaaaaaaaaaaaaaaaaaaaaaaaaaaaaaaaaaaaaaa

SEQ ID NO: 12427 - RNA, 5785 nt, synthetic construct
  source 1..5785: mol_type = other RNA
aggaaataagagagaaaagaagagtaagaagaaatataagagccaccatggcccctaagaagaagcgtaaagtgagccggatggaacgcctcgtctacgaggtgcggcagaagtgcagaaacatcgaggacatctgcatctcctgcggatctctgaacgtgaccctggagcacccactgttcatcggcggcatgtgccagaactgtaaaaactgttttctggagtgtgcctatcaatacgacgatgacggctaccagagctactgcaccatctgttgcggcggaagagaggtgctgatgtgtggaaataacaactgctgccggtgcttctgcgtggaatgcgtggacctgctggtgggccccggcgccgcccaggccgctattaaggaagatccttggaactgctacatgtgcggccacaagggcacatacggcctgctgagacggagagaggactggcctagcagactgcagatgttcttcgccaataaccacgaccaggagttcgacccccctaaggtgtaccctcccgtccccgccgagaagagaaagcccatccgggtcctgagcctgttcgatggcatcgccaccggtctgctggtgctgaaggacctgggcatccaggtggataggtacattgcctccgaggtgtgcgaggactccatcaccgtgggaatggtgcgtcatcagggcaagatcatgtacgtgggcgacgtgcggagcgtgacacagaagcatatccaggagtggggccctttcgacctggtgatcggcggcagcccttgcaatgacctgagcatcgtgaacccagcccggaagggcctgtacgagggaaccggcagactgttcttcgagttttacagactgctgcacgacgcccggcctaaggaaggcgacgaccggcccttcttttggctgttcgagaatgtggtggccatgggagtcagcgacaagcgggatattagccggttcctggagagcaaccccgtgatgatcgatgccaaggaagtgagcgccgcccaccgggccagatacttctggggcaatctgcctggcatgaacagacccctggccagcaccgtgaacgacaagctggagctgcaggagtgcctggagcacggccggatcgccaagttcagcaaggtgagaaccatcaccacccgaagcaacagcatcaaacaaggcaaggaccagcactttcctgtgttcatgaacgagaaggaggacatcctgtggtgtaccgagatggagagagtgttcgggttcccagtccactacacagatgtcagcaacatgtctagactggccagacagagactgctgggaagaagctggtccgtccctgtgatcagacacctgttcgcccctctgaaggagtacttcgcctgcgtgagcagcggcaacagcaacgccaacagccggggccccagcttctctagcggcctggtgccactgtccctgagagggagccacatgggccccatggagatctacaaaaccgtgagcgcctggaagcggcagcctgtgcgcgtgctgagcctgtttcggaatatcgataaagtcctgaaaagcctgggattcctggagagcggctctggctccggcggtggcaccctgaagtacgtggaggatgtgacaaacgtggtcagacgggatgtggagaagtggggccccttcgatctggtgtacggcagcacccaacccctgggcagctcttgtgaccggtgccctggctggtacatgtttcagttccaccggatcctgcagtacgccctgccgagacaggagtcccagcggccattcttttggattttcatggacaacttgctgctgaccgaggatgaccaggaaactaccactcggttcctgcagaccgaagccgtgaccctgcaggacgtgagaggccgggactaccagaacgccatgcgggtgtggtccaacatccctggactgaaaagcaagcacgcacctctgacccctaaagaagaggagtacctgcaggcccaggtgcggagcagaagcaagctggacgcccctaaggtggatctgctggtgaagaattgcctcctgcccctgagagagtacttcaagtatttcagccagaatagtctgcccctgggaggcagcggcggcggcacccagggcagcctgaccttcaaggacgtggccatcgagttcagccaggaggagtggaagtgcctggaccccgtgcagaaggccctgtacagggacgtgatgctggagaactacaggaacctgggcttcctgggcctgtgcctgcccgacctggacatcatcagcatgctggagcagggcaaggagccctggaccgtggtgagccaggtgaagatcaccaggaaccccaactgcggcgagtgcggcggcccaagcagcggcgcccctcctcccagcggcggcagcccagccggctccccaacctctaccgaggagggcacctctgagtccgccacccccgagagcggccctggcacctccaccgagcccagcgagggcagcgcacccggcagccctgccggcagccccacctccacagaggagggaaccagcaccgagcccagcgaaggcagcgccccaggcaccagcaccgagcctagtgagcaggagattaaacggatcaacaagatcagaagaagacttgtgaaagacagcaacaccaagaaggccggcaagacaggccccatgaaaaccctgctggttagagtgatgacacccgatctgagagagcggctggaaaacctgagaaagaagcctgaaaatatcccccagcccatcagcaatacatctagagccaacctgaataagctgctgaccgattacaccgaaatgaagaaggcgatcctgcatgtgtactgggaagagttccagaaggaccctgtgggcctgatgagccgggtggcccagcctgccagcaagaagatcgatcagaacaagctgaaacctgagatggacgagaagggcaacctgaccaccgccggctttgcctgctctcagtgtggccagcccctgttcgtgtacaagctggagcaggtgtctgagaagggcaaggcttacaccaactacttcggacggtgcaatgtggccgagcacgaaaagctgatcctgctggcccagctgaagcccgagaaggatagcgacgaagccgtgacatatagcctgggaaagtttgggcagagggccctggatttctacagcattcatgtgaccaaggagtccacccaccccgtgaagcccctggcccagatcgccggaaacagatacgcctccggacctgtgggaaaggccctgagcgacgcatgtatgggcacaatcgcctccttcctgtctaagtaccaggacatcatcatcgaacaccagaaggtggtgaagggcaaccagaagagactggagagcctgcgggagctggccggcaaggaaaacctggaataccctagcgtgaccctgccacctcagcctcacaccaaggagggcgttgatgcctacaacgaagtgatcgcccgggtgcgaatgtgggtgaacctgaacctgtggcagaagctgaagctaagcagagatgatgccaagcctctgctgagactgaagggattcccttcctttcctctggtcgagagacaggccaacgaagtggactggtgggacatggtgtgtaacgtgaagaagctgatcaacgagaaaaaggaggatggcaaggtgttttggcagaatctggctggctacaagagacaggaagccctgagaccatacctgagcagcgaggaagatcggaagaagggaaagaaattcgctcggtaccagctgggcgacctgctgctgcacctggaaaagaagcacggcgaggactggggaaaggtgtacgacgaggcctgggagcggattgacaagaaagtggaaggcctgagcaagcacatcaagctggaagaggaacggagaagcgaggacgcccagagcaaggccgccctgaccgactggctgcgggctaaggccagcttcgtgatcgagggcctgaaggaggccgacaaggacgagttctgcagatgcgagctgaagctgcagaagtggtacggggacctgcggggaaagcccttcgccatcgaagccgagaacagcatcctggacatcagcggcttcagcaagcagtacaactgtgccttcatctggcagaaggacggcgtgaagaagctgaacctgtacctgatcatcaactacttcaagggcggcaagctgcggttcaagaagatcaaacctgaagccttcgaagccaacagattctacaccgtgatcaacaaaaagagcggcgagatcgtgcccatggaggtgaacttcaacttcgacgaccccaacctgatcatcctgcctctggcctttggcaagagacagggcagagaattcatctggaacgacctgctgtccctggaaaccggcagcctgaagctggccaacggaagagtgatcgagaagacactgtacaacagaagaacccggcaggatgagcctgccctgttcgtggccctgaccttcgagcggcgggaggtcctggactcctccaatatcaaaccaatgaacctgatcggcgtggcaagaggcgaaaacatccccgccgtgatcgccctgaccgaccccgagggctgcccactgagccggtttaaggatagcctgggaaacccaacccacatcctgagaatcggcgagagctataaggagaagcagcggaccatccaggccaagaaggaggtggagcagcggagagccggcggctacagccggaagtacgccagcaaagccaagaatctggcagacgatatggtgagaaacaccgctagagatctgctgtactacgccgtgacccaggatgccatgctgatcttcgccaacctgagccggggcttcggccggcagggcaagcggaccttcatggccgagagacagtacacacggatggaggactggctgaccgccaagctggcctacgagggcctgagcaagacctacctgtccaagacactggcccagtacacctccaagacatgcagcaactgtgggtttaccatcaccagcgccgactacgacagggtgctggagaagctgaagaagacagcaacaggctggatgaccacaattaacggcaaggagctgaaggtggagggccagattacctactacaacagatacaagagacagaacgtagtcaaggacctgtccgtcgagctggatagactgagcgaagaatctgtgaacaacgacatctcctcctggacaaagggcagaagcggagaagctctgagcctcctgaagaaaagattctcccatagacccgtgcaggagaagttcgtgtgcctgaactgcggcttcgagacacacgcagccgagcaagccgccctgaacatcgccagatcctggctgttcctgcggagccaggagtacaagaaataccagacaaacaagacaaccggcaacaccgataagagagccttcgtcgagacctggcagtccttttaccggaagaagcttaaggaggtgtggaaacctgccgtgcggtctggcggatctggcggaggctccaccagccccaagaaaaagagaaaagtctaagctgccttctgcggggcttgccttctggccatgcccttcttctctcccttgcacctgtacctcttggtctttgaataaagcctgagtaggaaggctagcaaaaaaaaaaaaaaaaaaaaaaaaaaaaaaaaaaaaaaaaaaaaaaaaaaaaaaaaaaaaaaaaaaaaaaaaaaaaaaaa

SEQ ID NO: 12428 - RNA, 5785 nt, synthetic construct
  source 1..5785: mol_type = other RNA
aggaaataagagagaaaagaagagtaagaagaaatataagagccaccatggcccctaagaagaagcgtaaagtgagccggatggaacgcctcgtctacgaggtgcggcagaagtgcagaaacatcgaggacatctgcatctcctgcggatctctgaacgtgaccctggagcacccactgttcatcggcggcatgtgccagaactgtaaaaactgttttctggagtgtgcctatcaatacgacgatgacggctaccagagctactgcaccatctgttgcggcggaagagaggtgctgatgtgtggaaataacaactgctgccggtgcttctgcgtggaatgcgtggacctgctggtgggccccggcgccgcccaggccgctattaaggaagatccttggaactgctacatgtgcggccacaagggcacatacggcctgctgagacggagagaggactggcctagcagactgcagatgttcttcgccaataaccacgaccaggagttcgacccccctaaggtgtaccctcccgtccccgccgagaagagaaagcccatccgggtcctgagcctgttcgatggcatcgccaccggtctgctggtgctgaaggacctgggcatccaggtggataggtacattgcctccgaggtgtgcgaggactccatcaccgtgggaatggtgcgtcatcagggcaagatcatgtacgtgggcgacgtgcggagcgtgacacagaagcatatccaggagtggggccctttcgacctggtgatcggcggcagcccttgcaatgacctgagcatcgtgaacccagcccggaagggcctgtacgagggaaccggcagactgttcttcgagttttacagactgctgcacgacgcccggcctaaggaaggcgacgaccggcccttcttttggctgttcgagaatgtggtggccatgggagtcagcgacaagcgggatattagccggttcctggagagcaaccccgtgatgatcgatgccaaggaagtgagcgccgcccaccgggccagatacttctggggcaatctgcctggcatgaacagacccctggccagcaccgtgaacgacaagctggagctgcaggagtgcctggagcacggccggatcgccaagttcagcaaggtgagaaccatcaccacccgaagcaacagcatcaaacaaggcaaggaccagcactttcctgtgttcatgaacgagaaggaggacatcctgtggtgtaccgagatggagagagtgttcgggttcccagtccactacacagatgtcagcaacatgtctagactggccagacagagactgctgggaagaagctggtccgtccctgtgatcagacacctgttcgcccctctgaaggagtacttcgcctgcgtgagcagcggcaacagcaacgccaacagccggggccccagcttctctagcggcctggtgccactgtccctgagagggagccacatgggccccatggagatctacaaaaccgtgagcgcctggaagcggcagcctgtgcgcgtgctgagcctgtttcggaatatcgataaagtcctgaaaagcctgggattcctggagagcggctctggctccggcggtggcaccctgaagtacgtggaggatgtgacaaacgtggtcagacgggatgtggagaagtggggccccttcgatctggtgtacggcagcacccaacccctgggcagctcttgtgaccggtgccctggctggtacatgtttcagttccaccggatcctgcagtacgccctgccgagacaggagtcccagcggccattcttttggattttcatggacaacttgctgctgaccgaggatgaccaggaaactaccactcggttcctgcagaccgaagccgtgaccctgcaggacgtgagaggccgggactaccagaacgccatgcgggtgtggtccaacatccctggactgaaaagcaagcacgcacctctgacccctaaagaagaggagtacctgcaggcccaggtgcggagcagaagcaagctggacgcccctaaggtggatctgctggtgaagaattgcctcctgcccctgagagagtacttcaagtatttcagccagaatagtctgcccctgggaggcagcggcggcggcttcaaggagctggtggtgttcagggacgtggccgtggagttctgcaaggaggagtgggagtgcctgggccccgagcagaggagcctgtacagggacgtgatgctggagaactacagcaacttcgtgagcctgggcctggccatcagcaagcccaccatcatcagcctgctggagcagggcaaggagccctggatcgtggagcaggccggctggtaccccgacctgctgagcgagaacgaggccggcggcccaagcagcggcgcccctcctcccagcggcggcagcccagccggctccccaacctctaccgaggagggcacctctgagtccgccacccccgagagcggccctggcacctccaccgagcccagcgagggcagcgcacccggcagccctgccggcagccccacctccacagaggagggaaccagcaccgagcccagcgaaggcagcgccccaggcaccagcaccgagcctagtgagcaggagattaaacggatcaacaagatcagaagaagacttgtgaaagacagcaacaccaagaaggccggcaagacaggccccatgaaaaccctgctggttagagtgatgacacccgatctgagagagcggctggaaaacctgagaaagaagcctgaaaatatcccccagcccatcagcaatacatctagagccaacctgaataagctgctgaccgattacaccgaaatgaagaaggcgatcctgcatgtgtactgggaagagttccagaaggaccctgtgggcctgatgagccgggtggcccagcctgccagcaagaagatcgatcagaacaagctgaaacctgagatggacgagaagggcaacctgaccaccgccggctttgcctgctctcagtgtggccagcccctgttcgtgtacaagctggagcaggtgtctgagaagggcaaggcttacaccaactacttcggacggtgcaatgtggccgagcacgaaaagctgatcctgctggcccagctgaagcccgagaaggatagcgacgaagccgtgacatatagcctgggaaagtttgggcagagggccctggatttctacagcattcatgtgaccaaggagtccacccaccccgtgaagcccctggcccagatcgccggaaacagatacgcctccggacctgtgggaaaggccctgagcgacgcatgtatgggcacaatcgcctccttcctgtctaagtaccaggacatcatcatcgaacaccagaaggtggtgaagggcaaccagaagagactggagagcctgcgggagctggccggcaaggaaaacctggaataccctagcgtgaccctgccacctcagcctcacaccaaggagggcgttgatgcctacaacgaagtgatcgcccgggtgcgaatgtgggtgaacctgaacctgtggcagaagctgaagctaagcagagatgatgccaagcctctgctgagactgaagggattcccttcctttcctctggtcgagagacaggccaacgaagtggactggtgggacatggtgtgtaacgtgaagaagctgatcaacgagaaaaaggaggatggcaaggtgttttggcagaatctggctggctacaagagacaggaagccctgagaccatacctgagcagcgaggaagatcggaagaagggaaagaaattcgctcggtaccagctgggcgacctgctgctgcacctggaaaagaagcacggcgaggactggggaaaggtgtacgacgaggcctgggagcggattgacaagaaagtggaaggcctgagcaagcacatcaagctggaagaggaacggagaagcgaggacgcccagagcaaggccgccctgaccgactggctgcgggctaaggccagcttcgtgatcgagggcctgaaggaggccgacaaggacgagttctgcagatgcgagctgaagctgcagaagtggtacggggacctgcggggaaagcccttcgccatcgaagccgagaacagcatcctggacatcagcggcttcagcaagcagtacaactgtgccttcatctggcagaaggacggcgtgaagaagctgaacctgtacctgatcatcaactacttcaagggcggcaagctgcggttcaagaagatcaaacctgaagccttcgaagccaacagattctacaccgtgatcaacaaaaagagcggcgagatcgtgcccatggaggtgaacttcaacttcgacgaccccaacctgatcatcctgcctctggcctttggcaagagacagggcagagaattcatctggaacgacctgctgtccctggaaaccggcagcctgaagctggccaacggaagagtgatcgagaagacactgtacaacagaagaacccggcaggatgagcctgccctgttcgtggccctgaccttcgagcggcgggaggtcctggactcctccaatatcaaaccaatgaacctgatcggcgtggcaagaggcgaaaacatccccgccgtgatcgccctgaccgaccccgagggctgcccactgagccggtttaaggatagcctgggaaacccaacccacatcctgagaatcggcgagagctataaggagaagcagcggaccatccaggccaagaaggaggtggagcagcggagagccggcggctacagccggaagtacgccagcaaagccaagaatctggcagacgatatggtgagaaacaccgctagagatctgctgtactacgccgtgacccaggatgccatgctgatcttcgccaacctgagccggggcttcggccggcagggcaagcggaccttcatggccgagagacagtacacacggatggaggactggctgaccgccaagctggcctacgagggcctgagcaagacctacctgtccaagacactggcccagtacacctccaagacatgcagcaactgtgggtttaccatcaccagcgccgactacgacagggtgctggagaagctgaagaagacagcaacaggctggatgaccacaattaacggcaaggagctgaaggtggagggccagattacctactacaacagatacaagagacagaacgtagtcaaggacctgtccgtcgagctggatagactgagcgaagaatctgtgaacaacgacatctcctcctggacaaagggcagaagcggagaagctctgagcctcctgaagaaaagattctcccatagacccgtgcaggagaagttcgtgtgcctgaactgcggcttcgagacacacgcagccgagcaagccgccctgaacatcgccagatcctggctgttcctgcggagccaggagtacaagaaataccagacaaacaagacaaccggcaacaccgataagagagccttcgtcgagacctggcagtccttttaccggaagaagcttaaggaggtgtggaaacctgccgtgcggtctggcggatctggcggaggctccaccagccccaagaaaaagagaaaagtctaagctgccttctgcggggcttgccttctggccatgcccttcttctctcccttgcacctgtacctcttggtctttgaataaagcctgagtaggaaggctagcaaaaaaaaaaaaaaaaaaaaaaaaaaaaaaaaaaaaaaaaaaaaaaaaaaaaaaaaaaaaaaaaaaaaaaaaaaaaaaaa

SEQ ID NO: 12429 - RNA, 5785 nt, synthetic construct
  source 1..5785: mol_type = other RNA
aggaaataagagagaaaagaagagtaagaagaaatataagagccaccatggcccctaagaagaagcgtaaagtgagccggatggaacgcctcgtctacgaggtgcggcagaagtgcagaaacatcgaggacatctgcatctcctgcggatctctgaacgtgaccctggagcacccactgttcatcggcggcatgtgccagaactgtaaaaactgttttctggagtgtgcctatcaatacgacgatgacggctaccagagctactgcaccatctgttgcggcggaagagaggtgctgatgtgtggaaataacaactgctgccggtgcttctgcgtggaatgcgtggacctgctggtgggccccggcgccgcccaggccgctattaaggaagatccttggaactgctacatgtgcggccacaagggcacatacggcctgctgagacggagagaggactggcctagcagactgcagatgttcttcgccaataaccacgaccaggagttcgacccccctaaggtgtaccctcccgtccccgccgagaagagaaagcccatccgggtcctgagcctgttcgatggcatcgccaccggtctgctggtgctgaaggacctgggcatccaggtggataggtacattgcctccgaggtgtgcgaggactccatcaccgtgggaatggtgcgtcatcagggcaagatcatgtacgtgggcgacgtgcggagcgtgacacagaagcatatccaggagtggggccctttcgacctggtgatcggcggcagcccttgcaatgacctgagcatcgtgaacccagcccggaagggcctgtacgagggaaccggcagactgttcttcgagttttacagactgctgcacgacgcccggcctaaggaaggcgacgaccggcccttcttttggctgttcgagaatgtggtggccatgggagtcagcgacaagcgggatattagccggttcctggagagcaaccccgtgatgatcgatgccaaggaagtgagcgccgcccaccgggccagatacttctggggcaatctgcctggcatgaacagacccctggccagcaccgtgaacgacaagctggagctgcaggagtgcctggagcacggccggatcgccaagttcagcaaggtgagaaccatcaccacccgaagcaacagcatcaaacaaggcaaggaccagcactttcctgtgttcatgaacgagaaggaggacatcctgtggtgtaccgagatggagagagtgttcgggttcccagtccactacacagatgtcagcaacatgtctagactggccagacagagactgctgggaagaagctggtccgtccctgtgatcagacacctgttcgcccctctgaaggagtacttcgcctgcgtgagcagcggcaacagcaacgccaacagccggggccccagcttctctagcggcctggtgccactgtccctgagagggagccacatgggccccatggagatctacaaaaccgtgagcgcctggaagcggcagcctgtgcgcgtgctgagcctgtttcggaatatcgataaagtcctgaaaagcctgggattcctggagagcggctctggctccggcggtggcaccctgaagtacgtggaggatgtgacaaacgtggtcagacgggatgtggagaagtggggccccttcgatctggtgtacggcagcacccaacccctgggcagctcttgtgaccggtgccctggctggtacatgtttcagttccaccggatcctgcagtacgccctgccgagacaggagtcccagcggccattcttttggattttcatggacaacttgctgctgaccgaggatgaccaggaaactaccactcggttcctgcagaccgaagccgtgaccctgcaggacgtgagaggccgggactaccagaacgccatgcgggtgtggtccaacatccctggactgaaaagcaagcacgcacctctgacccctaaagaagaggagtacctgcaggcccaggtgcggagcagaagcaagctggacgcccctaaggtggatctgctggtgaagaattgcctcctgcccctgagagagtacttcaagtatttcagccagaatagtctgcccctgggaggcagcggcggcggccccctggagaccgtgaccttcggcgacgtggtgctggacttcacccaggaggagtgggccctgctggacaccagccagaagaagctgttcagggacgtgatgctggagaacatccaccacctggtgagcgtgggctaccagatcagcaagagcgacgtgatcctgcagctggagcagggcaaggagctgtggagggagggcgagggcaggccccagggcaggggccccggcagcgagagccccggcggcccaagcagcggcgcccctcctcccagcggcggcagcccagccggctccccaacctctaccgaggagggcacctctgagtccgccacccccgagagcggccctggcacctccaccgagcccagcgagggcagcgcacccggcagccctgccggcagccccacctccacagaggagggaaccagcaccgagcccagcgaaggcagcgccccaggcaccagcaccgagcctagtgagcaggagattaaacggatcaacaagatcagaagaagacttgtgaaagacagcaacaccaagaaggccggcaagacaggccccatgaaaaccctgctggttagagtgatgacacccgatctgagagagcggctggaaaacctgagaaagaagcctgaaaatatcccccagcccatcagcaatacatctagagccaacctgaataagctgctgaccgattacaccgaaatgaagaaggcgatcctgcatgtgtactgggaagagttccagaaggaccctgtgggcctgatgagccgggtggcccagcctgccagcaagaagatcgatcagaacaagctgaaacctgagatggacgagaagggcaacctgaccaccgccggctttgcctgctctcagtgtggccagcccctgttcgtgtacaagctggagcaggtgtctgagaagggcaaggcttacaccaactacttcggacggtgcaatgtggccgagcacgaaaagctgatcctgctggcccagctgaagcccgagaaggatagcgacgaagccgtgacatatagcctgggaaagtttgggcagagggccctggatttctacagcattcatgtgaccaaggagtccacccaccccgtgaagcccctggcccagatcgccggaaacagatacgcctccggacctgtgggaaaggccctgagcgacgcatgtatgggcacaatcgcctccttcctgtctaagtaccaggacatcatcatcgaacaccagaaggtggtgaagggcaaccagaagagactggagagcctgcgggagctggccggcaaggaaaacctggaataccctagcgtgaccctgccacctcagcctcacaccaaggagggcgttgatgcctacaacgaagtgatcgcccgggtgcgaatgtgggtgaacctgaacctgtggcagaagctgaagctaagcagagatgatgccaagcctctgctgagactgaagggattcccttcctttcctctggtcgagagacaggccaacgaagtggactggtgggacatggtgtgtaacgtgaagaagctgatcaacgagaaaaaggaggatggcaaggtgttttggcagaatctggctggctacaagagacaggaagccctgagaccatacctgagcagcgaggaagatcggaagaagggaaagaaattcgctcggtaccagctgggcgacctgctgctgcacctggaaaagaagcacggcgaggactggggaaaggtgtacgacgaggcctgggagcggattgacaagaaagtggaaggcctgagcaagcacatcaagctggaagaggaacggagaagcgaggacgcccagagcaaggccgccctgaccgactggctgcgggctaaggccagcttcgtgatcgagggcctgaaggaggccgacaaggacgagttctgcagatgcgagctgaagctgcagaagtggtacggggacctgcggggaaagcccttcgccatcgaagccgagaacagcatcctggacatcagcggcttcagcaagcagtacaactgtgccttcatctggcagaaggacggcgtgaagaagctgaacctgtacctgatcatcaactacttcaagggcggcaagctgcggttcaagaagatcaaacctgaagccttcgaagccaacagattctacaccgtgatcaacaaaaagagcggcgagatcgtgcccatggaggtgaacttcaacttcgacgaccccaacctgatcatcctgcctctggcctttggcaagagacagggcagagaattcatctggaacgacctgctgtccctggaaaccggcagcctgaagctggccaacggaagagtgatcgagaagacactgtacaacagaagaacccggcaggatgagcctgccctgttcgtggccctgaccttcgagcggcgggaggtcctggactcctccaatatcaaaccaatgaacctgatcggcgtggcaagaggcgaaaacatccccgccgtgatcgccctgaccgaccccgagggctgcccactgagccggtttaaggatagcctgggaaacccaacccacatcctgagaatcggcgagagctataaggagaagcagcggaccatccaggccaagaaggaggtggagcagcggagagccggcggctacagccggaagtacgccagcaaagccaagaatctggcagacgatatggtgagaaacaccgctagagatctgctgtactacgccgtgacccaggatgccatgctgatcttcgccaacctgagccggggcttcggccggcagggcaagcggaccttcatggccgagagacagtacacacggatggaggactggctgaccgccaagctggcctacgagggcctgagcaagacctacctgtccaagacactggcccagtacacctccaagacatgcagcaactgtgggtttaccatcaccagcgccgactacgacagggtgctggagaagctgaagaagacagcaacaggctggatgaccacaattaacggcaaggagctgaaggtggagggccagattacctactacaacagatacaagagacagaacgtagtcaaggacctgtccgtcgagctggatagactgagcgaagaatctgtgaacaacgacatctcctcctggacaaagggcagaagcggagaagctctgagcctcctgaagaaaagattctcccatagacccgtgcaggagaagttcgtgtgcctgaactgcggcttcgagacacacgcagccgagcaagccgccctgaacatcgccagatcctggctgttcctgcggagccaggagtacaagaaataccagacaaacaagacaaccggcaacaccgataagagagccttcgtcgagacctggcagtccttttaccggaagaagcttaaggaggtgtggaaacctgccgtgcggtctggcggatctggcggaggctccaccagccccaagaaaaagagaaaagtctaagctgccttctgcggggcttgccttctggccatgcccttcttctctcccttgcacctgtacctcttggtctttgaataaagcctgagtaggaaggctagcaaaaaaaaaaaaaaaaaaaaaaaaaaaaaaaaaaaaaaaaaaaaaaaaaaaaaaaaaaaaaaaaaaaaaaaaaaaaaaaa

SEQ ID NO: 12430 - RNA, 5785 nt, synthetic construct
  source 1..5785: mol_type = other RNA
aggaaataagagagaaaagaagagtaagaagaaatataagagccaccatggcccctaagaagaagcgtaaagtgagccggatggaacgcctcgtctacgaggtgcggcagaagtgcagaaacatcgaggacatctgcatctcctgcggatctctgaacgtgaccctggagcacccactgttcatcggcggcatgtgccagaactgtaaaaactgttttctggagtgtgcctatcaatacgacgatgacggctaccagagctactgcaccatctgttgcggcggaagagaggtgctgatgtgtggaaataacaactgctgccggtgcttctgcgtggaatgcgtggacctgctggtgggccccggcgccgcccaggccgctattaaggaagatccttggaactgctacatgtgcggccacaagggcacatacggcctgctgagacggagagaggactggcctagcagactgcagatgttcttcgccaataaccacgaccaggagttcgacccccctaaggtgtaccctcccgtccccgccgagaagagaaagcccatccgggtcctgagcctgttcgatggcatcgccaccggtctgctggtgctgaaggacctgggcatccaggtggataggtacattgcctccgaggtgtgcgaggactccatcaccgtgggaatggtgcgtcatcagggcaagatcatgtacgtgggcgacgtgcggagcgtgacacagaagcatatccaggagtggggccctttcgacctggtgatcggcggcagcccttgcaatgacctgagcatcgtgaacccagcccggaagggcctgtacgagggaaccggcagactgttcttcgagttttacagactgctgcacgacgcccggcctaaggaaggcgacgaccggcccttcttttggctgttcgagaatgtggtggccatgggagtcagcgacaagcgggatattagccggttcctggagagcaaccccgtgatgatcgatgccaaggaagtgagcgccgcccaccgggccagatacttctggggcaatctgcctggcatgaacagacccctggccagcaccgtgaacgacaagctggagctgcaggagtgcctggagcacggccggatcgccaagttcagcaaggtgagaaccatcaccacccgaagcaacagcatcaaacaaggcaaggaccagcactttcctgtgttcatgaacgagaaggaggacatcctgtggtgtaccgagatggagagagtgttcgggttcccagtccactacacagatgtcagcaacatgtctagactggccagacagagactgctgggaagaagctggtccgtccctgtgatcagacacctgttcgcccctctgaaggagtacttcgcctgcgtgagcagcggcaacagcaacgccaacagccggggccccagcttctctagcggcctggtgccactgtccctgagagggagccacatgggccccatggagatctacaaaaccgtgagcgcctggaagcggcagcctgtgcgcgtgctgagcctgtttcggaatatcgataaagtcctgaaaagcctgggattcctggagagcggctctggctccggcggtggcaccctgaagtacgtggaggatgtgacaaacgtggtcagacgggatgtggagaagtggggccccttcgatctggtgtacggcagcacccaacccctgggcagctcttgtgaccggtgccctggctggtacatgtttcagttccaccggatcctgcagtacgccctgccgagacaggagtcccagcggccattcttttggattttcatggacaacttgctgctgaccgaggatgaccaggaaactaccactcggttcctgcagaccgaagccgtgaccctgcaggacgtgagaggccgggactaccagaacgccatgcgggtgtggtccaacatccctggactgaaaagcaagcacgcacctctgacccctaaagaagaggagtacctgcaggcccaggtgcggagcagaagcaagctggacgcccctaaggtggatctgctggtgaagaattgcctcctgcccctgagagagtacttcaagtatttcagccagaatagtctgcccctgggaggcagcggcggcggcagccagggcctgctgaccttcaaggacgtggccatcgagttcagccccgaggagtgggagtacctggaccccccccagaggatgctgtacaggaccgtgatgctggagaaccacaggaacctggtgttcctgggcctggccgtgagcaagcccgacctgatcatgtgcctggagcagaggagggagccctggaacgtgaagagccacagcaagctggccaagagccccgccgtgaccagccacggcggcccaagcagcggcgcccctcctcccagcggcggcagcccagccggctccccaacctctaccgaggagggcacctctgagtccgccacccccgagagcggccctggcacctccaccgagcccagcgagggcagcgcacccggcagccctgccggcagccccacctccacagaggagggaaccagcaccgagcccagcgaaggcagcgccccaggcaccagcaccgagcctagtgagcaggagattaaacggatcaacaagatcagaagaagacttgtgaaagacagcaacaccaagaaggccggcaagacaggccccatgaaaaccctgctggttagagtgatgacacccgatctgagagagcggctggaaaacctgagaaagaagcctgaaaatatcccccagcccatcagcaatacatctagagccaacctgaataagctgctgaccgattacaccgaaatgaagaaggcgatcctgcatgtgtactgggaagagttccagaaggaccctgtgggcctgatgagccgggtggcccagcctgccagcaagaagatcgatcagaacaagctgaaacctgagatggacgagaagggcaacctgaccaccgccggctttgcctgctctcagtgtggccagcccctgttcgtgtacaagctggagcaggtgtctgagaagggcaaggcttacaccaactacttcggacggtgcaatgtggccgagcacgaaaagctgatcctgctggcccagctgaagcccgagaaggatagcgacgaagccgtgacatatagcctgggaaagtttgggcagagggccctggatttctacagcattcatgtgaccaaggagtccacccaccccgtgaagcccctggcccagatcgccggaaacagatacgcctccggacctgtgggaaaggccctgagcgacgcatgtatgggcacaatcgcctccttcctgtctaagtaccaggacatcatcatcgaacaccagaaggtggtgaagggcaaccagaagagactggagagcctgcgggagctggccggcaaggaaaacctggaataccctagcgtgaccctgccacctcagcctcacaccaaggagggcgttgatgcctacaacgaagtgatcgcccgggtgcgaatgtgggtgaacctgaacctgtggcagaagctgaagctaagcagagatgatgccaagcctctgctgagactgaagggattcccttcctttcctctggtcgagagacaggccaacgaagtggactggtgggacatggtgtgtaacgtgaagaagctgatcaacgagaaaaaggaggatggcaaggtgttttggcagaatctggctggctacaagagacaggaagccctgagaccatacctgagcagcgaggaagatcggaagaagggaaagaaattcgctcggtaccagctgggcgacctgctgctgcacctggaaaagaagcacggcgaggactggggaaaggtgtacgacgaggcctgggagcggattgacaagaaagtggaaggcctgagcaagcacatcaagctggaagaggaacggagaagcgaggacgcccagagcaaggccgccctgaccgactggctgcgggctaaggccagcttcgtgatcgagggcctgaaggaggccgacaaggacgagttctgcagatgcgagctgaagctgcagaagtggtacggggacctgcggggaaagcccttcgccatcgaagccgagaacagcatcctggacatcagcggcttcagcaagcagtacaactgtgccttcatctggcagaaggacggcgtgaagaagctgaacctgtacctgatcatcaactacttcaagggcggcaagctgcggttcaagaagatcaaacctgaagccttcgaagccaacagattctacaccgtgatcaacaaaaagagcggcgagatcgtgcccatggaggtgaacttcaacttcgacgaccccaacctgatcatcctgcctctggcctttggcaagagacagggcagagaattcatctggaacgacctgctgtccctggaaaccggcagcctgaagctggccaacggaagagtgatcgagaagacactgtacaacagaagaacccggcaggatgagcctgccctgttcgtggccctgaccttcgagcggcgggaggtcctggactcctccaatatcaaaccaatgaacctgatcggcgtggcaagaggcgaaaacatccccgccgtgatcgccctgaccgaccccgagggctgcccactgagccggtttaaggatagcctgggaaacccaacccacatcctgagaatcggcgagagctataaggagaagcagcggaccatccaggccaagaaggaggtggagcagcggagagccggcggctacagccggaagtacgccagcaaagccaagaatctggcagacgatatggtgagaaacaccgctagagatctgctgtactacgccgtgacccaggatgccatgctgatcttcgccaacctgagccggggcttcggccggcagggcaagcggaccttcatggccgagagacagtacacacggatggaggactggctgaccgccaagctggcctacgagggcctgagcaagacctacctgtccaagacactggcccagtacacctccaagacatgcagcaactgtgggtttaccatcaccagcgccgactacgacagggtgctggagaagctgaagaagacagcaacaggctggatgaccacaattaacggcaaggagctgaaggtggagggccagattacctactacaacagatacaagagacagaacgtagtcaaggacctgtccgtcgagctggatagactgagcgaagaatctgtgaacaacgacatctcctcctggacaaagggcagaagcggagaagctctgagcctcctgaagaaaagattctcccatagacccgtgcaggagaagttcgtgtgcctgaactgcggcttcgagacacacgcagccgagcaagccgccctgaacatcgccagatcctggctgttcctgcggagccaggagtacaagaaataccagacaaacaagacaaccggcaacaccgataagagagccttcgtcgagacctggcagtccttttaccggaagaagcttaaggaggtgtggaaacctgccgtgcggtctggcggatctggcggaggctccaccagccccaagaaaaagagaaaagtctaagctgccttctgcggggcttgccttctggccatgcccttcttctctcccttgcacctgtacctcttggtctttgaataaagcctgagtaggaaggctagcaaaaaaaaaaaaaaaaaaaaaaaaaaaaaaaaaaaaaaaaaaaaaaaaaaaaaaaaaaaaaaaaaaaaaaaaaaaaaaaa

SEQ ID NO: 12431 - RNA, 5785 nt, synthetic construct
  source 1..5785: mol_type = other RNA
aggaaataagagagaaaagaagagtaagaagaaatataagagccaccatggcccctaagaagaagcgtaaagtgagccggatggaacgcctcgtctacgaggtgcggcagaagtgcagaaacatcgaggacatctgcatctcctgcggatctctgaacgtgaccctggagcacccactgttcatcggcggcatgtgccagaactgtaaaaactgttttctggagtgtgcctatcaatacgacgatgacggctaccagagctactgcaccatctgttgcggcggaagagaggtgctgatgtgtggaaataacaactgctgccggtgcttctgcgtggaatgcgtggacctgctggtgggccccggcgccgcccaggccgctattaaggaagatccttggaactgctacatgtgcggccacaagggcacatacggcctgctgagacggagagaggactggcctagcagactgcagatgttcttcgccaataaccacgaccaggagttcgacccccctaaggtgtaccctcccgtccccgccgagaagagaaagcccatccgggtcctgagcctgttcgatggcatcgccaccggtctgctggtgctgaaggacctgggcatccaggtggataggtacattgcctccgaggtgtgcgaggactccatcaccgtgggaatggtgcgtcatcagggcaagatcatgtacgtgggcgacgtgcggagcgtgacacagaagcatatccaggagtggggccctttcgacctggtgatcggcggcagcccttgcaatgacctgagcatcgtgaacccagcccggaagggcctgtacgagggaaccggcagactgttcttcgagttttacagactgctgcacgacgcccggcctaaggaaggcgacgaccggcccttcttttggctgttcgagaatgtggtggccatgggagtcagcgacaagcgggatattagccggttcctggagagcaaccccgtgatgatcgatgccaaggaagtgagcgccgcccaccgggccagatacttctggggcaatctgcctggcatgaacagacccctggccagcaccgtgaacgacaagctggagctgcaggagtgcctggagcacggccggatcgccaagttcagcaaggtgagaaccatcaccacccgaagcaacagcatcaaacaaggcaaggaccagcactttcctgtgttcatgaacgagaaggaggacatcctgtggtgtaccgagatggagagagtgttcgggttcccagtccactacacagatgtcagcaacatgtctagactggccagacagagactgctgggaagaagctggtccgtccctgtgatcagacacctgttcgcccctctgaaggagtacttcgcctgcgtgagcagcggcaacagcaacgccaacagccggggccccagcttctctagcggcctggtgccactgtccctgagagggagccacatgggccccatggagatctacaaaaccgtgagcgcctggaagcggcagcctgtgcgcgtgctgagcctgtttcggaatatcgataaagtcctgaaaagcctgggattcctggagagcggctctggctccggcggtggcaccctgaagtacgtggaggatgtgacaaacgtggtcagacgggatgtggagaagtggggccccttcgatctggtgtacggcagcacccaacccctgggcagctcttgtgaccggtgccctggctggtacatgtttcagttccaccggatcctgcagtacgccctgccgagacaggagtcccagcggccattcttttggattttcatggacaacttgctgctgaccgaggatgaccaggaaactaccactcggttcctgcagaccgaagccgtgaccctgcaggacgtgagaggccgggactaccagaacgccatgcgggtgtggtccaacatccctggactgaaaagcaagcacgcacctctgacccctaaagaagaggagtacctgcaggcccaggtgcggagcagaagcaagctggacgcccctaaggtggatctgctggtgaagaattgcctcctgcccctgagagagtacttcaagtatttcagccagaatagtctgcccctgggaggcagcggcggcggcagccaggagcccgtgaccttcgaggacgtggccgtgtacttcacccagaaccagtgggccagcctggaccccatgcagagggccctgtacctggaggtgatgctggagaactacgccaacatcaccagcctggccgccctgcccttccccaagcccgacctgatcctgcagctggagcagggcggcgccccctggggcctggacccctggacccccctggagggcgaggccctgggcggcgtgggcggcccaagcagcggcgcccctcctcccagcggcggcagcccagccggctccccaacctctaccgaggagggcacctctgagtccgccacccccgagagcggccctggcacctccaccgagcccagcgagggcagcgcacccggcagccctgccggcagccccacctccacagaggagggaaccagcaccgagcccagcgaaggcagcgccccaggcaccagcaccgagcctagtgagcaggagattaaacggatcaacaagatcagaagaagacttgtgaaagacagcaacaccaagaaggccggcaagacaggccccatgaaaaccctgctggttagagtgatgacacccgatctgagagagcggctggaaaacctgagaaagaagcctgaaaatatcccccagcccatcagcaatacatctagagccaacctgaataagctgctgaccgattacaccgaaatgaagaaggcgatcctgcatgtgtactgggaagagttccagaaggaccctgtgggcctgatgagccgggtggcccagcctgccagcaagaagatcgatcagaacaagctgaaacctgagatggacgagaagggcaacctgaccaccgccggctttgcctgctctcagtgtggccagcccctgttcgtgtacaagctggagcaggtgtctgagaagggcaaggcttacaccaactacttcggacggtgcaatgtggccgagcacgaaaagctgatcctgctggcccagctgaagcccgagaaggatagcgacgaagccgtgacatatagcctgggaaagtttgggcagagggccctggatttctacagcattcatgtgaccaaggagtccacccaccccgtgaagcccctggcccagatcgccggaaacagatacgcctccggacctgtgggaaaggccctgagcgacgcatgtatgggcacaatcgcctccttcctgtctaagtaccaggacatcatcatcgaacaccagaaggtggtgaagggcaaccagaagagactggagagcctgcgggagctggccggcaaggaaaacctggaataccctagcgtgaccctgccacctcagcctcacaccaaggagggcgttgatgcctacaacgaagtgatcgcccgggtgcgaatgtgggtgaacctgaacctgtggcagaagctgaagctaagcagagatgatgccaagcctctgctgagactgaagggattcccttcctttcctctggtcgagagacaggccaacgaagtggactggtgggacatggtgtgtaacgtgaagaagctgatcaacgagaaaaaggaggatggcaaggtgttttggcagaatctggctggctacaagagacaggaagccctgagaccatacctgagcagcgaggaagatcggaagaagggaaagaaattcgctcggtaccagctgggcgacctgctgctgcacctggaaaagaagcacggcgaggactggggaaaggtgtacgacgaggcctgggagcggattgacaagaaagtggaaggcctgagcaagcacatcaagctggaagaggaacggagaagcgaggacgcccagagcaaggccgccctgaccgactggctgcgggctaaggccagcttcgtgatcgagggcctgaaggaggccgacaaggacgagttctgcagatgcgagctgaagctgcagaagtggtacggggacctgcggggaaagcccttcgccatcgaagccgagaacagcatcctggacatcagcggcttcagcaagcagtacaactgtgccttcatctggcagaaggacggcgtgaagaagctgaacctgtacctgatcatcaactacttcaagggcggcaagctgcggttcaagaagatcaaacctgaagccttcgaagccaacagattctacaccgtgatcaacaaaaagagcggcgagatcgtgcccatggaggtgaacttcaacttcgacgaccccaacctgatcatcctgcctctggcctttggcaagagacagggcagagaattcatctggaacgacctgctgtccctggaaaccggcagcctgaagctggccaacggaagagtgatcgagaagacactgtacaacagaagaacccggcaggatgagcctgccctgttcgtggccctgaccttcgagcggcgggaggtcctggactcctccaatatcaaaccaatgaacctgatcggcgtggcaagaggcgaaaacatccccgccgtgatcgccctgaccgaccccgagggctgcccactgagccggtttaaggatagcctgggaaacccaacccacatcctgagaatcggcgagagctataaggagaagcagcggaccatccaggccaagaaggaggtggagcagcggagagccggcggctacagccggaagtacgccagcaaagccaagaatctggcagacgatatggtgagaaacaccgctagagatctgctgtactacgccgtgacccaggatgccatgctgatcttcgccaacctgagccggggcttcggccggcagggcaagcggaccttcatggccgagagacagtacacacggatggaggactggctgaccgccaagctggcctacgagggcctgagcaagacctacctgtccaagacactggcccagtacacctccaagacatgcagcaactgtgggtttaccatcaccagcgccgactacgacagggtgctggagaagctgaagaagacagcaacaggctggatgaccacaattaacggcaaggagctgaaggtggagggccagattacctactacaacagatacaagagacagaacgtagtcaaggacctgtccgtcgagctggatagactgagcgaagaatctgtgaacaacgacatctcctcctggacaaagggcagaagcggagaagctctgagcctcctgaagaaaagattctcccatagacccgtgcaggagaagttcgtgtgcctgaactgcggcttcgagacacacgcagccgagcaagccgccctgaacatcgccagatcctggctgttcctgcggagccaggagtacaagaaataccagacaaacaagacaaccggcaacaccgataagagagccttcgtcgagacctggcagtccttttaccggaagaagcttaaggaggtgtggaaacctgccgtgcggtctggcggatctggcggaggctccaccagccccaagaaaaagagaaaagtctaagctgccttctgcggggcttgccttctggccatgcccttcttctctcccttgcacctgtacctcttggtctttgaataaagcctgagtaggaaggctagcaaaaaaaaaaaaaaaaaaaaaaaaaaaaaaaaaaaaaaaaaaaaaaaaaaaaaaaaaaaaaaaaaaaaaaaaaaaaaaaa

SEQ ID NO: 12432 - RNA, 5785 nt, synthetic construct
  source 1..5785: mol_type = other RNA
aggaaataagagagaaaagaagagtaagaagaaatataagagccaccatggcccctaagaagaagcgtaaagtgagccggatggaacgcctcgtctacgaggtgcggcagaagtgcagaaacatcgaggacatctgcatctcctgcggatctctgaacgtgaccctggagcacccactgttcatcggcggcatgtgccagaactgtaaaaactgttttctggagtgtgcctatcaatacgacgatgacggctaccagagctactgcaccatctgttgcggcggaagagaggtgctgatgtgtggaaataacaactgctgccggtgcttctgcgtggaatgcgtggacctgctggtgggccccggcgccgcccaggccgctattaaggaagatccttggaactgctacatgtgcggccacaagggcacatacggcctgctgagacggagagaggactggcctagcagactgcagatgttcttcgccaataaccacgaccaggagttcgacccccctaaggtgtaccctcccgtccccgccgagaagagaaagcccatccgggtcctgagcctgttcgatggcatcgccaccggtctgctggtgctgaaggacctgggcatccaggtggataggtacattgcctccgaggtgtgcgaggactccatcaccgtgggaatggtgcgtcatcagggcaagatcatgtacgtgggcgacgtgcggagcgtgacacagaagcatatccaggagtggggccctttcgacctggtgatcggcggcagcccttgcaatgacctgagcatcgtgaacccagcccggaagggcctgtacgagggaaccggcagactgttcttcgagttttacagactgctgcacgacgcccggcctaaggaaggcgacgaccggcccttcttttggctgttcgagaatgtggtggccatgggagtcagcgacaagcgggatattagccggttcctggagagcaaccccgtgatgatcgatgccaaggaagtgagcgccgcccaccgggccagatacttctggggcaatctgcctggcatgaacagacccctggccagcaccgtgaacgacaagctggagctgcaggagtgcctggagcacggccggatcgccaagttcagcaaggtgagaaccatcaccacccgaagcaacagcatcaaacaaggcaaggaccagcactttcctgtgttcatgaacgagaaggaggacatcctgtggtgtaccgagatggagagagtgttcgggttcccagtccactacacagatgtcagcaacatgtctagactggccagacagagactgctgggaagaagctggtccgtccctgtgatcagacacctgttcgcccctctgaaggagtacttcgcctgcgtgagcagcggcaacagcaacgccaacagccggggccccagcttctctagcggcctggtgccactgtccctgagagggagccacatgggccccatggagatctacaaaaccgtgagcgcctggaagcggcagcctgtgcgcgtgctgagcctgtttcggaatatcgataaagtcctgaaaagcctgggattcctggagagcggctctggctccggcggtggcaccctgaagtacgtggaggatgtgacaaacgtggtcagacgggatgtggagaagtggggccccttcgatctggtgtacggcagcacccaacccctgggcagctcttgtgaccggtgccctggctggtacatgtttcagttccaccggatcctgcagtacgccctgccgagacaggagtcccagcggccattcttttggattttcatggacaacttgctgctgaccgaggatgaccaggaaactaccactcggttcctgcagaccgaagccgtgaccctgcaggacgtgagaggccgggactaccagaacgccatgcgggtgtggtccaacatccctggactgaaaagcaagcacgcacctctgacccctaaagaagaggagtacctgcaggcccaggtgcggagcagaagcaagctggacgcccctaaggtggatctgctggtgaagaattgcctcctgcccctgagagagtacttcaagtatttcagccagaatagtctgcccctgggaggcagcggcggcggcctgcagggcctgctgaccttcagggacgtggccatcgagttcagccaggaggagtggggctgcctgagccacacccagagggagctgtacagggacgtgatgctggagaactacggccacctgctgttcagcggcctgatcgccagcaagcccgacctggtgagctgcctggagcagaagaaggagccctgggacctgaagaggaagaagaccgtggccatccaccccgtgtacgagctgaagggcggcccaagcagcggcgcccctcctcccagcggcggcagcccagccggctccccaacctctaccgaggagggcacctctgagtccgccacccccgagagcggccctggcacctccaccgagcccagcgagggcagcgcacccggcagccctgccggcagccccacctccacagaggagggaaccagcaccgagcccagcgaaggcagcgccccaggcaccagcaccgagcctagtgagcaggagattaaacggatcaacaagatcagaagaagacttgtgaaagacagcaacaccaagaaggccggcaagacaggccccatgaaaaccctgctggttagagtgatgacacccgatctgagagagcggctggaaaacctgagaaagaagcctgaaaatatcccccagcccatcagcaatacatctagagccaacctgaataagctgctgaccgattacaccgaaatgaagaaggcgatcctgcatgtgtactgggaagagttccagaaggaccctgtgggcctgatgagccgggtggcccagcctgccagcaagaagatcgatcagaacaagctgaaacctgagatggacgagaagggcaacctgaccaccgccggctttgcctgctctcagtgtggccagcccctgttcgtgtacaagctggagcaggtgtctgagaagggcaaggcttacaccaactacttcggacggtgcaatgtggccgagcacgaaaagctgatcctgctggcccagctgaagcccgagaaggatagcgacgaagccgtgacatatagcctgggaaagtttgggcagagggccctggatttctacagcattcatgtgaccaaggagtccacccaccccgtgaagcccctggcccagatcgccggaaacagatacgcctccggacctgtgggaaaggccctgagcgacgcatgtatgggcacaatcgcctccttcctgtctaagtaccaggacatcatcatcgaacaccagaaggtggtgaagggcaaccagaagagactggagagcctgcgggagctggccggcaaggaaaacctggaataccctagcgtgaccctgccacctcagcctcacaccaaggagggcgttgatgcctacaacgaagtgatcgcccgggtgcgaatgtgggtgaacctgaacctgtggcagaagctgaagctaagcagagatgatgccaagcctctgctgagactgaagggattcccttcctttcctctggtcgagagacaggccaacgaagtggactggtgggacatggtgtgtaacgtgaagaagctgatcaacgagaaaaaggaggatggcaaggtgttttggcagaatctggctggctacaagagacaggaagccctgagaccatacctgagcagcgaggaagatcggaagaagggaaagaaattcgctcggtaccagctgggcgacctgctgctgcacctggaaaagaagcacggcgaggactggggaaaggtgtacgacgaggcctgggagcggattgacaagaaagtggaaggcctgagcaagcacatcaagctggaagaggaacggagaagcgaggacgcccagagcaaggccgccctgaccgactggctgcgggctaaggccagcttcgtgatcgagggcctgaaggaggccgacaaggacgagttctgcagatgcgagctgaagctgcagaagtggtacggggacctgcggggaaagcccttcgccatcgaagccgagaacagcatcctggacatcagcggcttcagcaagcagtacaactgtgccttcatctggcagaaggacggcgtgaagaagctgaacctgtacctgatcatcaactacttcaagggcggcaagctgcggttcaagaagatcaaacctgaagccttcgaagccaacagattctacaccgtgatcaacaaaaagagcggcgagatcgtgcccatggaggtgaacttcaacttcgacgaccccaacctgatcatcctgcctctggcctttggcaagagacagggcagagaattcatctggaacgacctgctgtccctggaaaccggcagcctgaagctggccaacggaagagtgatcgagaagacactgtacaacagaagaacccggcaggatgagcctgccctgttcgtggccctgaccttcgagcggcgggaggtcctggactcctccaatatcaaaccaatgaacctgatcggcgtggcaagaggcgaaaacatccccgccgtgatcgccctgaccgaccccgagggctgcccactgagccggtttaaggatagcctgggaaacccaacccacatcctgagaatcggcgagagctataaggagaagcagcggaccatccaggccaagaaggaggtggagcagcggagagccggcggctacagccggaagtacgccagcaaagccaagaatctggcagacgatatggtgagaaacaccgctagagatctgctgtactacgccgtgacccaggatgccatgctgatcttcgccaacctgagccggggcttcggccggcagggcaagcggaccttcatggccgagagacagtacacacggatggaggactggctgaccgccaagctggcctacgagggcctgagcaagacctacctgtccaagacactggcccagtacacctccaagacatgcagcaactgtgggtttaccatcaccagcgccgactacgacagggtgctggagaagctgaagaagacagcaacaggctggatgaccacaattaacggcaaggagctgaaggtggagggccagattacctactacaacagatacaagagacagaacgtagtcaaggacctgtccgtcgagctggatagactgagcgaagaatctgtgaacaacgacatctcctcctggacaaagggcagaagcggagaagctctgagcctcctgaagaaaagattctcccatagacccgtgcaggagaagttcgtgtgcctgaactgcggcttcgagacacacgcagccgagcaagccgccctgaacatcgccagatcctggctgttcctgcggagccaggagtacaagaaataccagacaaacaagacaaccggcaacaccgataagagagccttcgtcgagacctggcagtccttttaccggaagaagcttaaggaggtgtggaaacctgccgtgcggtctggcggatctggcggaggctccaccagccccaagaaaaagagaaaagtctaagctgccttctgcggggcttgccttctggccatgcccttcttctctcccttgcacctgtacctcttggtctttgaataaagcctgagtaggaaggctagcaaaaaaaaaaaaaaaaaaaaaaaaaaaaaaaaaaaaaaaaaaaaaaaaaaaaaaaaaaaaaaaaaaaaaaaaaaaaaaaa

SEQ ID NO: 12433 - RNA, 5785 nt, synthetic construct
  source 1..5785: mol_type = other RNA
aggaaataagagagaaaagaagagtaagaagaaatataagagccaccatggcccctaagaagaagcgtaaagtgagccggatggaacgcctcgtctacgaggtgcggcagaagtgcagaaacatcgaggacatctgcatctcctgcggatctctgaacgtgaccctggagcacccactgttcatcggcggcatgtgccagaactgtaaaaactgttttctggagtgtgcctatcaatacgacgatgacggctaccagagctactgcaccatctgttgcggcggaagagaggtgctgatgtgtggaaataacaactgctgccggtgcttctgcgtggaatgcgtggacctgctggtgggccccggcgccgcccaggccgctattaaggaagatccttggaactgctacatgtgcggccacaagggcacatacggcctgctgagacggagagaggactggcctagcagactgcagatgttcttcgccaataaccacgaccaggagttcgacccccctaaggtgtaccctcccgtccccgccgagaagagaaagcccatccgggtcctgagcctgttcgatggcatcgccaccggtctgctggtgctgaaggacctgggcatccaggtggataggtacattgcctccgaggtgtgcgaggactccatcaccgtgggaatggtgcgtcatcagggcaagatcatgtacgtgggcgacgtgcggagcgtgacacagaagcatatccaggagtggggccctttcgacctggtgatcggcggcagcccttgcaatgacctgagcatcgtgaacccagcccggaagggcctgtacgagggaaccggcagactgttcttcgagttttacagactgctgcacgacgcccggcctaaggaaggcgacgaccggcccttcttttggctgttcgagaatgtggtggccatgggagtcagcgacaagcgggatattagccggttcctggagagcaaccccgtgatgatcgatgccaaggaagtgagcgccgcccaccgggccagatacttctggggcaatctgcctggcatgaacagacccctggccagcaccgtgaacgacaagctggagctgcaggagtgcctggagcacggccggatcgccaagttcagcaaggtgagaaccatcaccacccgaagcaacagcatcaaacaaggcaaggaccagcactttcctgtgttcatgaacgagaaggaggacatcctgtggtgtaccgagatggagagagtgttcgggttcccagtccactacacagatgtcagcaacatgtctagactggccagacagagactgctgggaagaagctggtccgtccctgtgatcagacacctgttcgcccctctgaaggagtacttcgcctgcgtgagcagcggcaacagcaacgccaacagccggggccccagcttctctagcggcctggtgccactgtccctgagagggagccacatgggccccatggagatctacaaaaccgtgagcgcctggaagcggcagcctgtgcgcgtgctgagcctgtttcggaatatcgataaagtcctgaaaagcctgggattcctggagagcggctctggctccggcggtggcaccctgaagtacgtggaggatgtgacaaacgtggtcagacgggatgtggagaagtggggccccttcgatctggtgtacggcagcacccaacccctgggcagctcttgtgaccggtgccctggctggtacatgtttcagttccaccggatcctgcagtacgccctgccgagacaggagtcccagcggccattcttttggattttcatggacaacttgctgctgaccgaggatgaccaggaaactaccactcggttcctgcagaccgaagccgtgaccctgcaggacgtgagaggccgggactaccagaacgccatgcgggtgtggtccaacatccctggactgaaaagcaagcacgcacctctgacccctaaagaagaggagtacctgcaggcccaggtgcggagcagaagcaagctggacgcccctaaggtggatctgctggtgaagaattgcctcctgcccctgagagagtacttcaagtatttcagccagaatagtctgcccctgggaggcagcggcggcggcccccaggagcccgtgaccttcgaggacgtggccgtgctgttcacccccgaggagtggatgttcctggacagcgcccagaggagcctgtacagggacgtgatgctggagaactacaggaacgtggccagcgtgggcgaccagctgggcaagttcagcagcttcagccacctggagcagggcgaggagtggtggcccaccgagaggagggtgttccccggcagctgccccgagcccagcctgcccggcggcccaagcagcggcgcccctcctcccagcggcggcagcccagccggctccccaacctctaccgaggagggcacctctgagtccgccacccccgagagcggccctggcacctccaccgagcccagcgagggcagcgcacccggcagccctgccggcagccccacctccacagaggagggaaccagcaccgagcccagcgaaggcagcgccccaggcaccagcaccgagcctagtgagcaggagattaaacggatcaacaagatcagaagaagacttgtgaaagacagcaacaccaagaaggccggcaagacaggccccatgaaaaccctgctggttagagtgatgacacccgatctgagagagcggctggaaaacctgagaaagaagcctgaaaatatcccccagcccatcagcaatacatctagagccaacctgaataagctgctgaccgattacaccgaaatgaagaaggcgatcctgcatgtgtactgggaagagttccagaaggaccctgtgggcctgatgagccgggtggcccagcctgccagcaagaagatcgatcagaacaagctgaaacctgagatggacgagaagggcaacctgaccaccgccggctttgcctgctctcagtgtggccagcccctgttcgtgtacaagctggagcaggtgtctgagaagggcaaggcttacaccaactacttcggacggtgcaatgtggccgagcacgaaaagctgatcctgctggcccagctgaagcccgagaaggatagcgacgaagccgtgacatatagcctgggaaagtttgggcagagggccctggatttctacagcattcatgtgaccaaggagtccacccaccccgtgaagcccctggcccagatcgccggaaacagatacgcctccggacctgtgggaaaggccctgagcgacgcatgtatgggcacaatcgcctccttcctgtctaagtaccaggacatcatcatcgaacaccagaaggtggtgaagggcaaccagaagagactggagagcctgcgggagctggccggcaaggaaaacctggaataccctagcgtgaccctgccacctcagcctcacaccaaggagggcgttgatgcctacaacgaagtgatcgcccgggtgcgaatgtgggtgaacctgaacctgtggcagaagctgaagctaagcagagatgatgccaagcctctgctgagactgaagggattcccttcctttcctctggtcgagagacaggccaacgaagtggactggtgggacatggtgtgtaacgtgaagaagctgatcaacgagaaaaaggaggatggcaaggtgttttggcagaatctggctggctacaagagacaggaagccctgagaccatacctgagcagcgaggaagatcggaagaagggaaagaaattcgctcggtaccagctgggcgacctgctgctgcacctggaaaagaagcacggcgaggactggggaaaggtgtacgacgaggcctgggagcggattgacaagaaagtggaaggcctgagcaagcacatcaagctggaagaggaacggagaagcgaggacgcccagagcaaggccgccctgaccgactggctgcgggctaaggccagcttcgtgatcgagggcctgaaggaggccgacaaggacgagttctgcagatgcgagctgaagctgcagaagtggtacggggacctgcggggaaagcccttcgccatcgaagccgagaacagcatcctggacatcagcggcttcagcaagcagtacaactgtgccttcatctggcagaaggacggcgtgaagaagctgaacctgtacctgatcatcaactacttcaagggcggcaagctgcggttcaagaagatcaaacctgaagccttcgaagccaacagattctacaccgtgatcaacaaaaagagcggcgagatcgtgcccatggaggtgaacttcaacttcgacgaccccaacctgatcatcctgcctctggcctttggcaagagacagggcagagaattcatctggaacgacctgctgtccctggaaaccggcagcctgaagctggccaacggaagagtgatcgagaagacactgtacaacagaagaacccggcaggatgagcctgccctgttcgtggccctgaccttcgagcggcgggaggtcctggactcctccaatatcaaaccaatgaacctgatcggcgtggcaagaggcgaaaacatccccgccgtgatcgccctgaccgaccccgagggctgcccactgagccggtttaaggatagcctgggaaacccaacccacatcctgagaatcggcgagagctataaggagaagcagcggaccatccaggccaagaaggaggtggagcagcggagagccggcggctacagccggaagtacgccagcaaagccaagaatctggcagacgatatggtgagaaacaccgctagagatctgctgtactacgccgtgacccaggatgccatgctgatcttcgccaacctgagccggggcttcggccggcagggcaagcggaccttcatggccgagagacagtacacacggatggaggactggctgaccgccaagctggcctacgagggcctgagcaagacctacctgtccaagacactggcccagtacacctccaagacatgcagcaactgtgggtttaccatcaccagcgccgactacgacagggtgctggagaagctgaagaagacagcaacaggctggatgaccacaattaacggcaaggagctgaaggtggagggccagattacctactacaacagatacaagagacagaacgtagtcaaggacctgtccgtcgagctggatagactgagcgaagaatctgtgaacaacgacatctcctcctggacaaagggcagaagcggagaagctctgagcctcctgaagaaaagattctcccatagacccgtgcaggagaagttcgtgtgcctgaactgcggcttcgagacacacgcagccgagcaagccgccctgaacatcgccagatcctggctgttcctgcggagccaggagtacaagaaataccagacaaacaagacaaccggcaacaccgataagagagccttcgtcgagacctggcagtccttttaccggaagaagcttaaggaggtgtggaaacctgccgtgcggtctggcggatctggcggaggctccaccagccccaagaaaaagagaaaagtctaagctgccttctgcggggcttgccttctggccatgcccttcttctctcccttgcacctgtacctcttggtctttgaataaagcctgagtaggaaggctagcaaaaaaaaaaaaaaaaaaaaaaaaaaaaaaaaaaaaaaaaaaaaaaaaaaaaaaaaaaaaaaaaaaaaaaaaaaaaaaaa

SEQ ID NO: 12434 - RNA, 5785 nt, synthetic construct
  source 1..5785: mol_type = other RNA
aggaaataagagagaaaagaagagtaagaagaaatataagagccaccatggcccctaagaagaagcgtaaagtgagccggatggaacgcctcgtctacgaggtgcggcagaagtgcagaaacatcgaggacatctgcatctcctgcggatctctgaacgtgaccctggagcacccactgttcatcggcggcatgtgccagaactgtaaaaactgttttctggagtgtgcctatcaatacgacgatgacggctaccagagctactgcaccatctgttgcggcggaagagaggtgctgatgtgtggaaataacaactgctgccggtgcttctgcgtggaatgcgtggacctgctggtgggccccggcgccgcccaggccgctattaaggaagatccttggaactgctacatgtgcggccacaagggcacatacggcctgctgagacggagagaggactggcctagcagactgcagatgttcttcgccaataaccacgaccaggagttcgacccccctaaggtgtaccctcccgtccccgccgagaagagaaagcccatccgggtcctgagcctgttcgatggcatcgccaccggtctgctggtgctgaaggacctgggcatccaggtggataggtacattgcctccgaggtgtgcgaggactccatcaccgtgggaatggtgcgtcatcagggcaagatcatgtacgtgggcgacgtgcggagcgtgacacagaagcatatccaggagtggggccctttcgacctggtgatcggcggcagcccttgcaatgacctgagcatcgtgaacccagcccggaagggcctgtacgagggaaccggcagactgttcttcgagttttacagactgctgcacgacgcccggcctaaggaaggcgacgaccggcccttcttttggctgttcgagaatgtggtggccatgggagtcagcgacaagcgggatattagccggttcctggagagcaaccccgtgatgatcgatgccaaggaagtgagcgccgcccaccgggccagatacttctggggcaatctgcctggcatgaacagacccctggccagcaccgtgaacgacaagctggagctgcaggagtgcctggagcacggccggatcgccaagttcagcaaggtgagaaccatcaccacccgaagcaacagcatcaaacaaggcaaggaccagcactttcctgtgttcatgaacgagaaggaggacatcctgtggtgtaccgagatggagagagtgttcgggttcccagtccactacacagatgtcagcaacatgtctagactggccagacagagactgctgggaagaagctggtccgtccctgtgatcagacacctgttcgcccctctgaaggagtacttcgcctgcgtgagcagcggcaacagcaacgccaacagccggggccccagcttctctagcggcctggtgccactgtccctgagagggagccacatgggccccatggagatctacaaaaccgtgagcgcctggaagcggcagcctgtgcgcgtgctgagcctgtttcggaatatcgataaagtcctgaaaagcctgggattcctggagagcggctctggctccggcggtggcaccctgaagtacgtggaggatgtgacaaacgtggtcagacgggatgtggagaagtggggccccttcgatctggtgtacggcagcacccaacccctgggcagctcttgtgaccggtgccctggctggtacatgtttcagttccaccggatcctgcagtacgccctgccgagacaggagtcccagcggccattcttttggattttcatggacaacttgctgctgaccgaggatgaccaggaaactaccactcggttcctgcagaccgaagccgtgaccctgcaggacgtgagaggccgggactaccagaacgccatgcgggtgtggtccaacatccctggactgaaaagcaagcacgcacctctgacccctaaagaagaggagtacctgcaggcccaggtgcggagcagaagcaagctggacgcccctaaggtggatctgctggtgaagaattgcctcctgcccctgagagagtacttcaagtatttcagccagaatagtctgcccctgggaggcagcggcggcggcatgctgagcttctgggacgtggccatcgagttcagccccgaggagagggagtgcctggaccccgcccagtggagcctgtacagggacgtgatgctggagaactacagcaacctgctgttcctgggcctggccgtgcccaagccccacctggtgaccttcctggagcagaggcaggagagcagcggcgtgaagaggcaggccgccgccaccgtgcaccccggcaggatccccaacgactacaacggcggcccaagcagcggcgcccctcctcccagcggcggcagcccagccggctccccaacctctaccgaggagggcacctctgagtccgccacccccgagagcggccctggcacctccaccgagcccagcgagggcagcgcacccggcagccctgccggcagccccacctccacagaggagggaaccagcaccgagcccagcgaaggcagcgccccaggcaccagcaccgagcctagtgagcaggagattaaacggatcaacaagatcagaagaagacttgtgaaagacagcaacaccaagaaggccggcaagacaggccccatgaaaaccctgctggttagagtgatgacacccgatctgagagagcggctggaaaacctgagaaagaagcctgaaaatatcccccagcccatcagcaatacatctagagccaacctgaataagctgctgaccgattacaccgaaatgaagaaggcgatcctgcatgtgtactgggaagagttccagaaggaccctgtgggcctgatgagccgggtggcccagcctgccagcaagaagatcgatcagaacaagctgaaacctgagatggacgagaagggcaacctgaccaccgccggctttgcctgctctcagtgtggccagcccctgttcgtgtacaagctggagcaggtgtctgagaagggcaaggcttacaccaactacttcggacggtgcaatgtggccgagcacgaaaagctgatcctgctggcccagctgaagcccgagaaggatagcgacgaagccgtgacatatagcctgggaaagtttgggcagagggccctggatttctacagcattcatgtgaccaaggagtccacccaccccgtgaagcccctggcccagatcgccggaaacagatacgcctccggacctgtgggaaaggccctgagcgacgcatgtatgggcacaatcgcctccttcctgtctaagtaccaggacatcatcatcgaacaccagaaggtggtgaagggcaaccagaagagactggagagcctgcgggagctggccggcaaggaaaacctggaataccctagcgtgaccctgccacctcagcctcacaccaaggagggcgttgatgcctacaacgaagtgatcgcccgggtgcgaatgtgggtgaacctgaacctgtggcagaagctgaagctaagcagagatgatgccaagcctctgctgagactgaagggattcccttcctttcctctggtcgagagacaggccaacgaagtggactggtgggacatggtgtgtaacgtgaagaagctgatcaacgagaaaaaggaggatggcaaggtgttttggcagaatctggctggctacaagagacaggaagccctgagaccatacctgagcagcgaggaagatcggaagaagggaaagaaattcgctcggtaccagctgggcgacctgctgctgcacctggaaaagaagcacggcgaggactggggaaaggtgtacgacgaggcctgggagcggattgacaagaaagtggaaggcctgagcaagcacatcaagctggaagaggaacggagaagcgaggacgcccagagcaaggccgccctgaccgactggctgcgggctaaggccagcttcgtgatcgagggcctgaaggaggccgacaaggacgagttctgcagatgcgagctgaagctgcagaagtggtacggggacctgcggggaaagcccttcgccatcgaagccgagaacagcatcctggacatcagcggcttcagcaagcagtacaactgtgccttcatctggcagaaggacggcgtgaagaagctgaacctgtacctgatcatcaactacttcaagggcggcaagctgcggttcaagaagatcaaacctgaagccttcgaagccaacagattctacaccgtgatcaacaaaaagagcggcgagatcgtgcccatggaggtgaacttcaacttcgacgaccccaacctgatcatcctgcctctggcctttggcaagagacagggcagagaattcatctggaacgacctgctgtccctggaaaccggcagcctgaagctggccaacggaagagtgatcgagaagacactgtacaacagaagaacccggcaggatgagcctgccctgttcgtggccctgaccttcgagcggcgggaggtcctggactcctccaatatcaaaccaatgaacctgatcggcgtggcaagaggcgaaaacatccccgccgtgatcgccctgaccgaccccgagggctgcccactgagccggtttaaggatagcctgggaaacccaacccacatcctgagaatcggcgagagctataaggagaagcagcggaccatccaggccaagaaggaggtggagcagcggagagccggcggctacagccggaagtacgccagcaaagccaagaatctggcagacgatatggtgagaaacaccgctagagatctgctgtactacgccgtgacccaggatgccatgctgatcttcgccaacctgagccggggcttcggccggcagggcaagcggaccttcatggccgagagacagtacacacggatggaggactggctgaccgccaagctggcctacgagggcctgagcaagacctacctgtccaagacactggcccagtacacctccaagacatgcagcaactgtgggtttaccatcaccagcgccgactacgacagggtgctggagaagctgaagaagacagcaacaggctggatgaccacaattaacggcaaggagctgaaggtggagggccagattacctactacaacagatacaagagacagaacgtagtcaaggacctgtccgtcgagctggatagactgagcgaagaatctgtgaacaacgacatctcctcctggacaaagggcagaagcggagaagctctgagcctcctgaagaaaagattctcccatagacccgtgcaggagaagttcgtgtgcctgaactgcggcttcgagacacacgcagccgagcaagccgccctgaacatcgccagatcctggctgttcctgcggagccaggagtacaagaaataccagacaaacaagacaaccggcaacaccgataagagagccttcgtcgagacctggcagtccttttaccggaagaagcttaaggaggtgtggaaacctgccgtgcggtctggcggatctggcggaggctccaccagccccaagaaaaagagaaaagtctaagctgccttctgcggggcttgccttctggccatgcccttcttctctcccttgcacctgtacctcttggtctttgaataaagcctgagtaggaaggctagcaaaaaaaaaaaaaaaaaaaaaaaaaaaaaaaaaaaaaaaaaaaaaaaaaaaaaaaaaaaaaaaaaaaaaaaaaaaaaaaa

SEQ ID NO: 12435 - RNA, 5785 nt, synthetic construct
  source 1..5785: mol_type = other RNA
aggaaataagagagaaaagaagagtaagaagaaatataagagccaccatggcccctaagaagaagcgtaaagtgagccggatggaacgcctcgtctacgaggtgcggcagaagtgcagaaacatcgaggacatctgcatctcctgcggatctctgaacgtgaccctggagcacccactgttcatcggcggcatgtgccagaactgtaaaaactgttttctggagtgtgcctatcaatacgacgatgacggctaccagagctactgcaccatctgttgcggcggaagagaggtgctgatgtgtggaaataacaactgctgccggtgcttctgcgtggaatgcgtggacctgctggtgggccccggcgccgcccaggccgctattaaggaagatccttggaactgctacatgtgcggccacaagggcacatacggcctgctgagacggagagaggactggcctagcagactgcagatgttcttcgccaataaccacgaccaggagttcgacccccctaaggtgtaccctcccgtccccgccgagaagagaaagcccatccgggtcctgagcctgttcgatggcatcgccaccggtctgctggtgctgaaggacctgggcatccaggtggataggtacattgcctccgaggtgtgcgaggactccatcaccgtgggaatggtgcgtcatcagggcaagatcatgtacgtgggcgacgtgcggagcgtgacacagaagcatatccaggagtggggccctttcgacctggtgatcggcggcagcccttgcaatgacctgagcatcgtgaacccagcccggaagggcctgtacgagggaaccggcagactgttcttcgagttttacagactgctgcacgacgcccggcctaaggaaggcgacgaccggcccttcttttggctgttcgagaatgtggtggccatgggagtcagcgacaagcgggatattagccggttcctggagagcaaccccgtgatgatcgatgccaaggaagtgagcgccgcccaccgggccagatacttctggggcaatctgcctggcatgaacagacccctggccagcaccgtgaacgacaagctggagctgcaggagtgcctggagcacggccggatcgccaagttcagcaaggtgagaaccatcaccacccgaagcaacagcatcaaacaaggcaaggaccagcactttcctgtgttcatgaacgagaaggaggacatcctgtggtgtaccgagatggagagagtgttcgggttcccagtccactacacagatgtcagcaacatgtctagactggccagacagagactgctgggaagaagctggtccgtccctgtgatcagacacctgttcgcccctctgaaggagtacttcgcctgcgtgagcagcggcaacagcaacgccaacagccggggccccagcttctctagcggcctggtgccactgtccctgagagggagccacatgggccccatggagatctacaaaaccgtgagcgcctggaagcggcagcctgtgcgcgtgctgagcctgtttcggaatatcgataaagtcctgaaaagcctgggattcctggagagcggctctggctccggcggtggcaccctgaagtacgtggaggatgtgacaaacgtggtcagacgggatgtggagaagtggggccccttcgatctggtgtacggcagcacccaacccctgggcagctcttgtgaccggtgccctggctggtacatgtttcagttccaccggatcctgcagtacgccctgccgagacaggagtcccagcggccattcttttggattttcatggacaacttgctgctgaccgaggatgaccaggaaactaccactcggttcctgcagaccgaagccgtgaccctgcaggacgtgagaggccgggactaccagaacgccatgcgggtgtggtccaacatccctggactgaaaagcaagcacgcacctctgacccctaaagaagaggagtacctgcaggcccaggtgcggagcagaagcaagctggacgcccctaaggtggatctgctggtgaagaattgcctcctgcccctgagagagtacttcaagtatttcagccagaatagtctgcccctgggaggcagcggcggcggcgccctgggcagcgtgaccttcagggacgtggccgtgttcttcagccaggacgagtggctgcacctggacagcgcccagaagaccctgtaccaggaggtgatgctggagaactacagcaccctggtgagcctgggcatccccttcagcatgcccaaggtgatctgccagctgcagcagggcgaggacccctgcatggtggagggcgaggccctgagggacccctgcctggacttcaagacctggggcggcccaagcagcggcgcccctcctcccagcggcggcagcccagccggctccccaacctctaccgaggagggcacctctgagtccgccacccccgagagcggccctggcacctccaccgagcccagcgagggcagcgcacccggcagccctgccggcagccccacctccacagaggagggaaccagcaccgagcccagcgaaggcagcgccccaggcaccagcaccgagcctagtgagcaggagattaaacggatcaacaagatcagaagaagacttgtgaaagacagcaacaccaagaaggccggcaagacaggccccatgaaaaccctgctggttagagtgatgacacccgatctgagagagcggctggaaaacctgagaaagaagcctgaaaatatcccccagcccatcagcaatacatctagagccaacctgaataagctgctgaccgattacaccgaaatgaagaaggcgatcctgcatgtgtactgggaagagttccagaaggaccctgtgggcctgatgagccgggtggcccagcctgccagcaagaagatcgatcagaacaagctgaaacctgagatggacgagaagggcaacctgaccaccgccggctttgcctgctctcagtgtggccagcccctgttcgtgtacaagctggagcaggtgtctgagaagggcaaggcttacaccaactacttcggacggtgcaatgtggccgagcacgaaaagctgatcctgctggcccagctgaagcccgagaaggatagcgacgaagccgtgacatatagcctgggaaagtttgggcagagggccctggatttctacagcattcatgtgaccaaggagtccacccaccccgtgaagcccctggcccagatcgccggaaacagatacgcctccggacctgtgggaaaggccctgagcgacgcatgtatgggcacaatcgcctccttcctgtctaagtaccaggacatcatcatcgaacaccagaaggtggtgaagggcaaccagaagagactggagagcctgcgggagctggccggcaaggaaaacctggaataccctagcgtgaccctgccacctcagcctcacaccaaggagggcgttgatgcctacaacgaagtgatcgcccgggtgcgaatgtgggtgaacctgaacctgtggcagaagctgaagctaagcagagatgatgccaagcctctgctgagactgaagggattcccttcctttcctctggtcgagagacaggccaacgaagtggactggtgggacatggtgtgtaacgtgaagaagctgatcaacgagaaaaaggaggatggcaaggtgttttggcagaatctggctggctacaagagacaggaagccctgagaccatacctgagcagcgaggaagatcggaagaagggaaagaaattcgctcggtaccagctgggcgacctgctgctgcacctggaaaagaagcacggcgaggactggggaaaggtgtacgacgaggcctgggagcggattgacaagaaagtggaaggcctgagcaagcacatcaagctggaagaggaacggagaagcgaggacgcccagagcaaggccgccctgaccgactggctgcgggctaaggccagcttcgtgatcgagggcctgaaggaggccgacaaggacgagttctgcagatgcgagctgaagctgcagaagtggtacggggacctgcggggaaagcccttcgccatcgaagccgagaacagcatcctggacatcagcggcttcagcaagcagtacaactgtgccttcatctggcagaaggacggcgtgaagaagctgaacctgtacctgatcatcaactacttcaagggcggcaagctgcggttcaagaagatcaaacctgaagccttcgaagccaacagattctacaccgtgatcaacaaaaagagcggcgagatcgtgcccatggaggtgaacttcaacttcgacgaccccaacctgatcatcctgcctctggcctttggcaagagacagggcagagaattcatctggaacgacctgctgtccctggaaaccggcagcctgaagctggccaacggaagagtgatcgagaagacactgtacaacagaagaacccggcaggatgagcctgccctgttcgtggccctgaccttcgagcggcgggaggtcctggactcctccaatatcaaaccaatgaacctgatcggcgtggcaagaggcgaaaacatccccgccgtgatcgccctgaccgaccccgagggctgcccactgagccggtttaaggatagcctgggaaacccaacccacatcctgagaatcggcgagagctataaggagaagcagcggaccatccaggccaagaaggaggtggagcagcggagagccggcggctacagccggaagtacgccagcaaagccaagaatctggcagacgatatggtgagaaacaccgctagagatctgctgtactacgccgtgacccaggatgccatgctgatcttcgccaacctgagccggggcttcggccggcagggcaagcggaccttcatggccgagagacagtacacacggatggaggactggctgaccgccaagctggcctacgagggcctgagcaagacctacctgtccaagacactggcccagtacacctccaagacatgcagcaactgtgggtttaccatcaccagcgccgactacgacagggtgctggagaagctgaagaagacagcaacaggctggatgaccacaattaacggcaaggagctgaaggtggagggccagattacctactacaacagatacaagagacagaacgtagtcaaggacctgtccgtcgagctggatagactgagcgaagaatctgtgaacaacgacatctcctcctggacaaagggcagaagcggagaagctctgagcctcctgaagaaaagattctcccatagacccgtgcaggagaagttcgtgtgcctgaactgcggcttcgagacacacgcagccgagcaagccgccctgaacatcgccagatcctggctgttcctgcggagccaggagtacaagaaataccagacaaacaagacaaccggcaacaccgataagagagccttcgtcgagacctggcagtccttttaccggaagaagcttaaggaggtgtggaaacctgccgtgcggtctggcggatctggcggaggctccaccagccccaagaaaaagagaaaagtctaagctgccttctgcggggcttgccttctggccatgcccttcttctctcccttgcacctgtacctcttggtctttgaataaagcctgagtaggaaggctagcaaaaaaaaaaaaaaaaaaaaaaaaaaaaaaaaaaaaaaaaaaaaaaaaaaaaaaaaaaaaaaaaaaaaaaaaaaaaaaaa

SEQ ID NO: 12436 - RNA, 5785 nt, synthetic construct
  source 1..5785: mol_type = other RNA
aggaaataagagagaaaagaagagtaagaagaaatataagagccaccatggcccctaagaagaagcgtaaagtgagccggatggaacgcctcgtctacgaggtgcggcagaagtgcagaaacatcgaggacatctgcatctcctgcggatctctgaacgtgaccctggagcacccactgttcatcggcggcatgtgccagaactgtaaaaactgttttctggagtgtgcctatcaatacgacgatgacggctaccagagctactgcaccatctgttgcggcggaagagaggtgctgatgtgtggaaataacaactgctgccggtgcttctgcgtggaatgcgtggacctgctggtgggccccggcgccgcccaggccgctattaaggaagatccttggaactgctacatgtgcggccacaagggcacatacggcctgctgagacggagagaggactggcctagcagactgcagatgttcttcgccaataaccacgaccaggagttcgacccccctaaggtgtaccctcccgtccccgccgagaagagaaagcccatccgggtcctgagcctgttcgatggcatcgccaccggtctgctggtgctgaaggacctgggcatccaggtggataggtacattgcctccgaggtgtgcgaggactccatcaccgtgggaatggtgcgtcatcagggcaagatcatgtacgtgggcgacgtgcggagcgtgacacagaagcatatccaggagtggggccctttcgacctggtgatcggcggcagcccttgcaatgacctgagcatcgtgaacccagcccggaagggcctgtacgagggaaccggcagactgttcttcgagttttacagactgctgcacgacgcccggcctaaggaaggcgacgaccggcccttcttttggctgttcgagaatgtggtggccatgggagtcagcgacaagcgggatattagccggttcctggagagcaaccccgtgatgatcgatgccaaggaagtgagcgccgcccaccgggccagatacttctggggcaatctgcctggcatgaacagacccctggccagcaccgtgaacgacaagctggagctgcaggagtgcctggagcacggccggatcgccaagttcagcaaggtgagaaccatcaccacccgaagcaacagcatcaaacaaggcaaggaccagcactttcctgtgttcatgaacgagaaggaggacatcctgtggtgtaccgagatggagagagtgttcgggttcccagtccactacacagatgtcagcaacatgtctagactggccagacagagactgctgggaagaagctggtccgtccctgtgatcagacacctgttcgcccctctgaaggagtacttcgcctgcgtgagcagcggcaacagcaacgccaacagccggggccccagcttctctagcggcctggtgccactgtccctgagagggagccacatgggccccatggagatctacaaaaccgtgagcgcctggaagcggcagcctgtgcgcgtgctgagcctgtttcggaatatcgataaagtcctgaaaagcctgggattcctggagagcggctctggctccggcggtggcaccctgaagtacgtggaggatgtgacaaacgtggtcagacgggatgtggagaagtggggccccttcgatctggtgtacggcagcacccaacccctgggcagctcttgtgaccggtgccctggctggtacatgtttcagttccaccggatcctgcagtacgccctgccgagacaggagtcccagcggccattcttttggattttcatggacaacttgctgctgaccgaggatgaccaggaaactaccactcggttcctgcagaccgaagccgtgaccctgcaggacgtgagaggccgggactaccagaacgccatgcgggtgtggtccaacatccctggactgaaaagcaagcacgcacctctgacccctaaagaagaggagtacctgcaggcccaggtgcggagcagaagcaagctggacgcccctaaggtggatctgctggtgaagaattgcctcctgcccctgagagagtacttcaagtatttcagccagaatagtctgcccctgggaggcagcggcggcggcagcgagaccggcaacgccgtgacctacgacgacgtgcacatcagcttcaccagcaaggagtgggccctgctggaccccagccagaagagcctgtacaaggacgtgatgctggagatctacagccacctgaccgccatcggctacaagtgggaggcccacgacagcgaggaccacggccagaggttcaggaggcagaggaggcacaagaggagccacaccgaggtgaagacctacaagtgcagcggcggcccaagcagcggcgcccctcctcccagcggcggcagcccagccggctccccaacctctaccgaggagggcacctctgagtccgccacccccgagagcggccctggcacctccaccgagcccagcgagggcagcgcacccggcagccctgccggcagccccacctccacagaggagggaaccagcaccgagcccagcgaaggcagcgccccaggcaccagcaccgagcctagtgagcaggagattaaacggatcaacaagatcagaagaagacttgtgaaagacagcaacaccaagaaggccggcaagacaggccccatgaaaaccctgctggttagagtgatgacacccgatctgagagagcggctggaaaacctgagaaagaagcctgaaaatatcccccagcccatcagcaatacatctagagccaacctgaataagctgctgaccgattacaccgaaatgaagaaggcgatcctgcatgtgtactgggaagagttccagaaggaccctgtgggcctgatgagccgggtggcccagcctgccagcaagaagatcgatcagaacaagctgaaacctgagatggacgagaagggcaacctgaccaccgccggctttgcctgctctcagtgtggccagcccctgttcgtgtacaagctggagcaggtgtctgagaagggcaaggcttacaccaactacttcggacggtgcaatgtggccgagcacgaaaagctgatcctgctggcccagctgaagcccgagaaggatagcgacgaagccgtgacatatagcctgggaaagtttgggcagagggccctggatttctacagcattcatgtgaccaaggagtccacccaccccgtgaagcccctggcccagatcgccggaaacagatacgcctccggacctgtgggaaaggccctgagcgacgcatgtatgggcacaatcgcctccttcctgtctaagtaccaggacatcatcatcgaacaccagaaggtggtgaagggcaaccagaagagactggagagcctgcgggagctggccggcaaggaaaacctggaataccctagcgtgaccctgccacctcagcctcacaccaaggagggcgttgatgcctacaacgaagtgatcgcccgggtgcgaatgtgggtgaacctgaacctgtggcagaagctgaagctaagcagagatgatgccaagcctctgctgagactgaagggattcccttcctttcctctggtcgagagacaggccaacgaagtggactggtgggacatggtgtgtaacgtgaagaagctgatcaacgagaaaaaggaggatggcaaggtgttttggcagaatctggctggctacaagagacaggaagccctgagaccatacctgagcagcgaggaagatcggaagaagggaaagaaattcgctcggtaccagctgggcgacctgctgctgcacctggaaaagaagcacggcgaggactggggaaaggtgtacgacgaggcctgggagcggattgacaagaaagtggaaggcctgagcaagcacatcaagctggaagaggaacggagaagcgaggacgcccagagcaaggccgccctgaccgactggctgcgggctaaggccagcttcgtgatcgagggcctgaaggaggccgacaaggacgagttctgcagatgcgagctgaagctgcagaagtggtacggggacctgcggggaaagcccttcgccatcgaagccgagaacagcatcctggacatcagcggcttcagcaagcagtacaactgtgccttcatctggcagaaggacggcgtgaagaagctgaacctgtacctgatcatcaactacttcaagggcggcaagctgcggttcaagaagatcaaacctgaagccttcgaagccaacagattctacaccgtgatcaacaaaaagagcggcgagatcgtgcccatggaggtgaacttcaacttcgacgaccccaacctgatcatcctgcctctggcctttggcaagagacagggcagagaattcatctggaacgacctgctgtccctggaaaccggcagcctgaagctggccaacggaagagtgatcgagaagacactgtacaacagaagaacccggcaggatgagcctgccctgttcgtggccctgaccttcgagcggcgggaggtcctggactcctccaatatcaaaccaatgaacctgatcggcgtggcaagaggcgaaaacatccccgccgtgatcgccctgaccgaccccgagggctgcccactgagccggtttaaggatagcctgggaaacccaacccacatcctgagaatcggcgagagctataaggagaagcagcggaccatccaggccaagaaggaggtggagcagcggagagccggcggctacagccggaagtacgccagcaaagccaagaatctggcagacgatatggtgagaaacaccgctagagatctgctgtactacgccgtgacccaggatgccatgctgatcttcgccaacctgagccggggcttcggccggcagggcaagcggaccttcatggccgagagacagtacacacggatggaggactggctgaccgccaagctggcctacgagggcctgagcaagacctacctgtccaagacactggcccagtacacctccaagacatgcagcaactgtgggtttaccatcaccagcgccgactacgacagggtgctggagaagctgaagaagacagcaacaggctggatgaccacaattaacggcaaggagctgaaggtggagggccagattacctactacaacagatacaagagacagaacgtagtcaaggacctgtccgtcgagctggatagactgagcgaagaatctgtgaacaacgacatctcctcctggacaaagggcagaagcggagaagctctgagcctcctgaagaaaagattctcccatagacccgtgcaggagaagttcgtgtgcctgaactgcggcttcgagacacacgcagccgagcaagccgccctgaacatcgccagatcctggctgttcctgcggagccaggagtacaagaaataccagacaaacaagacaaccggcaacaccgataagagagccttcgtcgagacctggcagtccttttaccggaagaagcttaaggaggtgtggaaacctgccgtgcggtctggcggatctggcggaggctccaccagccccaagaaaaagagaaaagtctaagctgccttctgcggggcttgccttctggccatgcccttcttctctcccttgcacctgtacctcttggtctttgaataaagcctgagtaggaaggctagcaaaaaaaaaaaaaaaaaaaaaaaaaaaaaaaaaaaaaaaaaaaaaaaaaaaaaaaaaaaaaaaaaaaaaaaaaaaaaaaa

SEQ ID NO: 12437 - RNA, 5785 nt, synthetic construct
  source 1..5785: mol_type = other RNA
aggaaataagagagaaaagaagagtaagaagaaatataagagccaccatggcccctaagaagaagcgtaaagtgagccggatggaacgcctcgtctacgaggtgcggcagaagtgcagaaacatcgaggacatctgcatctcctgcggatctctgaacgtgaccctggagcacccactgttcatcggcggcatgtgccagaactgtaaaaactgttttctggagtgtgcctatcaatacgacgatgacggctaccagagctactgcaccatctgttgcggcggaagagaggtgctgatgtgtggaaataacaactgctgccggtgcttctgcgtggaatgcgtggacctgctggtgggccccggcgccgcccaggccgctattaaggaagatccttggaactgctacatgtgcggccacaagggcacatacggcctgctgagacggagagaggactggcctagcagactgcagatgttcttcgccaataaccacgaccaggagttcgacccccctaaggtgtaccctcccgtccccgccgagaagagaaagcccatccgggtcctgagcctgttcgatggcatcgccaccggtctgctggtgctgaaggacctgggcatccaggtggataggtacattgcctccgaggtgtgcgaggactccatcaccgtgggaatggtgcgtcatcagggcaagatcatgtacgtgggcgacgtgcggagcgtgacacagaagcatatccaggagtggggccctttcgacctggtgatcggcggcagcccttgcaatgacctgagcatcgtgaacccagcccggaagggcctgtacgagggaaccggcagactgttcttcgagttttacagactgctgcacgacgcccggcctaaggaaggcgacgaccggcccttcttttggctgttcgagaatgtggtggccatgggagtcagcgacaagcgggatattagccggttcctggagagcaaccccgtgatgatcgatgccaaggaagtgagcgccgcccaccgggccagatacttctggggcaatctgcctggcatgaacagacccctggccagcaccgtgaacgacaagctggagctgcaggagtgcctggagcacggccggatcgccaagttcagcaaggtgagaaccatcaccacccgaagcaacagcatcaaacaaggcaaggaccagcactttcctgtgttcatgaacgagaaggaggacatcctgtggtgtaccgagatggagagagtgttcgggttcccagtccactacacagatgtcagcaacatgtctagactggccagacagagactgctgggaagaagctggtccgtccctgtgatcagacacctgttcgcccctctgaaggagtacttcgcctgcgtgagcagcggcaacagcaacgccaacagccggggccccagcttctctagcggcctggtgccactgtccctgagagggagccacatgggccccatggagatctacaaaaccgtgagcgcctggaagcggcagcctgtgcgcgtgctgagcctgtttcggaatatcgataaagtcctgaaaagcctgggattcctggagagcggctctggctccggcggtggcaccctgaagtacgtggaggatgtgacaaacgtggtcagacgggatgtggagaagtggggccccttcgatctggtgtacggcagcacccaacccctgggcagctcttgtgaccggtgccctggctggtacatgtttcagttccaccggatcctgcagtacgccctgccgagacaggagtcccagcggccattcttttggattttcatggacaacttgctgctgaccgaggatgaccaggaaactaccactcggttcctgcagaccgaagccgtgaccctgcaggacgtgagaggccgggactaccagaacgccatgcgggtgtggtccaacatccctggactgaaaagcaagcacgcacctctgacccctaaagaagaggagtacctgcaggcccaggtgcggagcagaagcaagctggacgcccctaaggtggatctgctggtgaagaattgcctcctgcccctgagagagtacttcaagtatttcagccagaatagtctgcccctgggaggcagcggcggcggcgtgtgcggcagcgtgaccttcaaggacgtggccgtggacttcagccaggaggagtgggcctgcctggacgccacccagaaggtgctgtacagggacatgatgctggagacctacagcaacctggtggccgtggtgggccactgcatcagcaagcccgacctgatcgtgctgctggagcaggagaaggagccctggatgaccgtgaaggaggagaccgacaggcccagccccgacctggaggccggcggcccaagcagcggcgcccctcctcccagcggcggcagcccagccggctccccaacctctaccgaggagggcacctctgagtccgccacccccgagagcggccctggcacctccaccgagcccagcgagggcagcgcacccggcagccctgccggcagccccacctccacagaggagggaaccagcaccgagcccagcgaaggcagcgccccaggcaccagcaccgagcctagtgagcaggagattaaacggatcaacaagatcagaagaagacttgtgaaagacagcaacaccaagaaggccggcaagacaggccccatgaaaaccctgctggttagagtgatgacacccgatctgagagagcggctggaaaacctgagaaagaagcctgaaaatatcccccagcccatcagcaatacatctagagccaacctgaataagctgctgaccgattacaccgaaatgaagaaggcgatcctgcatgtgtactgggaagagttccagaaggaccctgtgggcctgatgagccgggtggcccagcctgccagcaagaagatcgatcagaacaagctgaaacctgagatggacgagaagggcaacctgaccaccgccggctttgcctgctctcagtgtggccagcccctgttcgtgtacaagctggagcaggtgtctgagaagggcaaggcttacaccaactacttcggacggtgcaatgtggccgagcacgaaaagctgatcctgctggcccagctgaagcccgagaaggatagcgacgaagccgtgacatatagcctgggaaagtttgggcagagggccctggatttctacagcattcatgtgaccaaggagtccacccaccccgtgaagcccctggcccagatcgccggaaacagatacgcctccggacctgtgggaaaggccctgagcgacgcatgtatgggcacaatcgcctccttcctgtctaagtaccaggacatcatcatcgaacaccagaaggtggtgaagggcaaccagaagagactggagagcctgcgggagctggccggcaaggaaaacctggaataccctagcgtgaccctgccacctcagcctcacaccaaggagggcgttgatgcctacaacgaagtgatcgcccgggtgcgaatgtgggtgaacctgaacctgtggcagaagctgaagctaagcagagatgatgccaagcctctgctgagactgaagggattcccttcctttcctctggtcgagagacaggccaacgaagtggactggtgggacatggtgtgtaacgtgaagaagctgatcaacgagaaaaaggaggatggcaaggtgttttggcagaatctggctggctacaagagacaggaagccctgagaccatacctgagcagcgaggaagatcggaagaagggaaagaaattcgctcggtaccagctgggcgacctgctgctgcacctggaaaagaagcacggcgaggactggggaaaggtgtacgacgaggcctgggagcggattgacaagaaagtggaaggcctgagcaagcacatcaagctggaagaggaacggagaagcgaggacgcccagagcaaggccgccctgaccgactggctgcgggctaaggccagcttcgtgatcgagggcctgaaggaggccgacaaggacgagttctgcagatgcgagctgaagctgcagaagtggtacggggacctgcggggaaagcccttcgccatcgaagccgagaacagcatcctggacatcagcggcttcagcaagcagtacaactgtgccttcatctggcagaaggacggcgtgaagaagctgaacctgtacctgatcatcaactacttcaagggcggcaagctgcggttcaagaagatcaaacctgaagccttcgaagccaacagattctacaccgtgatcaacaaaaagagcggcgagatcgtgcccatggaggtgaacttcaacttcgacgaccccaacctgatcatcctgcctctggcctttggcaagagacagggcagagaattcatctggaacgacctgctgtccctggaaaccggcagcctgaagctggccaacggaagagtgatcgagaagacactgtacaacagaagaacccggcaggatgagcctgccctgttcgtggccctgaccttcgagcggcgggaggtcctggactcctccaatatcaaaccaatgaacctgatcggcgtggcaagaggcgaaaacatccccgccgtgatcgccctgaccgaccccgagggctgcccactgagccggtttaaggatagcctgggaaacccaacccacatcctgagaatcggcgagagctataaggagaagcagcggaccatccaggccaagaaggaggtggagcagcggagagccggcggctacagccggaagtacgccagcaaagccaagaatctggcagacgatatggtgagaaacaccgctagagatctgctgtactacgccgtgacccaggatgccatgctgatcttcgccaacctgagccggggcttcggccggcagggcaagcggaccttcatggccgagagacagtacacacggatggaggactggctgaccgccaagctggcctacgagggcctgagcaagacctacctgtccaagacactggcccagtacacctccaagacatgcagcaactgtgggtttaccatcaccagcgccgactacgacagggtgctggagaagctgaagaagacagcaacaggctggatgaccacaattaacggcaaggagctgaaggtggagggccagattacctactacaacagatacaagagacagaacgtagtcaaggacctgtccgtcgagctggatagactgagcgaagaatctgtgaacaacgacatctcctcctggacaaagggcagaagcggagaagctctgagcctcctgaagaaaagattctcccatagacccgtgcaggagaagttcgtgtgcctgaactgcggcttcgagacacacgcagccgagcaagccgccctgaacatcgccagatcctggctgttcctgcggagccaggagtacaagaaataccagacaaacaagacaaccggcaacaccgataagagagccttcgtcgagacctggcagtccttttaccggaagaagcttaaggaggtgtggaaacctgccgtgcggtctggcggatctggcggaggctccaccagccccaagaaaaagagaaaagtctaagctgccttctgcggggcttgccttctggccatgcccttcttctctcccttgcacctgtacctcttggtctttgaataaagcctgagtaggaaggctagcaaaaaaaaaaaaaaaaaaaaaaaaaaaaaaaaaaaaaaaaaaaaaaaaaaaaaaaaaaaaaaaaaaaaaaaaaaaaaaaa

SEQ ID NO: 12438 - RNA, 5785 nt, synthetic construct
  source 1..5785: mol_type = other RNA
aggaaataagagagaaaagaagagtaagaagaaatataagagccaccatggcccctaagaagaagcgtaaagtgagccggatggaacgcctcgtctacgaggtgcggcagaagtgcagaaacatcgaggacatctgcatctcctgcggatctctgaacgtgaccctggagcacccactgttcatcggcggcatgtgccagaactgtaaaaactgttttctggagtgtgcctatcaatacgacgatgacggctaccagagctactgcaccatctgttgcggcggaagagaggtgctgatgtgtggaaataacaactgctgccggtgcttctgcgtggaatgcgtggacctgctggtgggccccggcgccgcccaggccgctattaaggaagatccttggaactgctacatgtgcggccacaagggcacatacggcctgctgagacggagagaggactggcctagcagactgcagatgttcttcgccaataaccacgaccaggagttcgacccccctaaggtgtaccctcccgtccccgccgagaagagaaagcccatccgggtcctgagcctgttcgatggcatcgccaccggtctgctggtgctgaaggacctgggcatccaggtggataggtacattgcctccgaggtgtgcgaggactccatcaccgtgggaatggtgcgtcatcagggcaagatcatgtacgtgggcgacgtgcggagcgtgacacagaagcatatccaggagtggggccctttcgacctggtgatcggcggcagcccttgcaatgacctgagcatcgtgaacccagcccggaagggcctgtacgagggaaccggcagactgttcttcgagttttacagactgctgcacgacgcccggcctaaggaaggcgacgaccggcccttcttttggctgttcgagaatgtggtggccatgggagtcagcgacaagcgggatattagccggttcctggagagcaaccccgtgatgatcgatgccaaggaagtgagcgccgcccaccgggccagatacttctggggcaatctgcctggcatgaacagacccctggccagcaccgtgaacgacaagctggagctgcaggagtgcctggagcacggccggatcgccaagttcagcaaggtgagaaccatcaccacccgaagcaacagcatcaaacaaggcaaggaccagcactttcctgtgttcatgaacgagaaggaggacatcctgtggtgtaccgagatggagagagtgttcgggttcccagtccactacacagatgtcagcaacatgtctagactggccagacagagactgctgggaagaagctggtccgtccctgtgatcagacacctgttcgcccctctgaaggagtacttcgcctgcgtgagcagcggcaacagcaacgccaacagccggggccccagcttctctagcggcctggtgccactgtccctgagagggagccacatgggccccatggagatctacaaaaccgtgagcgcctggaagcggcagcctgtgcgcgtgctgagcctgtttcggaatatcgataaagtcctgaaaagcctgggattcctggagagcggctctggctccggcggtggcaccctgaagtacgtggaggatgtgacaaacgtggtcagacgggatgtggagaagtggggccccttcgatctggtgtacggcagcacccaacccctgggcagctcttgtgaccggtgccctggctggtacatgtttcagttccaccggatcctgcagtacgccctgccgagacaggagtcccagcggccattcttttggattttcatggacaacttgctgctgaccgaggatgaccaggaaactaccactcggttcctgcagaccgaagccgtgaccctgcaggacgtgagaggccgggactaccagaacgccatgcgggtgtggtccaacatccctggactgaaaagcaagcacgcacctctgacccctaaagaagaggagtacctgcaggcccaggtgcggagcagaagcaagctggacgcccctaaggtggatctgctggtgaagaattgcctcctgcccctgagagagtacttcaagtatttcagccagaatagtctgcccctgggaggcagcggcggcggcgcccaccacctggtgatgttcagggacgtggccgtggacttcagccaggaggagtgggagtgcctgaacagctaccagaggaacctgtacagggacgtgatcctggagaactacagcaacctggtgagcgtgggctgcagcatcagcaagcccgacgtgatcaccctgctggagcagggcaaggagccctggatggtggtgagggacgagaggaggaggaggagcctggacctggagagcaggggcggcccaagcagcggcgcccctcctcccagcggcggcagcccagccggctccccaacctctaccgaggagggcacctctgagtccgccacccccgagagcggccctggcacctccaccgagcccagcgagggcagcgcacccggcagccctgccggcagccccacctccacagaggagggaaccagcaccgagcccagcgaaggcagcgccccaggcaccagcaccgagcctagtgagcaggagattaaacggatcaacaagatcagaagaagacttgtgaaagacagcaacaccaagaaggccggcaagacaggccccatgaaaaccctgctggttagagtgatgacacccgatctgagagagcggctggaaaacctgagaaagaagcctgaaaatatcccccagcccatcagcaatacatctagagccaacctgaataagctgctgaccgattacaccgaaatgaagaaggcgatcctgcatgtgtactgggaagagttccagaaggaccctgtgggcctgatgagccgggtggcccagcctgccagcaagaagatcgatcagaacaagctgaaacctgagatggacgagaagggcaacctgaccaccgccggctttgcctgctctcagtgtggccagcccctgttcgtgtacaagctggagcaggtgtctgagaagggcaaggcttacaccaactacttcggacggtgcaatgtggccgagcacgaaaagctgatcctgctggcccagctgaagcccgagaaggatagcgacgaagccgtgacatatagcctgggaaagtttgggcagagggccctggatttctacagcattcatgtgaccaaggagtccacccaccccgtgaagcccctggcccagatcgccggaaacagatacgcctccggacctgtgggaaaggccctgagcgacgcatgtatgggcacaatcgcctccttcctgtctaagtaccaggacatcatcatcgaacaccagaaggtggtgaagggcaaccagaagagactggagagcctgcgggagctggccggcaaggaaaacctggaataccctagcgtgaccctgccacctcagcctcacaccaaggagggcgttgatgcctacaacgaagtgatcgcccgggtgcgaatgtgggtgaacctgaacctgtggcagaagctgaagctaagcagagatgatgccaagcctctgctgagactgaagggattcccttcctttcctctggtcgagagacaggccaacgaagtggactggtgggacatggtgtgtaacgtgaagaagctgatcaacgagaaaaaggaggatggcaaggtgttttggcagaatctggctggctacaagagacaggaagccctgagaccatacctgagcagcgaggaagatcggaagaagggaaagaaattcgctcggtaccagctgggcgacctgctgctgcacctggaaaagaagcacggcgaggactggggaaaggtgtacgacgaggcctgggagcggattgacaagaaagtggaaggcctgagcaagcacatcaagctggaagaggaacggagaagcgaggacgcccagagcaaggccgccctgaccgactggctgcgggctaaggccagcttcgtgatcgagggcctgaaggaggccgacaaggacgagttctgcagatgcgagctgaagctgcagaagtggtacggggacctgcggggaaagcccttcgccatcgaagccgagaacagcatcctggacatcagcggcttcagcaagcagtacaactgtgccttcatctggcagaaggacggcgtgaagaagctgaacctgtacctgatcatcaactacttcaagggcggcaagctgcggttcaagaagatcaaacctgaagccttcgaagccaacagattctacaccgtgatcaacaaaaagagcggcgagatcgtgcccatggaggtgaacttcaacttcgacgaccccaacctgatcatcctgcctctggcctttggcaagagacagggcagagaattcatctggaacgacctgctgtccctggaaaccggcagcctgaagctggccaacggaagagtgatcgagaagacactgtacaacagaagaacccggcaggatgagcctgccctgttcgtggccctgaccttcgagcggcgggaggtcctggactcctccaatatcaaaccaatgaacctgatcggcgtggcaagaggcgaaaacatccccgccgtgatcgccctgaccgaccccgagggctgcccactgagccggtttaaggatagcctgggaaacccaacccacatcctgagaatcggcgagagctataaggagaagcagcggaccatccaggccaagaaggaggtggagcagcggagagccggcggctacagccggaagtacgccagcaaagccaagaatctggcagacgatatggtgagaaacaccgctagagatctgctgtactacgccgtgacccaggatgccatgctgatcttcgccaacctgagccggggcttcggccggcagggcaagcggaccttcatggccgagagacagtacacacggatggaggactggctgaccgccaagctggcctacgagggcctgagcaagacctacctgtccaagacactggcccagtacacctccaagacatgcagcaactgtgggtttaccatcaccagcgccgactacgacagggtgctggagaagctgaagaagacagcaacaggctggatgaccacaattaacggcaaggagctgaaggtggagggccagattacctactacaacagatacaagagacagaacgtagtcaaggacctgtccgtcgagctggatagactgagcgaagaatctgtgaacaacgacatctcctcctggacaaagggcagaagcggagaagctctgagcctcctgaagaaaagattctcccatagacccgtgcaggagaagttcgtgtgcctgaactgcggcttcgagacacacgcagccgagcaagccgccctgaacatcgccagatcctggctgttcctgcggagccaggagtacaagaaataccagacaaacaagacaaccggcaacaccgataagagagccttcgtcgagacctggcagtccttttaccggaagaagcttaaggaggtgtggaaacctgccgtgcggtctggcggatctggcggaggctccaccagccccaagaaaaagagaaaagtctaagctgccttctgcggggcttgccttctggccatgcccttcttctctcccttgcacctgtacctcttggtctttgaataaagcctgagtaggaaggctagcaaaaaaaaaaaaaaaaaaaaaaaaaaaaaaaaaaaaaaaaaaaaaaaaaaaaaaaaaaaaaaaaaaaaaaaaaaaaaaaa

SEQ ID NO: 12439 - RNA, 5785 nt, synthetic construct
  source 1..5785: mol_type = other RNA
aggaaataagagagaaaagaagagtaagaagaaatataagagccaccatggcccctaagaagaagcgtaaagtgagccggatggaacgcctcgtctacgaggtgcggcagaagtgcagaaacatcgaggacatctgcatctcctgcggatctctgaacgtgaccctggagcacccactgttcatcggcggcatgtgccagaactgtaaaaactgttttctggagtgtgcctatcaatacgacgatgacggctaccagagctactgcaccatctgttgcggcggaagagaggtgctgatgtgtggaaataacaactgctgccggtgcttctgcgtggaatgcgtggacctgctggtgggccccggcgccgcccaggccgctattaaggaagatccttggaactgctacatgtgcggccacaagggcacatacggcctgctgagacggagagaggactggcctagcagactgcagatgttcttcgccaataaccacgaccaggagttcgacccccctaaggtgtaccctcccgtccccgccgagaagagaaagcccatccgggtcctgagcctgttcgatggcatcgccaccggtctgctggtgctgaaggacctgggcatccaggtggataggtacattgcctccgaggtgtgcgaggactccatcaccgtgggaatggtgcgtcatcagggcaagatcatgtacgtgggcgacgtgcggagcgtgacacagaagcatatccaggagtggggccctttcgacctggtgatcggcggcagcccttgcaatgacctgagcatcgtgaacccagcccggaagggcctgtacgagggaaccggcagactgttcttcgagttttacagactgctgcacgacgcccggcctaaggaaggcgacgaccggcccttcttttggctgttcgagaatgtggtggccatgggagtcagcgacaagcgggatattagccggttcctggagagcaaccccgtgatgatcgatgccaaggaagtgagcgccgcccaccgggccagatacttctggggcaatctgcctggcatgaacagacccctggccagcaccgtgaacgacaagctggagctgcaggagtgcctggagcacggccggatcgccaagttcagcaaggtgagaaccatcaccacccgaagcaacagcatcaaacaaggcaaggaccagcactttcctgtgttcatgaacgagaaggaggacatcctgtggtgtaccgagatggagagagtgttcgggttcccagtccactacacagatgtcagcaacatgtctagactggccagacagagactgctgggaagaagctggtccgtccctgtgatcagacacctgttcgcccctctgaaggagtacttcgcctgcgtgagcagcggcaacagcaacgccaacagccggggccccagcttctctagcggcctggtgccactgtccctgagagggagccacatgggccccatggagatctacaaaaccgtgagcgcctggaagcggcagcctgtgcgcgtgctgagcctgtttcggaatatcgataaagtcctgaaaagcctgggattcctggagagcggctctggctccggcggtggcaccctgaagtacgtggaggatgtgacaaacgtggtcagacgggatgtggagaagtggggccccttcgatctggtgtacggcagcacccaacccctgggcagctcttgtgaccggtgccctggctggtacatgtttcagttccaccggatcctgcagtacgccctgccgagacaggagtcccagcggccattcttttggattttcatggacaacttgctgctgaccgaggatgaccaggaaactaccactcggttcctgcagaccgaagccgtgaccctgcaggacgtgagaggccgggactaccagaacgccatgcgggtgtggtccaacatccctggactgaaaagcaagcacgcacctctgacccctaaagaagaggagtacctgcaggcccaggtgcggagcagaagcaagctggacgcccctaaggtggatctgctggtgaagaattgcctcctgcccctgagagagtacttcaagtatttcagccagaatagtctgcccctgggaggcagcggcggcggcttccagggcagcctgagcttcgaggacgtgaccgtgggcttcagccaggaggagtggcagcacctggaccccgcccagaggaccctgtacagggacgtgatgctggagaactacagccacctggtggccgtgggctgctgcgtgcccaagcccgacgtgatcttcaggctggagcagggccagcagccctggctggtggaggaggagagcctggaccagatctggcccgaggtgtgcagggtgggcggcccaagcagcggcgcccctcctcccagcggcggcagcccagccggctccccaacctctaccgaggagggcacctctgagtccgccacccccgagagcggccctggcacctccaccgagcccagcgagggcagcgcacccggcagccctgccggcagccccacctccacagaggagggaaccagcaccgagcccagcgaaggcagcgccccaggcaccagcaccgagcctagtgagcaggagattaaacggatcaacaagatcagaagaagacttgtgaaagacagcaacaccaagaaggccggcaagacaggccccatgaaaaccctgctggttagagtgatgacacccgatctgagagagcggctggaaaacctgagaaagaagcctgaaaatatcccccagcccatcagcaatacatctagagccaacctgaataagctgctgaccgattacaccgaaatgaagaaggcgatcctgcatgtgtactgggaagagttccagaaggaccctgtgggcctgatgagccgggtggcccagcctgccagcaagaagatcgatcagaacaagctgaaacctgagatggacgagaagggcaacctgaccaccgccggctttgcctgctctcagtgtggccagcccctgttcgtgtacaagctggagcaggtgtctgagaagggcaaggcttacaccaactacttcggacggtgcaatgtggccgagcacgaaaagctgatcctgctggcccagctgaagcccgagaaggatagcgacgaagccgtgacatatagcctgggaaagtttgggcagagggccctggatttctacagcattcatgtgaccaaggagtccacccaccccgtgaagcccctggcccagatcgccggaaacagatacgcctccggacctgtgggaaaggccctgagcgacgcatgtatgggcacaatcgcctccttcctgtctaagtaccaggacatcatcatcgaacaccagaaggtggtgaagggcaaccagaagagactggagagcctgcgggagctggccggcaaggaaaacctggaataccctagcgtgaccctgccacctcagcctcacaccaaggagggcgttgatgcctacaacgaagtgatcgcccgggtgcgaatgtgggtgaacctgaacctgtggcagaagctgaagctaagcagagatgatgccaagcctctgctgagactgaagggattcccttcctttcctctggtcgagagacaggccaacgaagtggactggtgggacatggtgtgtaacgtgaagaagctgatcaacgagaaaaaggaggatggcaaggtgttttggcagaatctggctggctacaagagacaggaagccctgagaccatacctgagcagcgaggaagatcggaagaagggaaagaaattcgctcggtaccagctgggcgacctgctgctgcacctggaaaagaagcacggcgaggactggggaaaggtgtacgacgaggcctgggagcggattgacaagaaagtggaaggcctgagcaagcacatcaagctggaagaggaacggagaagcgaggacgcccagagcaaggccgccctgaccgactggctgcgggctaaggccagcttcgtgatcgagggcctgaaggaggccgacaaggacgagttctgcagatgcgagctgaagctgcagaagtggtacggggacctgcggggaaagcccttcgccatcgaagccgagaacagcatcctggacatcagcggcttcagcaagcagtacaactgtgccttcatctggcagaaggacggcgtgaagaagctgaacctgtacctgatcatcaactacttcaagggcggcaagctgcggttcaagaagatcaaacctgaagccttcgaagccaacagattctacaccgtgatcaacaaaaagagcggcgagatcgtgcccatggaggtgaacttcaacttcgacgaccccaacctgatcatcctgcctctggcctttggcaagagacagggcagagaattcatctggaacgacctgctgtccctggaaaccggcagcctgaagctggccaacggaagagtgatcgagaagacactgtacaacagaagaacccggcaggatgagcctgccctgttcgtggccctgaccttcgagcggcgggaggtcctggactcctccaatatcaaaccaatgaacctgatcggcgtggcaagaggcgaaaacatccccgccgtgatcgccctgaccgaccccgagggctgcccactgagccggtttaaggatagcctgggaaacccaacccacatcctgagaatcggcgagagctataaggagaagcagcggaccatccaggccaagaaggaggtggagcagcggagagccggcggctacagccggaagtacgccagcaaagccaagaatctggcagacgatatggtgagaaacaccgctagagatctgctgtactacgccgtgacccaggatgccatgctgatcttcgccaacctgagccggggcttcggccggcagggcaagcggaccttcatggccgagagacagtacacacggatggaggactggctgaccgccaagctggcctacgagggcctgagcaagacctacctgtccaagacactggcccagtacacctccaagacatgcagcaactgtgggtttaccatcaccagcgccgactacgacagggtgctggagaagctgaagaagacagcaacaggctggatgaccacaattaacggcaaggagctgaaggtggagggccagattacctactacaacagatacaagagacagaacgtagtcaaggacctgtccgtcgagctggatagactgagcgaagaatctgtgaacaacgacatctcctcctggacaaagggcagaagcggagaagctctgagcctcctgaagaaaagattctcccatagacccgtgcaggagaagttcgtgtgcctgaactgcggcttcgagacacacgcagccgagcaagccgccctgaacatcgccagatcctggctgttcctgcggagccaggagtacaagaaataccagacaaacaagacaaccggcaacaccgataagagagccttcgtcgagacctggcagtccttttaccggaagaagcttaaggaggtgtggaaacctgccgtgcggtctggcggatctggcggaggctccaccagccccaagaaaaagagaaaagtctaagctgccttctgcggggcttgccttctggccatgcccttcttctctcccttgcacctgtacctcttggtctttgaataaagcctgagtaggaaggctagcaaaaaaaaaaaaaaaaaaaaaaaaaaaaaaaaaaaaaaaaaaaaaaaaaaaaaaaaaaaaaaaaaaaaaaaaaaaaaaaa

SEQ ID NO: 12440 - RNA, 5785 nt, synthetic construct
  source 1..5785: mol_type = other RNA
aggaaataagagagaaaagaagagtaagaagaaatataagagccaccatggcccctaagaagaagcgtaaagtgagccggatggaacgcctcgtctacgaggtgcggcagaagtgcagaaacatcgaggacatctgcatctcctgcggatctctgaacgtgaccctggagcacccactgttcatcggcggcatgtgccagaactgtaaaaactgttttctggagtgtgcctatcaatacgacgatgacggctaccagagctactgcaccatctgttgcggcggaagagaggtgctgatgtgtggaaataacaactgctgccggtgcttctgcgtggaatgcgtggacctgctggtgggccccggcgccgcccaggccgctattaaggaagatccttggaactgctacatgtgcggccacaagggcacatacggcctgctgagacggagagaggactggcctagcagactgcagatgttcttcgccaataaccacgaccaggagttcgacccccctaaggtgtaccctcccgtccccgccgagaagagaaagcccatccgggtcctgagcctgttcgatggcatcgccaccggtctgctggtgctgaaggacctgggcatccaggtggataggtacattgcctccgaggtgtgcgaggactccatcaccgtgggaatggtgcgtcatcagggcaagatcatgtacgtgggcgacgtgcggagcgtgacacagaagcatatccaggagtggggccctttcgacctggtgatcggcggcagcccttgcaatgacctgagcatcgtgaacccagcccggaagggcctgtacgagggaaccggcagactgttcttcgagttttacagactgctgcacgacgcccggcctaaggaaggcgacgaccggcccttcttttggctgttcgagaatgtggtggccatgggagtcagcgacaagcgggatattagccggttcctggagagcaaccccgtgatgatcgatgccaaggaagtgagcgccgcccaccgggccagatacttctggggcaatctgcctggcatgaacagacccctggccagcaccgtgaacgacaagctggagctgcaggagtgcctggagcacggccggatcgccaagttcagcaaggtgagaaccatcaccacccgaagcaacagcatcaaacaaggcaaggaccagcactttcctgtgttcatgaacgagaaggaggacatcctgtggtgtaccgagatggagagagtgttcgggttcccagtccactacacagatgtcagcaacatgtctagactggccagacagagactgctgggaagaagctggtccgtccctgtgatcagacacctgttcgcccctctgaaggagtacttcgcctgcgtgagcagcggcaacagcaacgccaacagccggggccccagcttctctagcggcctggtgccactgtccctgagagggagccacatgggccccatggagatctacaaaaccgtgagcgcctggaagcggcagcctgtgcgcgtgctgagcctgtttcggaatatcgataaagtcctgaaaagcctgggattcctggagagcggctctggctccggcggtggcaccctgaagtacgtggaggatgtgacaaacgtggtcagacgggatgtggagaagtggggccccttcgatctggtgtacggcagcacccaacccctgggcagctcttgtgaccggtgccctggctggtacatgtttcagttccaccggatcctgcagtacgccctgccgagacaggagtcccagcggccattcttttggattttcatggacaacttgctgctgaccgaggatgaccaggaaactaccactcggttcctgcagaccgaagccgtgaccctgcaggacgtgagaggccgggactaccagaacgccatgcgggtgtggtccaacatccctggactgaaaagcaagcacgcacctctgacccctaaagaagaggagtacctgcaggcccaggtgcggagcagaagcaagctggacgcccctaaggtggatctgctggtgaagaattgcctcctgcccctgagagagtacttcaagtatttcagccagaatagtctgcccctgggaggcagcggcggcggcgcccaggagagcgtgaccttcgaggacgtggccgtgaacttcaccaacagggagtggcagagcctgacctacgcccagaggcacctgtacaagcacgtgatgctggagaactacggcaacatggtgagcctgggcttccccttccccaagccccccctgatcagccacctggagaggggcgtggagccctgcgtgcaggacccccaggacagggagagcctgagctgcagctaccccgtgagcggcggcccaagcagcggcgcccctcctcccagcggcggcagcccagccggctccccaacctctaccgaggagggcacctctgagtccgccacccccgagagcggccctggcacctccaccgagcccagcgagggcagcgcacccggcagccctgccggcagccccacctccacagaggagggaaccagcaccgagcccagcgaaggcagcgccccaggcaccagcaccgagcctagtgagcaggagattaaacggatcaacaagatcagaagaagacttgtgaaagacagcaacaccaagaaggccggcaagacaggccccatgaaaaccctgctggttagagtgatgacacccgatctgagagagcggctggaaaacctgagaaagaagcctgaaaatatcccccagcccatcagcaatacatctagagccaacctgaataagctgctgaccgattacaccgaaatgaagaaggcgatcctgcatgtgtactgggaagagttccagaaggaccctgtgggcctgatgagccgggtggcccagcctgccagcaagaagatcgatcagaacaagctgaaacctgagatggacgagaagggcaacctgaccaccgccggctttgcctgctctcagtgtggccagcccctgttcgtgtacaagctggagcaggtgtctgagaagggcaaggcttacaccaactacttcggacggtgcaatgtggccgagcacgaaaagctgatcctgctggcccagctgaagcccgagaaggatagcgacgaagccgtgacatatagcctgggaaagtttgggcagagggccctggatttctacagcattcatgtgaccaaggagtccacccaccccgtgaagcccctggcccagatcgccggaaacagatacgcctccggacctgtgggaaaggccctgagcgacgcatgtatgggcacaatcgcctccttcctgtctaagtaccaggacatcatcatcgaacaccagaaggtggtgaagggcaaccagaagagactggagagcctgcgggagctggccggcaaggaaaacctggaataccctagcgtgaccctgccacctcagcctcacaccaaggagggcgttgatgcctacaacgaagtgatcgcccgggtgcgaatgtgggtgaacctgaacctgtggcagaagctgaagctaagcagagatgatgccaagcctctgctgagactgaagggattcccttcctttcctctggtcgagagacaggccaacgaagtggactggtgggacatggtgtgtaacgtgaagaagctgatcaacgagaaaaaggaggatggcaaggtgttttggcagaatctggctggctacaagagacaggaagccctgagaccatacctgagcagcgaggaagatcggaagaagggaaagaaattcgctcggtaccagctgggcgacctgctgctgcacctggaaaagaagcacggcgaggactggggaaaggtgtacgacgaggcctgggagcggattgacaagaaagtggaaggcctgagcaagcacatcaagctggaagaggaacggagaagcgaggacgcccagagcaaggccgccctgaccgactggctgcgggctaaggccagcttcgtgatcgagggcctgaaggaggccgacaaggacgagttctgcagatgcgagctgaagctgcagaagtggtacggggacctgcggggaaagcccttcgccatcgaagccgagaacagcatcctggacatcagcggcttcagcaagcagtacaactgtgccttcatctggcagaaggacggcgtgaagaagctgaacctgtacctgatcatcaactacttcaagggcggcaagctgcggttcaagaagatcaaacctgaagccttcgaagccaacagattctacaccgtgatcaacaaaaagagcggcgagatcgtgcccatggaggtgaacttcaacttcgacgaccccaacctgatcatcctgcctctggcctttggcaagagacagggcagagaattcatctggaacgacctgctgtccctggaaaccggcagcctgaagctggccaacggaagagtgatcgagaagacactgtacaacagaagaacccggcaggatgagcctgccctgttcgtggccctgaccttcgagcggcgggaggtcctggactcctccaatatcaaaccaatgaacctgatcggcgtggcaagaggcgaaaacatccccgccgtgatcgccctgaccgaccccgagggctgcccactgagccggtttaaggatagcctgggaaacccaacccacatcctgagaatcggcgagagctataaggagaagcagcggaccatccaggccaagaaggaggtggagcagcggagagccggcggctacagccggaagtacgccagcaaagccaagaatctggcagacgatatggtgagaaacaccgctagagatctgctgtactacgccgtgacccaggatgccatgctgatcttcgccaacctgagccggggcttcggccggcagggcaagcggaccttcatggccgagagacagtacacacggatggaggactggctgaccgccaagctggcctacgagggcctgagcaagacctacctgtccaagacactggcccagtacacctccaagacatgcagcaactgtgggtttaccatcaccagcgccgactacgacagggtgctggagaagctgaagaagacagcaacaggctggatgaccacaattaacggcaaggagctgaaggtggagggccagattacctactacaacagatacaagagacagaacgtagtcaaggacctgtccgtcgagctggatagactgagcgaagaatctgtgaacaacgacatctcctcctggacaaagggcagaagcggagaagctctgagcctcctgaagaaaagattctcccatagacccgtgcaggagaagttcgtgtgcctgaactgcggcttcgagacacacgcagccgagcaagccgccctgaacatcgccagatcctggctgttcctgcggagccaggagtacaagaaataccagacaaacaagacaaccggcaacaccgataagagagccttcgtcgagacctggcagtccttttaccggaagaagcttaaggaggtgtggaaacctgccgtgcggtctggcggatctggcggaggctccaccagccccaagaaaaagagaaaagtctaagctgccttctgcggggcttgccttctggccatgcccttcttctctcccttgcacctgtacctcttggtctttgaataaagcctgagtaggaaggctagcaaaaaaaaaaaaaaaaaaaaaaaaaaaaaaaaaaaaaaaaaaaaaaaaaaaaaaaaaaaaaaaaaaaaaaaaaaaaaaaa

SEQ ID NO: 12441 - RNA, 5785 nt, synthetic construct
  source 1..5785: mol_type = other RNA
aggaaataagagagaaaagaagagtaagaagaaatataagagccaccatggcccctaagaagaagcgtaaagtgagccggatggaacgcctcgtctacgaggtgcggcagaagtgcagaaacatcgaggacatctgcatctcctgcggatctctgaacgtgaccctggagcacccactgttcatcggcggcatgtgccagaactgtaaaaactgttttctggagtgtgcctatcaatacgacgatgacggctaccagagctactgcaccatctgttgcggcggaagagaggtgctgatgtgtggaaataacaactgctgccggtgcttctgcgtggaatgcgtggacctgctggtgggccccggcgccgcccaggccgctattaaggaagatccttggaactgctacatgtgcggccacaagggcacatacggcctgctgagacggagagaggactggcctagcagactgcagatgttcttcgccaataaccacgaccaggagttcgacccccctaaggtgtaccctcccgtccccgccgagaagagaaagcccatccgggtcctgagcctgttcgatggcatcgccaccggtctgctggtgctgaaggacctgggcatccaggtggataggtacattgcctccgaggtgtgcgaggactccatcaccgtgggaatggtgcgtcatcagggcaagatcatgtacgtgggcgacgtgcggagcgtgacacagaagcatatccaggagtggggccctttcgacctggtgatcggcggcagcccttgcaatgacctgagcatcgtgaacccagcccggaagggcctgtacgagggaaccggcagactgttcttcgagttttacagactgctgcacgacgcccggcctaaggaaggcgacgaccggcccttcttttggctgttcgagaatgtggtggccatgggagtcagcgacaagcgggatattagccggttcctggagagcaaccccgtgatgatcgatgccaaggaagtgagcgccgcccaccgggccagatacttctggggcaatctgcctggcatgaacagacccctggccagcaccgtgaacgacaagctggagctgcaggagtgcctggagcacggccggatcgccaagttcagcaaggtgagaaccatcaccacccgaagcaacagcatcaaacaaggcaaggaccagcactttcctgtgttcatgaacgagaaggaggacatcctgtggtgtaccgagatggagagagtgttcgggttcccagtccactacacagatgtcagcaacatgtctagactggccagacagagactgctgggaagaagctggtccgtccctgtgatcagacacctgttcgcccctctgaaggagtacttcgcctgcgtgagcagcggcaacagcaacgccaacagccggggccccagcttctctagcggcctggtgccactgtccctgagagggagccacatgggccccatggagatctacaaaaccgtgagcgcctggaagcggcagcctgtgcgcgtgctgagcctgtttcggaatatcgataaagtcctgaaaagcctgggattcctggagagcggctctggctccggcggtggcaccctgaagtacgtggaggatgtgacaaacgtggtcagacgggatgtggagaagtggggccccttcgatctggtgtacggcagcacccaacccctgggcagctcttgtgaccggtgccctggctggtacatgtttcagttccaccggatcctgcagtacgccctgccgagacaggagtcccagcggccattcttttggattttcatggacaacttgctgctgaccgaggatgaccaggaaactaccactcggttcctgcagaccgaagccgtgaccctgcaggacgtgagaggccgggactaccagaacgccatgcgggtgtggtccaacatccctggactgaaaagcaagcacgcacctctgacccctaaagaagaggagtacctgcaggcccaggtgcggagcagaagcaagctggacgcccctaaggtggatctgctggtgaagaattgcctcctgcccctgagagagtacttcaagtatttcagccagaatagtctgcccctgggaggcagcggcggcggcttccaggagagcgtgaccttcaaggacgtggccgtggacttcacctgggaggagtggggctacctggacaccagccagaaggagctgtactgggaggtgatgctggagaactacaggaacctggtgagcctgggcctggccgacagcaacgtgaacatgatcagccagctggagagcggcgaggcccacggcatcagcgtggacagcgtgctgaggagctgctggcccgacggcgacaccaggggcggcccaagcagcggcgcccctcctcccagcggcggcagcccagccggctccccaacctctaccgaggagggcacctctgagtccgccacccccgagagcggccctggcacctccaccgagcccagcgagggcagcgcacccggcagccctgccggcagccccacctccacagaggagggaaccagcaccgagcccagcgaaggcagcgccccaggcaccagcaccgagcctagtgagcaggagattaaacggatcaacaagatcagaagaagacttgtgaaagacagcaacaccaagaaggccggcaagacaggccccatgaaaaccctgctggttagagtgatgacacccgatctgagagagcggctggaaaacctgagaaagaagcctgaaaatatcccccagcccatcagcaatacatctagagccaacctgaataagctgctgaccgattacaccgaaatgaagaaggcgatcctgcatgtgtactgggaagagttccagaaggaccctgtgggcctgatgagccgggtggcccagcctgccagcaagaagatcgatcagaacaagctgaaacctgagatggacgagaagggcaacctgaccaccgccggctttgcctgctctcagtgtggccagcccctgttcgtgtacaagctggagcaggtgtctgagaagggcaaggcttacaccaactacttcggacggtgcaatgtggccgagcacgaaaagctgatcctgctggcccagctgaagcccgagaaggatagcgacgaagccgtgacatatagcctgggaaagtttgggcagagggccctggatttctacagcattcatgtgaccaaggagtccacccaccccgtgaagcccctggcccagatcgccggaaacagatacgcctccggacctgtgggaaaggccctgagcgacgcatgtatgggcacaatcgcctccttcctgtctaagtaccaggacatcatcatcgaacaccagaaggtggtgaagggcaaccagaagagactggagagcctgcgggagctggccggcaaggaaaacctggaataccctagcgtgaccctgccacctcagcctcacaccaaggagggcgttgatgcctacaacgaagtgatcgcccgggtgcgaatgtgggtgaacctgaacctgtggcagaagctgaagctaagcagagatgatgccaagcctctgctgagactgaagggattcccttcctttcctctggtcgagagacaggccaacgaagtggactggtgggacatggtgtgtaacgtgaagaagctgatcaacgagaaaaaggaggatggcaaggtgttttggcagaatctggctggctacaagagacaggaagccctgagaccatacctgagcagcgaggaagatcggaagaagggaaagaaattcgctcggtaccagctgggcgacctgctgctgcacctggaaaagaagcacggcgaggactggggaaaggtgtacgacgaggcctgggagcggattgacaagaaagtggaaggcctgagcaagcacatcaagctggaagaggaacggagaagcgaggacgcccagagcaaggccgccctgaccgactggctgcgggctaaggccagcttcgtgatcgagggcctgaaggaggccgacaaggacgagttctgcagatgcgagctgaagctgcagaagtggtacggggacctgcggggaaagcccttcgccatcgaagccgagaacagcatcctggacatcagcggcttcagcaagcagtacaactgtgccttcatctggcagaaggacggcgtgaagaagctgaacctgtacctgatcatcaactacttcaagggcggcaagctgcggttcaagaagatcaaacctgaagccttcgaagccaacagattctacaccgtgatcaacaaaaagagcggcgagatcgtgcccatggaggtgaacttcaacttcgacgaccccaacctgatcatcctgcctctggcctttggcaagagacagggcagagaattcatctggaacgacctgctgtccctggaaaccggcagcctgaagctggccaacggaagagtgatcgagaagacactgtacaacagaagaacccggcaggatgagcctgccctgttcgtggccctgaccttcgagcggcgggaggtcctggactcctccaatatcaaaccaatgaacctgatcggcgtggcaagaggcgaaaacatccccgccgtgatcgccctgaccgaccccgagggctgcccactgagccggtttaaggatagcctgggaaacccaacccacatcctgagaatcggcgagagctataaggagaagcagcggaccatccaggccaagaaggaggtggagcagcggagagccggcggctacagccggaagtacgccagcaaagccaagaatctggcagacgatatggtgagaaacaccgctagagatctgctgtactacgccgtgacccaggatgccatgctgatcttcgccaacctgagccggggcttcggccggcagggcaagcggaccttcatggccgagagacagtacacacggatggaggactggctgaccgccaagctggcctacgagggcctgagcaagacctacctgtccaagacactggcccagtacacctccaagacatgcagcaactgtgggtttaccatcaccagcgccgactacgacagggtgctggagaagctgaagaagacagcaacaggctggatgaccacaattaacggcaaggagctgaaggtggagggccagattacctactacaacagatacaagagacagaacgtagtcaaggacctgtccgtcgagctggatagactgagcgaagaatctgtgaacaacgacatctcctcctggacaaagggcagaagcggagaagctctgagcctcctgaagaaaagattctcccatagacccgtgcaggagaagttcgtgtgcctgaactgcggcttcgagacacacgcagccgagcaagccgccctgaacatcgccagatcctggctgttcctgcggagccaggagtacaagaaataccagacaaacaagacaaccggcaacaccgataagagagccttcgtcgagacctggcagtccttttaccggaagaagcttaaggaggtgtggaaacctgccgtgcggtctggcggatctggcggaggctccaccagccccaagaaaaagagaaaagtctaagctgccttctgcggggcttgccttctggccatgcccttcttctctcccttgcacctgtacctcttggtctttgaataaagcctgagtaggaaggctagcaaaaaaaaaaaaaaaaaaaaaaaaaaaaaaaaaaaaaaaaaaaaaaaaaaaaaaaaaaaaaaaaaaaaaaaaaaaaaaaa

SEQ ID NO: 12442 - RNA, 5785 nt, synthetic construct
  source 1..5785: mol_type = other RNA
aggaaataagagagaaaagaagagtaagaagaaatataagagccaccatggcccctaagaagaagcgtaaagtgagccggatggaacgcctcgtctacgaggtgcggcagaagtgcagaaacatcgaggacatctgcatctcctgcggatctctgaacgtgaccctggagcacccactgttcatcggcggcatgtgccagaactgtaaaaactgttttctggagtgtgcctatcaatacgacgatgacggctaccagagctactgcaccatctgttgcggcggaagagaggtgctgatgtgtggaaataacaactgctgccggtgcttctgcgtggaatgcgtggacctgctggtgggccccggcgccgcccaggccgctattaaggaagatccttggaactgctacatgtgcggccacaagggcacatacggcctgctgagacggagagaggactggcctagcagactgcagatgttcttcgccaataaccacgaccaggagttcgacccccctaaggtgtaccctcccgtccccgccgagaagagaaagcccatccgggtcctgagcctgttcgatggcatcgccaccggtctgctggtgctgaaggacctgggcatccaggtggataggtacattgcctccgaggtgtgcgaggactccatcaccgtgggaatggtgcgtcatcagggcaagatcatgtacgtgggcgacgtgcggagcgtgacacagaagcatatccaggagtggggccctttcgacctggtgatcggcggcagcccttgcaatgacctgagcatcgtgaacccagcccggaagggcctgtacgagggaaccggcagactgttcttcgagttttacagactgctgcacgacgcccggcctaaggaaggcgacgaccggcccttcttttggctgttcgagaatgtggtggccatgggagtcagcgacaagcgggatattagccggttcctggagagcaaccccgtgatgatcgatgccaaggaagtgagcgccgcccaccgggccagatacttctggggcaatctgcctggcatgaacagacccctggccagcaccgtgaacgacaagctggagctgcaggagtgcctggagcacggccggatcgccaagttcagcaaggtgagaaccatcaccacccgaagcaacagcatcaaacaaggcaaggaccagcactttcctgtgttcatgaacgagaaggaggacatcctgtggtgtaccgagatggagagagtgttcgggttcccagtccactacacagatgtcagcaacatgtctagactggccagacagagactgctgggaagaagctggtccgtccctgtgatcagacacctgttcgcccctctgaaggagtacttcgcctgcgtgagcagcggcaacagcaacgccaacagccggggccccagcttctctagcggcctggtgccactgtccctgagagggagccacatgggccccatggagatctacaaaaccgtgagcgcctggaagcggcagcctgtgcgcgtgctgagcctgtttcggaatatcgataaagtcctgaaaagcctgggattcctggagagcggctctggctccggcggtggcaccctgaagtacgtggaggatgtgacaaacgtggtcagacgggatgtggagaagtggggccccttcgatctggtgtacggcagcacccaacccctgggcagctcttgtgaccggtgccctggctggtacatgtttcagttccaccggatcctgcagtacgccctgccgagacaggagtcccagcggccattcttttggattttcatggacaacttgctgctgaccgaggatgaccaggaaactaccactcggttcctgcagaccgaagccgtgaccctgcaggacgtgagaggccgggactaccagaacgccatgcgggtgtggtccaacatccctggactgaaaagcaagcacgcacctctgacccctaaagaagaggagtacctgcaggcccaggtgcggagcagaagcaagctggacgcccctaaggtggatctgctggtgaagaattgcctcctgcccctgagagagtacttcaagtatttcagccagaatagtctgcccctgggaggcagcggcggcggcatggagagcgtgagcttcgaggacgtggccgtgaagttcacccaggaggagtgggccgtgctggaccccagccagaagaagctgtacaaggacgtgatgcaggagaccctgaagaacctggccagcatcggcaacaagagcggcaagcagaaggtgatcaacgagtacggcaagctgtggaggaagctgagcagccacctggccggcaagttcagcgactacaacgagaaccaccagtgcgccggcggcccaagcagcggcgcccctcctcccagcggcggcagcccagccggctccccaacctctaccgaggagggcacctctgagtccgccacccccgagagcggccctggcacctccaccgagcccagcgagggcagcgcacccggcagccctgccggcagccccacctccacagaggagggaaccagcaccgagcccagcgaaggcagcgccccaggcaccagcaccgagcctagtgagcaggagattaaacggatcaacaagatcagaagaagacttgtgaaagacagcaacaccaagaaggccggcaagacaggccccatgaaaaccctgctggttagagtgatgacacccgatctgagagagcggctggaaaacctgagaaagaagcctgaaaatatcccccagcccatcagcaatacatctagagccaacctgaataagctgctgaccgattacaccgaaatgaagaaggcgatcctgcatgtgtactgggaagagttccagaaggaccctgtgggcctgatgagccgggtggcccagcctgccagcaagaagatcgatcagaacaagctgaaacctgagatggacgagaagggcaacctgaccaccgccggctttgcctgctctcagtgtggccagcccctgttcgtgtacaagctggagcaggtgtctgagaagggcaaggcttacaccaactacttcggacggtgcaatgtggccgagcacgaaaagctgatcctgctggcccagctgaagcccgagaaggatagcgacgaagccgtgacatatagcctgggaaagtttgggcagagggccctggatttctacagcattcatgtgaccaaggagtccacccaccccgtgaagcccctggcccagatcgccggaaacagatacgcctccggacctgtgggaaaggccctgagcgacgcatgtatgggcacaatcgcctccttcctgtctaagtaccaggacatcatcatcgaacaccagaaggtggtgaagggcaaccagaagagactggagagcctgcgggagctggccggcaaggaaaacctggaataccctagcgtgaccctgccacctcagcctcacaccaaggagggcgttgatgcctacaacgaagtgatcgcccgggtgcgaatgtgggtgaacctgaacctgtggcagaagctgaagctaagcagagatgatgccaagcctctgctgagactgaagggattcccttcctttcctctggtcgagagacaggccaacgaagtggactggtgggacatggtgtgtaacgtgaagaagctgatcaacgagaaaaaggaggatggcaaggtgttttggcagaatctggctggctacaagagacaggaagccctgagaccatacctgagcagcgaggaagatcggaagaagggaaagaaattcgctcggtaccagctgggcgacctgctgctgcacctggaaaagaagcacggcgaggactggggaaaggtgtacgacgaggcctgggagcggattgacaagaaagtggaaggcctgagcaagcacatcaagctggaagaggaacggagaagcgaggacgcccagagcaaggccgccctgaccgactggctgcgggctaaggccagcttcgtgatcgagggcctgaaggaggccgacaaggacgagttctgcagatgcgagctgaagctgcagaagtggtacggggacctgcggggaaagcccttcgccatcgaagccgagaacagcatcctggacatcagcggcttcagcaagcagtacaactgtgccttcatctggcagaaggacggcgtgaagaagctgaacctgtacctgatcatcaactacttcaagggcggcaagctgcggttcaagaagatcaaacctgaagccttcgaagccaacagattctacaccgtgatcaacaaaaagagcggcgagatcgtgcccatggaggtgaacttcaacttcgacgaccccaacctgatcatcctgcctctggcctttggcaagagacagggcagagaattcatctggaacgacctgctgtccctggaaaccggcagcctgaagctggccaacggaagagtgatcgagaagacactgtacaacagaagaacccggcaggatgagcctgccctgttcgtggccctgaccttcgagcggcgggaggtcctggactcctccaatatcaaaccaatgaacctgatcggcgtggcaagaggcgaaaacatccccgccgtgatcgccctgaccgaccccgagggctgcccactgagccggtttaaggatagcctgggaaacccaacccacatcctgagaatcggcgagagctataaggagaagcagcggaccatccaggccaagaaggaggtggagcagcggagagccggcggctacagccggaagtacgccagcaaagccaagaatctggcagacgatatggtgagaaacaccgctagagatctgctgtactacgccgtgacccaggatgccatgctgatcttcgccaacctgagccggggcttcggccggcagggcaagcggaccttcatggccgagagacagtacacacggatggaggactggctgaccgccaagctggcctacgagggcctgagcaagacctacctgtccaagacactggcccagtacacctccaagacatgcagcaactgtgggtttaccatcaccagcgccgactacgacagggtgctggagaagctgaagaagacagcaacaggctggatgaccacaattaacggcaaggagctgaaggtggagggccagattacctactacaacagatacaagagacagaacgtagtcaaggacctgtccgtcgagctggatagactgagcgaagaatctgtgaacaacgacatctcctcctggacaaagggcagaagcggagaagctctgagcctcctgaagaaaagattctcccatagacccgtgcaggagaagttcgtgtgcctgaactgcggcttcgagacacacgcagccgagcaagccgccctgaacatcgccagatcctggctgttcctgcggagccaggagtacaagaaataccagacaaacaagacaaccggcaacaccgataagagagccttcgtcgagacctggcagtccttttaccggaagaagcttaaggaggtgtggaaacctgccgtgcggtctggcggatctggcggaggctccaccagccccaagaaaaagagaaaagtctaagctgccttctgcggggcttgccttctggccatgcccttcttctctcccttgcacctgtacctcttggtctttgaataaagcctgagtaggaaggctagcaaaaaaaaaaaaaaaaaaaaaaaaaaaaaaaaaaaaaaaaaaaaaaaaaaaaaaaaaaaaaaaaaaaaaaaaaaaaaaaa

SEQ ID NO: 12443 - RNA, 5785 nt, synthetic construct
  source 1..5785: mol_type = other RNA
aggaaataagagagaaaagaagagtaagaagaaatataagagccaccatggcccctaagaagaagcgtaaagtgagccggatggaacgcctcgtctacgaggtgcggcagaagtgcagaaacatcgaggacatctgcatctcctgcggatctctgaacgtgaccctggagcacccactgttcatcggcggcatgtgccagaactgtaaaaactgttttctggagtgtgcctatcaatacgacgatgacggctaccagagctactgcaccatctgttgcggcggaagagaggtgctgatgtgtggaaataacaactgctgccggtgcttctgcgtggaatgcgtggacctgctggtgggccccggcgccgcccaggccgctattaaggaagatccttggaactgctacatgtgcggccacaagggcacatacggcctgctgagacggagagaggactggcctagcagactgcagatgttcttcgccaataaccacgaccaggagttcgacccccctaaggtgtaccctcccgtccccgccgagaagagaaagcccatccgggtcctgagcctgttcgatggcatcgccaccggtctgctggtgctgaaggacctgggcatccaggtggataggtacattgcctccgaggtgtgcgaggactccatcaccgtgggaatggtgcgtcatcagggcaagatcatgtacgtgggcgacgtgcggagcgtgacacagaagcatatccaggagtggggccctttcgacctggtgatcggcggcagcccttgcaatgacctgagcatcgtgaacccagcccggaagggcctgtacgagggaaccggcagactgttcttcgagttttacagactgctgcacgacgcccggcctaaggaaggcgacgaccggcccttcttttggctgttcgagaatgtggtggccatgggagtcagcgacaagcgggatattagccggttcctggagagcaaccccgtgatgatcgatgccaaggaagtgagcgccgcccaccgggccagatacttctggggcaatctgcctggcatgaacagacccctggccagcaccgtgaacgacaagctggagctgcaggagtgcctggagcacggccggatcgccaagttcagcaaggtgagaaccatcaccacccgaagcaacagcatcaaacaaggcaaggaccagcactttcctgtgttcatgaacgagaaggaggacatcctgtggtgtaccgagatggagagagtgttcgggttcccagtccactacacagatgtcagcaacatgtctagactggccagacagagactgctgggaagaagctggtccgtccctgtgatcagacacctgttcgcccctctgaaggagtacttcgcctgcgtgagcagcggcaacagcaacgccaacagccggggccccagcttctctagcggcctggtgccactgtccctgagagggagccacatgggccccatggagatctacaaaaccgtgagcgcctggaagcggcagcctgtgcgcgtgctgagcctgtttcggaatatcgataaagtcctgaaaagcctgggattcctggagagcggctctggctccggcggtggcaccctgaagtacgtggaggatgtgacaaacgtggtcagacgggatgtggagaagtggggccccttcgatctggtgtacggcagcacccaacccctgggcagctcttgtgaccggtgccctggctggtacatgtttcagttccaccggatcctgcagtacgccctgccgagacaggagtcccagcggccattcttttggattttcatggacaacttgctgctgaccgaggatgaccaggaaactaccactcggttcctgcagaccgaagccgtgaccctgcaggacgtgagaggccgggactaccagaacgccatgcgggtgtggtccaacatccctggactgaaaagcaagcacgcacctctgacccctaaagaagaggagtacctgcaggcccaggtgcggagcagaagcaagctggacgcccctaaggtggatctgctggtgaagaattgcctcctgcccctgagagagtacttcaagtatttcagccagaatagtctgcccctgggaggcagcggcggcggcagccaggagcccgtgaccttcgaggacgtggccgtgtacttcacccagaaccagtgggccagcctggaccccatgcagagggccctgtacctggaggtgatgctggagaactacgccaacatcaccagcctggccgccctgcccttccccaagcccgacctgatcctgcagctggagcagggcgaggccccctggggcctggacccctggacccccctggagagggaggccctgggcggcgtgggcggcccaagcagcggcgcccctcctcccagcggcggcagcccagccggctccccaacctctaccgaggagggcacctctgagtccgccacccccgagagcggccctggcacctccaccgagcccagcgagggcagcgcacccggcagccctgccggcagccccacctccacagaggagggaaccagcaccgagcccagcgaaggcagcgccccaggcaccagcaccgagcctagtgagcaggagattaaacggatcaacaagatcagaagaagacttgtgaaagacagcaacaccaagaaggccggcaagacaggccccatgaaaaccctgctggttagagtgatgacacccgatctgagagagcggctggaaaacctgagaaagaagcctgaaaatatcccccagcccatcagcaatacatctagagccaacctgaataagctgctgaccgattacaccgaaatgaagaaggcgatcctgcatgtgtactgggaagagttccagaaggaccctgtgggcctgatgagccgggtggcccagcctgccagcaagaagatcgatcagaacaagctgaaacctgagatggacgagaagggcaacctgaccaccgccggctttgcctgctctcagtgtggccagcccctgttcgtgtacaagctggagcaggtgtctgagaagggcaaggcttacaccaactacttcggacggtgcaatgtggccgagcacgaaaagctgatcctgctggcccagctgaagcccgagaaggatagcgacgaagccgtgacatatagcctgggaaagtttgggcagagggccctggatttctacagcattcatgtgaccaaggagtccacccaccccgtgaagcccctggcccagatcgccggaaacagatacgcctccggacctgtgggaaaggccctgagcgacgcatgtatgggcacaatcgcctccttcctgtctaagtaccaggacatcatcatcgaacaccagaaggtggtgaagggcaaccagaagagactggagagcctgcgggagctggccggcaaggaaaacctggaataccctagcgtgaccctgccacctcagcctcacaccaaggagggcgttgatgcctacaacgaagtgatcgcccgggtgcgaatgtgggtgaacctgaacctgtggcagaagctgaagctaagcagagatgatgccaagcctctgctgagactgaagggattcccttcctttcctctggtcgagagacaggccaacgaagtggactggtgggacatggtgtgtaacgtgaagaagctgatcaacgagaaaaaggaggatggcaaggtgttttggcagaatctggctggctacaagagacaggaagccctgagaccatacctgagcagcgaggaagatcggaagaagggaaagaaattcgctcggtaccagctgggcgacctgctgctgcacctggaaaagaagcacggcgaggactggggaaaggtgtacgacgaggcctgggagcggattgacaagaaagtggaaggcctgagcaagcacatcaagctggaagaggaacggagaagcgaggacgcccagagcaaggccgccctgaccgactggctgcgggctaaggccagcttcgtgatcgagggcctgaaggaggccgacaaggacgagttctgcagatgcgagctgaagctgcagaagtggtacggggacctgcggggaaagcccttcgccatcgaagccgagaacagcatcctggacatcagcggcttcagcaagcagtacaactgtgccttcatctggcagaaggacggcgtgaagaagctgaacctgtacctgatcatcaactacttcaagggcggcaagctgcggttcaagaagatcaaacctgaagccttcgaagccaacagattctacaccgtgatcaacaaaaagagcggcgagatcgtgcccatggaggtgaacttcaacttcgacgaccccaacctgatcatcctgcctctggcctttggcaagagacagggcagagaattcatctggaacgacctgctgtccctggaaaccggcagcctgaagctggccaacggaagagtgatcgagaagacactgtacaacagaagaacccggcaggatgagcctgccctgttcgtggccctgaccttcgagcggcgggaggtcctggactcctccaatatcaaaccaatgaacctgatcggcgtggcaagaggcgaaaacatccccgccgtgatcgccctgaccgaccccgagggctgcccactgagccggtttaaggatagcctgggaaacccaacccacatcctgagaatcggcgagagctataaggagaagcagcggaccatccaggccaagaaggaggtggagcagcggagagccggcggctacagccggaagtacgccagcaaagccaagaatctggcagacgatatggtgagaaacaccgctagagatctgctgtactacgccgtgacccaggatgccatgctgatcttcgccaacctgagccggggcttcggccggcagggcaagcggaccttcatggccgagagacagtacacacggatggaggactggctgaccgccaagctggcctacgagggcctgagcaagacctacctgtccaagacactggcccagtacacctccaagacatgcagcaactgtgggtttaccatcaccagcgccgactacgacagggtgctggagaagctgaagaagacagcaacaggctggatgaccacaattaacggcaaggagctgaaggtggagggccagattacctactacaacagatacaagagacagaacgtagtcaaggacctgtccgtcgagctggatagactgagcgaagaatctgtgaacaacgacatctcctcctggacaaagggcagaagcggagaagctctgagcctcctgaagaaaagattctcccatagacccgtgcaggagaagttcgtgtgcctgaactgcggcttcgagacacacgcagccgagcaagccgccctgaacatcgccagatcctggctgttcctgcggagccaggagtacaagaaataccagacaaacaagacaaccggcaacaccgataagagagccttcgtcgagacctggcagtccttttaccggaagaagcttaaggaggtgtggaaacctgccgtgcggtctggcggatctggcggaggctccaccagccccaagaaaaagagaaaagtctaagctgccttctgcggggcttgccttctggccatgcccttcttctctcccttgcacctgtacctcttggtctttgaataaagcctgagtaggaaggctagcaaaaaaaaaaaaaaaaaaaaaaaaaaaaaaaaaaaaaaaaaaaaaaaaaaaaaaaaaaaaaaaaaaaaaaaaaaaaaaaa

SEQ ID NO: 12444 - RNA, 5785 nt, synthetic construct
  source 1..5785: mol_type = other RNA
aggaaataagagagaaaagaagagtaagaagaaatataagagccaccatggcccctaagaagaagcgtaaagtgagccggatggaacgcctcgtctacgaggtgcggcagaagtgcagaaacatcgaggacatctgcatctcctgcggatctctgaacgtgaccctggagcacccactgttcatcggcggcatgtgccagaactgtaaaaactgttttctggagtgtgcctatcaatacgacgatgacggctaccagagctactgcaccatctgttgcggcggaagagaggtgctgatgtgtggaaataacaactgctgccggtgcttctgcgtggaatgcgtggacctgctggtgggccccggcgccgcccaggccgctattaaggaagatccttggaactgctacatgtgcggccacaagggcacatacggcctgctgagacggagagaggactggcctagcagactgcagatgttcttcgccaataaccacgaccaggagttcgacccccctaaggtgtaccctcccgtccccgccgagaagagaaagcccatccgggtcctgagcctgttcgatggcatcgccaccggtctgctggtgctgaaggacctgggcatccaggtggataggtacattgcctccgaggtgtgcgaggactccatcaccgtgggaatggtgcgtcatcagggcaagatcatgtacgtgggcgacgtgcggagcgtgacacagaagcatatccaggagtggggccctttcgacctggtgatcggcggcagcccttgcaatgacctgagcatcgtgaacccagcccggaagggcctgtacgagggaaccggcagactgttcttcgagttttacagactgctgcacgacgcccggcctaaggaaggcgacgaccggcccttcttttggctgttcgagaatgtggtggccatgggagtcagcgacaagcgggatattagccggttcctggagagcaaccccgtgatgatcgatgccaaggaagtgagcgccgcccaccgggccagatacttctggggcaatctgcctggcatgaacagacccctggccagcaccgtgaacgacaagctggagctgcaggagtgcctggagcacggccggatcgccaagttcagcaaggtgagaaccatcaccacccgaagcaacagcatcaaacaaggcaaggaccagcactttcctgtgttcatgaacgagaaggaggacatcctgtggtgtaccgagatggagagagtgttcgggttcccagtccactacacagatgtcagcaacatgtctagactggccagacagagactgctgggaagaagctggtccgtccctgtgatcagacacctgttcgcccctctgaaggagtacttcgcctgcgtgagcagcggcaacagcaacgccaacagccggggccccagcttctctagcggcctggtgccactgtccctgagagggagccacatgggccccatggagatctacaaaaccgtgagcgcctggaagcggcagcctgtgcgcgtgctgagcctgtttcggaatatcgataaagtcctgaaaagcctgggattcctggagagcggctctggctccggcggtggcaccctgaagtacgtggaggatgtgacaaacgtggtcagacgggatgtggagaagtggggccccttcgatctggtgtacggcagcacccaacccctgggcagctcttgtgaccggtgccctggctggtacatgtttcagttccaccggatcctgcagtacgccctgccgagacaggagtcccagcggccattcttttggattttcatggacaacttgctgctgaccgaggatgaccaggaaactaccactcggttcctgcagaccgaagccgtgaccctgcaggacgtgagaggccgggactaccagaacgccatgcgggtgtggtccaacatccctggactgaaaagcaagcacgcacctctgacccctaaagaagaggagtacctgcaggcccaggtgcggagcagaagcaagctggacgcccctaaggtggatctgctggtgaagaattgcctcctgcccctgagagagtacttcaagtatttcagccagaatagtctgcccctgggaggcagcggcggcggcgaggagctgcccgtggtgttcgaggacgtggccgtgtacttcaccagggaggagtgggccatgctggacaagaggcagaaggagctgtacagggacgtgatgaggatgaactacgagctgctggccagcctgggccccgccgccgccaagcccgagctgatcagcaagctggagaggagggccgccccctggatcaaggaccccaacggccccaagtggggcaagggcaggccccccggcaagggcggcccaagcagcggcgcccctcctcccagcggcggcagcccagccggctccccaacctctaccgaggagggcacctctgagtccgccacccccgagagcggccctggcacctccaccgagcccagcgagggcagcgcacccggcagccctgccggcagccccacctccacagaggagggaaccagcaccgagcccagcgaaggcagcgccccaggcaccagcaccgagcctagtgagcaggagattaaacggatcaacaagatcagaagaagacttgtgaaagacagcaacaccaagaaggccggcaagacaggccccatgaaaaccctgctggttagagtgatgacacccgatctgagagagcggctggaaaacctgagaaagaagcctgaaaatatcccccagcccatcagcaatacatctagagccaacctgaataagctgctgaccgattacaccgaaatgaagaaggcgatcctgcatgtgtactgggaagagttccagaaggaccctgtgggcctgatgagccgggtggcccagcctgccagcaagaagatcgatcagaacaagctgaaacctgagatggacgagaagggcaacctgaccaccgccggctttgcctgctctcagtgtggccagcccctgttcgtgtacaagctggagcaggtgtctgagaagggcaaggcttacaccaactacttcggacggtgcaatgtggccgagcacgaaaagctgatcctgctggcccagctgaagcccgagaaggatagcgacgaagccgtgacatatagcctgggaaagtttgggcagagggccctggatttctacagcattcatgtgaccaaggagtccacccaccccgtgaagcccctggcccagatcgccggaaacagatacgcctccggacctgtgggaaaggccctgagcgacgcatgtatgggcacaatcgcctccttcctgtctaagtaccaggacatcatcatcgaacaccagaaggtggtgaagggcaaccagaagagactggagagcctgcgggagctggccggcaaggaaaacctggaataccctagcgtgaccctgccacctcagcctcacaccaaggagggcgttgatgcctacaacgaagtgatcgcccgggtgcgaatgtgggtgaacctgaacctgtggcagaagctgaagctaagcagagatgatgccaagcctctgctgagactgaagggattcccttcctttcctctggtcgagagacaggccaacgaagtggactggtgggacatggtgtgtaacgtgaagaagctgatcaacgagaaaaaggaggatggcaaggtgttttggcagaatctggctggctacaagagacaggaagccctgagaccatacctgagcagcgaggaagatcggaagaagggaaagaaattcgctcggtaccagctgggcgacctgctgctgcacctggaaaagaagcacggcgaggactggggaaaggtgtacgacgaggcctgggagcggattgacaagaaagtggaaggcctgagcaagcacatcaagctggaagaggaacggagaagcgaggacgcccagagcaaggccgccctgaccgactggctgcgggctaaggccagcttcgtgatcgagggcctgaaggaggccgacaaggacgagttctgcagatgcgagctgaagctgcagaagtggtacggggacctgcggggaaagcccttcgccatcgaagccgagaacagcatcctggacatcagcggcttcagcaagcagtacaactgtgccttcatctggcagaaggacggcgtgaagaagctgaacctgtacctgatcatcaactacttcaagggcggcaagctgcggttcaagaagatcaaacctgaagccttcgaagccaacagattctacaccgtgatcaacaaaaagagcggcgagatcgtgcccatggaggtgaacttcaacttcgacgaccccaacctgatcatcctgcctctggcctttggcaagagacagggcagagaattcatctggaacgacctgctgtccctggaaaccggcagcctgaagctggccaacggaagagtgatcgagaagacactgtacaacagaagaacccggcaggatgagcctgccctgttcgtggccctgaccttcgagcggcgggaggtcctggactcctccaatatcaaaccaatgaacctgatcggcgtggcaagaggcgaaaacatccccgccgtgatcgccctgaccgaccccgagggctgcccactgagccggtttaaggatagcctgggaaacccaacccacatcctgagaatcggcgagagctataaggagaagcagcggaccatccaggccaagaaggaggtggagcagcggagagccggcggctacagccggaagtacgccagcaaagccaagaatctggcagacgatatggtgagaaacaccgctagagatctgctgtactacgccgtgacccaggatgccatgctgatcttcgccaacctgagccggggcttcggccggcagggcaagcggaccttcatggccgagagacagtacacacggatggaggactggctgaccgccaagctggcctacgagggcctgagcaagacctacctgtccaagacactggcccagtacacctccaagacatgcagcaactgtgggtttaccatcaccagcgccgactacgacagggtgctggagaagctgaagaagacagcaacaggctggatgaccacaattaacggcaaggagctgaaggtggagggccagattacctactacaacagatacaagagacagaacgtagtcaaggacctgtccgtcgagctggatagactgagcgaagaatctgtgaacaacgacatctcctcctggacaaagggcagaagcggagaagctctgagcctcctgaagaaaagattctcccatagacccgtgcaggagaagttcgtgtgcctgaactgcggcttcgagacacacgcagccgagcaagccgccctgaacatcgccagatcctggctgttcctgcggagccaggagtacaagaaataccagacaaacaagacaaccggcaacaccgataagagagccttcgtcgagacctggcagtccttttaccggaagaagcttaaggaggtgtggaaacctgccgtgcggtctggcggatctggcggaggctccaccagccccaagaaaaagagaaaagtctaagctgccttctgcggggcttgccttctggccatgcccttcttctctcccttgcacctgtacctcttggtctttgaataaagcctgagtaggaaggctagcaaaaaaaaaaaaaaaaaaaaaaaaaaaaaaaaaaaaaaaaaaaaaaaaaaaaaaaaaaaaaaaaaaaaaaaaaaaaaaaa

SEQ ID NO: 12445 - RNA, 5785 nt, synthetic construct
  source 1..5785: mol_type = other RNA
aggaaataagagagaaaagaagagtaagaagaaatataagagccaccatggcccctaagaagaagcgtaaagtgagccggatggaacgcctcgtctacgaggtgcggcagaagtgcagaaacatcgaggacatctgcatctcctgcggatctctgaacgtgaccctggagcacccactgttcatcggcggcatgtgccagaactgtaaaaactgttttctggagtgtgcctatcaatacgacgatgacggctaccagagctactgcaccatctgttgcggcggaagagaggtgctgatgtgtggaaataacaactgctgccggtgcttctgcgtggaatgcgtggacctgctggtgggccccggcgccgcccaggccgctattaaggaagatccttggaactgctacatgtgcggccacaagggcacatacggcctgctgagacggagagaggactggcctagcagactgcagatgttcttcgccaataaccacgaccaggagttcgacccccctaaggtgtaccctcccgtccccgccgagaagagaaagcccatccgggtcctgagcctgttcgatggcatcgccaccggtctgctggtgctgaaggacctgggcatccaggtggataggtacattgcctccgaggtgtgcgaggactccatcaccgtgggaatggtgcgtcatcagggcaagatcatgtacgtgggcgacgtgcggagcgtgacacagaagcatatccaggagtggggccctttcgacctggtgatcggcggcagcccttgcaatgacctgagcatcgtgaacccagcccggaagggcctgtacgagggaaccggcagactgttcttcgagttttacagactgctgcacgacgcccggcctaaggaaggcgacgaccggcccttcttttggctgttcgagaatgtggtggccatgggagtcagcgacaagcgggatattagccggttcctggagagcaaccccgtgatgatcgatgccaaggaagtgagcgccgcccaccgggccagatacttctggggcaatctgcctggcatgaacagacccctggccagcaccgtgaacgacaagctggagctgcaggagtgcctggagcacggccggatcgccaagttcagcaaggtgagaaccatcaccacccgaagcaacagcatcaaacaaggcaaggaccagcactttcctgtgttcatgaacgagaaggaggacatcctgtggtgtaccgagatggagagagtgttcgggttcccagtccactacacagatgtcagcaacatgtctagactggccagacagagactgctgggaagaagctggtccgtccctgtgatcagacacctgttcgcccctctgaaggagtacttcgcctgcgtgagcagcggcaacagcaacgccaacagccggggccccagcttctctagcggcctggtgccactgtccctgagagggagccacatgggccccatggagatctacaaaaccgtgagcgcctggaagcggcagcctgtgcgcgtgctgagcctgtttcggaatatcgataaagtcctgaaaagcctgggattcctggagagcggctctggctccggcggtggcaccctgaagtacgtggaggatgtgacaaacgtggtcagacgggatgtggagaagtggggccccttcgatctggtgtacggcagcacccaacccctgggcagctcttgtgaccggtgccctggctggtacatgtttcagttccaccggatcctgcagtacgccctgccgagacaggagtcccagcggccattcttttggattttcatggacaacttgctgctgaccgaggatgaccaggaaactaccactcggttcctgcagaccgaagccgtgaccctgcaggacgtgagaggccgggactaccagaacgccatgcgggtgtggtccaacatccctggactgaaaagcaagcacgcacctctgacccctaaagaagaggagtacctgcaggcccaggtgcggagcagaagcaagctggacgcccctaaggtggatctgctggtgaagaattgcctcctgcccctgagagagtacttcaagtatttcagccagaatagtctgcccctgggaggcagcggcggcggcgcccagggccccgtgaccttcgaggacgtggccgtgtacttcagcgccgaggagtggcaggagctggccggctggcagagggagctgtacagggacgtgatgatggacacctacgagctggtggccagcctgggccccgccggcctgaagcccgaggtggtgagcaagctggagaggggcgaggagccccaccagcccgccaggagcagggagagccccagggcccccctgcccgtgctgctgggcggcccaagcagcggcgcccctcctcccagcggcggcagcccagccggctccccaacctctaccgaggagggcacctctgagtccgccacccccgagagcggccctggcacctccaccgagcccagcgagggcagcgcacccggcagccctgccggcagccccacctccacagaggagggaaccagcaccgagcccagcgaaggcagcgccccaggcaccagcaccgagcctagtgagcaggagattaaacggatcaacaagatcagaagaagacttgtgaaagacagcaacaccaagaaggccggcaagacaggccccatgaaaaccctgctggttagagtgatgacacccgatctgagagagcggctggaaaacctgagaaagaagcctgaaaatatcccccagcccatcagcaatacatctagagccaacctgaataagctgctgaccgattacaccgaaatgaagaaggcgatcctgcatgtgtactgggaagagttccagaaggaccctgtgggcctgatgagccgggtggcccagcctgccagcaagaagatcgatcagaacaagctgaaacctgagatggacgagaagggcaacctgaccaccgccggctttgcctgctctcagtgtggccagcccctgttcgtgtacaagctggagcaggtgtctgagaagggcaaggcttacaccaactacttcggacggtgcaatgtggccgagcacgaaaagctgatcctgctggcccagctgaagcccgagaaggatagcgacgaagccgtgacatatagcctgggaaagtttgggcagagggccctggatttctacagcattcatgtgaccaaggagtccacccaccccgtgaagcccctggcccagatcgccggaaacagatacgcctccggacctgtgggaaaggccctgagcgacgcatgtatgggcacaatcgcctccttcctgtctaagtaccaggacatcatcatcgaacaccagaaggtggtgaagggcaaccagaagagactggagagcctgcgggagctggccggcaaggaaaacctggaataccctagcgtgaccctgccacctcagcctcacaccaaggagggcgttgatgcctacaacgaagtgatcgcccgggtgcgaatgtgggtgaacctgaacctgtggcagaagctgaagctaagcagagatgatgccaagcctctgctgagactgaagggattcccttcctttcctctggtcgagagacaggccaacgaagtggactggtgggacatggtgtgtaacgtgaagaagctgatcaacgagaaaaaggaggatggcaaggtgttttggcagaatctggctggctacaagagacaggaagccctgagaccatacctgagcagcgaggaagatcggaagaagggaaagaaattcgctcggtaccagctgggcgacctgctgctgcacctggaaaagaagcacggcgaggactggggaaaggtgtacgacgaggcctgggagcggattgacaagaaagtggaaggcctgagcaagcacatcaagctggaagaggaacggagaagcgaggacgcccagagcaaggccgccctgaccgactggctgcgggctaaggccagcttcgtgatcgagggcctgaaggaggccgacaaggacgagttctgcagatgcgagctgaagctgcagaagtggtacggggacctgcggggaaagcccttcgccatcgaagccgagaacagcatcctggacatcagcggcttcagcaagcagtacaactgtgccttcatctggcagaaggacggcgtgaagaagctgaacctgtacctgatcatcaactacttcaagggcggcaagctgcggttcaagaagatcaaacctgaagccttcgaagccaacagattctacaccgtgatcaacaaaaagagcggcgagatcgtgcccatggaggtgaacttcaacttcgacgaccccaacctgatcatcctgcctctggcctttggcaagagacagggcagagaattcatctggaacgacctgctgtccctggaaaccggcagcctgaagctggccaacggaagagtgatcgagaagacactgtacaacagaagaacccggcaggatgagcctgccctgttcgtggccctgaccttcgagcggcgggaggtcctggactcctccaatatcaaaccaatgaacctgatcggcgtggcaagaggcgaaaacatccccgccgtgatcgccctgaccgaccccgagggctgcccactgagccggtttaaggatagcctgggaaacccaacccacatcctgagaatcggcgagagctataaggagaagcagcggaccatccaggccaagaaggaggtggagcagcggagagccggcggctacagccggaagtacgccagcaaagccaagaatctggcagacgatatggtgagaaacaccgctagagatctgctgtactacgccgtgacccaggatgccatgctgatcttcgccaacctgagccggggcttcggccggcagggcaagcggaccttcatggccgagagacagtacacacggatggaggactggctgaccgccaagctggcctacgagggcctgagcaagacctacctgtccaagacactggcccagtacacctccaagacatgcagcaactgtgggtttaccatcaccagcgccgactacgacagggtgctggagaagctgaagaagacagcaacaggctggatgaccacaattaacggcaaggagctgaaggtggagggccagattacctactacaacagatacaagagacagaacgtagtcaaggacctgtccgtcgagctggatagactgagcgaagaatctgtgaacaacgacatctcctcctggacaaagggcagaagcggagaagctctgagcctcctgaagaaaagattctcccatagacccgtgcaggagaagttcgtgtgcctgaactgcggcttcgagacacacgcagccgagcaagccgccctgaacatcgccagatcctggctgttcctgcggagccaggagtacaagaaataccagacaaacaagacaaccggcaacaccgataagagagccttcgtcgagacctggcagtccttttaccggaagaagcttaaggaggtgtggaaacctgccgtgcggtctggcggatctggcggaggctccaccagccccaagaaaaagagaaaagtctaagctgccttctgcggggcttgccttctggccatgcccttcttctctcccttgcacctgtacctcttggtctttgaataaagcctgagtaggaaggctagcaaaaaaaaaaaaaaaaaaaaaaaaaaaaaaaaaaaaaaaaaaaaaaaaaaaaaaaaaaaaaaaaaaaaaaaaaaaaaaaa

SEQ ID NO: 12446 - RNA, 5785 nt, synthetic construct
  source 1..5785: mol_type = other RNA
aggaaataagagagaaaagaagagtaagaagaaatataagagccaccatggcccctaagaagaagcgtaaagtgagccggatggaacgcctcgtctacgaggtgcggcagaagtgcagaaacatcgaggacatctgcatctcctgcggatctctgaacgtgaccctggagcacccactgttcatcggcggcatgtgccagaactgtaaaaactgttttctggagtgtgcctatcaatacgacgatgacggctaccagagctactgcaccatctgttgcggcggaagagaggtgctgatgtgtggaaataacaactgctgccggtgcttctgcgtggaatgcgtggacctgctggtgggccccggcgccgcccaggccgctattaaggaagatccttggaactgctacatgtgcggccacaagggcacatacggcctgctgagacggagagaggactggcctagcagactgcagatgttcttcgccaataaccacgaccaggagttcgacccccctaaggtgtaccctcccgtccccgccgagaagagaaagcccatccgggtcctgagcctgttcgatggcatcgccaccggtctgctggtgctgaaggacctgggcatccaggtggataggtacattgcctccgaggtgtgcgaggactccatcaccgtgggaatggtgcgtcatcagggcaagatcatgtacgtgggcgacgtgcggagcgtgacacagaagcatatccaggagtggggccctttcgacctggtgatcggcggcagcccttgcaatgacctgagcatcgtgaacccagcccggaagggcctgtacgagggaaccggcagactgttcttcgagttttacagactgctgcacgacgcccggcctaaggaaggcgacgaccggcccttcttttggctgttcgagaatgtggtggccatgggagtcagcgacaagcgggatattagccggttcctggagagcaaccccgtgatgatcgatgccaaggaagtgagcgccgcccaccgggccagatacttctggggcaatctgcctggcatgaacagacccctggccagcaccgtgaacgacaagctggagctgcaggagtgcctggagcacggccggatcgccaagttcagcaaggtgagaaccatcaccacccgaagcaacagcatcaaacaaggcaaggaccagcactttcctgtgttcatgaacgagaaggaggacatcctgtggtgtaccgagatggagagagtgttcgggttcccagtccactacacagatgtcagcaacatgtctagactggccagacagagactgctgggaagaagctggtccgtccctgtgatcagacacctgttcgcccctctgaaggagtacttcgcctgcgtgagcagcggcaacagcaacgccaacagccggggccccagcttctctagcggcctggtgccactgtccctgagagggagccacatgggccccatggagatctacaaaaccgtgagcgcctggaagcggcagcctgtgcgcgtgctgagcctgtttcggaatatcgataaagtcctgaaaagcctgggattcctggagagcggctctggctccggcggtggcaccctgaagtacgtggaggatgtgacaaacgtggtcagacgggatgtggagaagtggggccccttcgatctggtgtacggcagcacccaacccctgggcagctcttgtgaccggtgccctggctggtacatgtttcagttccaccggatcctgcagtacgccctgccgagacaggagtcccagcggccattcttttggattttcatggacaacttgctgctgaccgaggatgaccaggaaactaccactcggttcctgcagaccgaagccgtgaccctgcaggacgtgagaggccgggactaccagaacgccatgcgggtgtggtccaacatccctggactgaaaagcaagcacgcacctctgacccctaaagaagaggagtacctgcaggcccaggtgcggagcagaagcaagctggacgcccctaaggtggatctgctggtgaagaattgcctcctgcccctgagagagtacttcaagtatttcagccagaatagtctgcccctgggaggcagcggcggcggcaagaccgcccccgtgaccttcgacgacgtggccgtgtacttcagcgccgaggagtgggaggagctggccgagtggcagaaggagctgtacaaggacgtgatgagggacaactacgaggccctgatcagcctgggccacgccgccgccaagcccgacatcatccagctgctggagcacggcgaggagccctgcgtgaagggccacaaggacagcggcaacggcaaggccttcaacttcatcagcggcggcccaagcagcggcgcccctcctcccagcggcggcagcccagccggctccccaacctctaccgaggagggcacctctgagtccgccacccccgagagcggccctggcacctccaccgagcccagcgagggcagcgcacccggcagccctgccggcagccccacctccacagaggagggaaccagcaccgagcccagcgaaggcagcgccccaggcaccagcaccgagcctagtgagcaggagattaaacggatcaacaagatcagaagaagacttgtgaaagacagcaacaccaagaaggccggcaagacaggccccatgaaaaccctgctggttagagtgatgacacccgatctgagagagcggctggaaaacctgagaaagaagcctgaaaatatcccccagcccatcagcaatacatctagagccaacctgaataagctgctgaccgattacaccgaaatgaagaaggcgatcctgcatgtgtactgggaagagttccagaaggaccctgtgggcctgatgagccgggtggcccagcctgccagcaagaagatcgatcagaacaagctgaaacctgagatggacgagaagggcaacctgaccaccgccggctttgcctgctctcagtgtggccagcccctgttcgtgtacaagctggagcaggtgtctgagaagggcaaggcttacaccaactacttcggacggtgcaatgtggccgagcacgaaaagctgatcctgctggcccagctgaagcccgagaaggatagcgacgaagccgtgacatatagcctgggaaagtttgggcagagggccctggatttctacagcattcatgtgaccaaggagtccacccaccccgtgaagcccctggcccagatcgccggaaacagatacgcctccggacctgtgggaaaggccctgagcgacgcatgtatgggcacaatcgcctccttcctgtctaagtaccaggacatcatcatcgaacaccagaaggtggtgaagggcaaccagaagagactggagagcctgcgggagctggccggcaaggaaaacctggaataccctagcgtgaccctgccacctcagcctcacaccaaggagggcgttgatgcctacaacgaagtgatcgcccgggtgcgaatgtgggtgaacctgaacctgtggcagaagctgaagctaagcagagatgatgccaagcctctgctgagactgaagggattcccttcctttcctctggtcgagagacaggccaacgaagtggactggtgggacatggtgtgtaacgtgaagaagctgatcaacgagaaaaaggaggatggcaaggtgttttggcagaatctggctggctacaagagacaggaagccctgagaccatacctgagcagcgaggaagatcggaagaagggaaagaaattcgctcggtaccagctgggcgacctgctgctgcacctggaaaagaagcacggcgaggactggggaaaggtgtacgacgaggcctgggagcggattgacaagaaagtggaaggcctgagcaagcacatcaagctggaagaggaacggagaagcgaggacgcccagagcaaggccgccctgaccgactggctgcgggctaaggccagcttcgtgatcgagggcctgaaggaggccgacaaggacgagttctgcagatgcgagctgaagctgcagaagtggtacggggacctgcggggaaagcccttcgccatcgaagccgagaacagcatcctggacatcagcggcttcagcaagcagtacaactgtgccttcatctggcagaaggacggcgtgaagaagctgaacctgtacctgatcatcaactacttcaagggcggcaagctgcggttcaagaagatcaaacctgaagccttcgaagccaacagattctacaccgtgatcaacaaaaagagcggcgagatcgtgcccatggaggtgaacttcaacttcgacgaccccaacctgatcatcctgcctctggcctttggcaagagacagggcagagaattcatctggaacgacctgctgtccctggaaaccggcagcctgaagctggccaacggaagagtgatcgagaagacactgtacaacagaagaacccggcaggatgagcctgccctgttcgtggccctgaccttcgagcggcgggaggtcctggactcctccaatatcaaaccaatgaacctgatcggcgtggcaagaggcgaaaacatccccgccgtgatcgccctgaccgaccccgagggctgcccactgagccggtttaaggatagcctgggaaacccaacccacatcctgagaatcggcgagagctataaggagaagcagcggaccatccaggccaagaaggaggtggagcagcggagagccggcggctacagccggaagtacgccagcaaagccaagaatctggcagacgatatggtgagaaacaccgctagagatctgctgtactacgccgtgacccaggatgccatgctgatcttcgccaacctgagccggggcttcggccggcagggcaagcggaccttcatggccgagagacagtacacacggatggaggactggctgaccgccaagctggcctacgagggcctgagcaagacctacctgtccaagacactggcccagtacacctccaagacatgcagcaactgtgggtttaccatcaccagcgccgactacgacagggtgctggagaagctgaagaagacagcaacaggctggatgaccacaattaacggcaaggagctgaaggtggagggccagattacctactacaacagatacaagagacagaacgtagtcaaggacctgtccgtcgagctggatagactgagcgaagaatctgtgaacaacgacatctcctcctggacaaagggcagaagcggagaagctctgagcctcctgaagaaaagattctcccatagacccgtgcaggagaagttcgtgtgcctgaactgcggcttcgagacacacgcagccgagcaagccgccctgaacatcgccagatcctggctgttcctgcggagccaggagtacaagaaataccagacaaacaagacaaccggcaacaccgataagagagccttcgtcgagacctggcagtccttttaccggaagaagcttaaggaggtgtggaaacctgccgtgcggtctggcggatctggcggaggctccaccagccccaagaaaaagagaaaagtctaagctgccttctgcggggcttgccttctggccatgcccttcttctctcccttgcacctgtacctcttggtctttgaataaagcctgagtaggaaggctagcaaaaaaaaaaaaaaaaaaaaaaaaaaaaaaaaaaaaaaaaaaaaaaaaaaaaaaaaaaaaaaaaaaaaaaaaaaaaaaaa

SEQ ID NO: 12447 - RNA, 5785 nt, synthetic construct
  source 1..5785: mol_type = other RNA
aggaaataagagagaaaagaagagtaagaagaaatataagagccaccatggcccctaagaagaagcgtaaagtgagccggatggaacgcctcgtctacgaggtgcggcagaagtgcagaaacatcgaggacatctgcatctcctgcggatctctgaacgtgaccctggagcacccactgttcatcggcggcatgtgccagaactgtaaaaactgttttctggagtgtgcctatcaatacgacgatgacggctaccagagctactgcaccatctgttgcggcggaagagaggtgctgatgtgtggaaataacaactgctgccggtgcttctgcgtggaatgcgtggacctgctggtgggccccggcgccgcccaggccgctattaaggaagatccttggaactgctacatgtgcggccacaagggcacatacggcctgctgagacggagagaggactggcctagcagactgcagatgttcttcgccaataaccacgaccaggagttcgacccccctaaggtgtaccctcccgtccccgccgagaagagaaagcccatccgggtcctgagcctgttcgatggcatcgccaccggtctgctggtgctgaaggacctgggcatccaggtggataggtacattgcctccgaggtgtgcgaggactccatcaccgtgggaatggtgcgtcatcagggcaagatcatgtacgtgggcgacgtgcggagcgtgacacagaagcatatccaggagtggggccctttcgacctggtgatcggcggcagcccttgcaatgacctgagcatcgtgaacccagcccggaagggcctgtacgagggaaccggcagactgttcttcgagttttacagactgctgcacgacgcccggcctaaggaaggcgacgaccggcccttcttttggctgttcgagaatgtggtggccatgggagtcagcgacaagcgggatattagccggttcctggagagcaaccccgtgatgatcgatgccaaggaagtgagcgccgcccaccgggccagatacttctggggcaatctgcctggcatgaacagacccctggccagcaccgtgaacgacaagctggagctgcaggagtgcctggagcacggccggatcgccaagttcagcaaggtgagaaccatcaccacccgaagcaacagcatcaaacaaggcaaggaccagcactttcctgtgttcatgaacgagaaggaggacatcctgtggtgtaccgagatggagagagtgttcgggttcccagtccactacacagatgtcagcaacatgtctagactggccagacagagactgctgggaagaagctggtccgtccctgtgatcagacacctgttcgcccctctgaaggagtacttcgcctgcgtgagcagcggcaacagcaacgccaacagccggggccccagcttctctagcggcctggtgccactgtccctgagagggagccacatgggccccatggagatctacaaaaccgtgagcgcctggaagcggcagcctgtgcgcgtgctgagcctgtttcggaatatcgataaagtcctgaaaagcctgggattcctggagagcggctctggctccggcggtggcaccctgaagtacgtggaggatgtgacaaacgtggtcagacgggatgtggagaagtggggccccttcgatctggtgtacggcagcacccaacccctgggcagctcttgtgaccggtgccctggctggtacatgtttcagttccaccggatcctgcagtacgccctgccgagacaggagtcccagcggccattcttttggattttcatggacaacttgctgctgaccgaggatgaccaggaaactaccactcggttcctgcagaccgaagccgtgaccctgcaggacgtgagaggccgggactaccagaacgccatgcgggtgtggtccaacatccctggactgaaaagcaagcacgcacctctgacccctaaagaagaggagtacctgcaggcccaggtgcggagcagaagcaagctggacgcccctaaggtggatctgctggtgaagaattgcctcctgcccctgagagagtacttcaagtatttcagccagaatagtctgcccctgggaggcagcggcggcggcatggccgtggacctgctgagcgcccaggagagggtgaccttcagggacgtggccgtgttcttcagccaggacgagtggctgcacctggacagcgcccagagggccctgtacagggaggtgatgctggagaactacagcatcctggtgagcctgggcatccccttcagcatgcccaagctgatccaccagctgcagcagggcgaggacccctgcatggtggagagggaggtgcccagcgacaccggcggcccaagcagcggcgcccctcctcccagcggcggcagcccagccggctccccaacctctaccgaggagggcacctctgagtccgccacccccgagagcggccctggcacctccaccgagcccagcgagggcagcgcacccggcagccctgccggcagccccacctccacagaggagggaaccagcaccgagcccagcgaaggcagcgccccaggcaccagcaccgagcctagtgagcaggagattaaacggatcaacaagatcagaagaagacttgtgaaagacagcaacaccaagaaggccggcaagacaggccccatgaaaaccctgctggttagagtgatgacacccgatctgagagagcggctggaaaacctgagaaagaagcctgaaaatatcccccagcccatcagcaatacatctagagccaacctgaataagctgctgaccgattacaccgaaatgaagaaggcgatcctgcatgtgtactgggaagagttccagaaggaccctgtgggcctgatgagccgggtggcccagcctgccagcaagaagatcgatcagaacaagctgaaacctgagatggacgagaagggcaacctgaccaccgccggctttgcctgctctcagtgtggccagcccctgttcgtgtacaagctggagcaggtgtctgagaagggcaaggcttacaccaactacttcggacggtgcaatgtggccgagcacgaaaagctgatcctgctggcccagctgaagcccgagaaggatagcgacgaagccgtgacatatagcctgggaaagtttgggcagagggccctggatttctacagcattcatgtgaccaaggagtccacccaccccgtgaagcccctggcccagatcgccggaaacagatacgcctccggacctgtgggaaaggccctgagcgacgcatgtatgggcacaatcgcctccttcctgtctaagtaccaggacatcatcatcgaacaccagaaggtggtgaagggcaaccagaagagactggagagcctgcgggagctggccggcaaggaaaacctggaataccctagcgtgaccctgccacctcagcctcacaccaaggagggcgttgatgcctacaacgaagtgatcgcccgggtgcgaatgtgggtgaacctgaacctgtggcagaagctgaagctaagcagagatgatgccaagcctctgctgagactgaagggattcccttcctttcctctggtcgagagacaggccaacgaagtggactggtgggacatggtgtgtaacgtgaagaagctgatcaacgagaaaaaggaggatggcaaggtgttttggcagaatctggctggctacaagagacaggaagccctgagaccatacctgagcagcgaggaagatcggaagaagggaaagaaattcgctcggtaccagctgggcgacctgctgctgcacctggaaaagaagcacggcgaggactggggaaaggtgtacgacgaggcctgggagcggattgacaagaaagtggaaggcctgagcaagcacatcaagctggaagaggaacggagaagcgaggacgcccagagcaaggccgccctgaccgactggctgcgggctaaggccagcttcgtgatcgagggcctgaaggaggccgacaaggacgagttctgcagatgcgagctgaagctgcagaagtggtacggggacctgcggggaaagcccttcgccatcgaagccgagaacagcatcctggacatcagcggcttcagcaagcagtacaactgtgccttcatctggcagaaggacggcgtgaagaagctgaacctgtacctgatcatcaactacttcaagggcggcaagctgcggttcaagaagatcaaacctgaagccttcgaagccaacagattctacaccgtgatcaacaaaaagagcggcgagatcgtgcccatggaggtgaacttcaacttcgacgaccccaacctgatcatcctgcctctggcctttggcaagagacagggcagagaattcatctggaacgacctgctgtccctggaaaccggcagcctgaagctggccaacggaagagtgatcgagaagacactgtacaacagaagaacccggcaggatgagcctgccctgttcgtggccctgaccttcgagcggcgggaggtcctggactcctccaatatcaaaccaatgaacctgatcggcgtggcaagaggcgaaaacatccccgccgtgatcgccctgaccgaccccgagggctgcccactgagccggtttaaggatagcctgggaaacccaacccacatcctgagaatcggcgagagctataaggagaagcagcggaccatccaggccaagaaggaggtggagcagcggagagccggcggctacagccggaagtacgccagcaaagccaagaatctggcagacgatatggtgagaaacaccgctagagatctgctgtactacgccgtgacccaggatgccatgctgatcttcgccaacctgagccggggcttcggccggcagggcaagcggaccttcatggccgagagacagtacacacggatggaggactggctgaccgccaagctggcctacgagggcctgagcaagacctacctgtccaagacactggcccagtacacctccaagacatgcagcaactgtgggtttaccatcaccagcgccgactacgacagggtgctggagaagctgaagaagacagcaacaggctggatgaccacaattaacggcaaggagctgaaggtggagggccagattacctactacaacagatacaagagacagaacgtagtcaaggacctgtccgtcgagctggatagactgagcgaagaatctgtgaacaacgacatctcctcctggacaaagggcagaagcggagaagctctgagcctcctgaagaaaagattctcccatagacccgtgcaggagaagttcgtgtgcctgaactgcggcttcgagacacacgcagccgagcaagccgccctgaacatcgccagatcctggctgttcctgcggagccaggagtacaagaaataccagacaaacaagacaaccggcaacaccgataagagagccttcgtcgagacctggcagtccttttaccggaagaagcttaaggaggtgtggaaacctgccgtgcggtctggcggatctggcggaggctccaccagccccaagaaaaagagaaaagtctaagctgccttctgcggggcttgccttctggccatgcccttcttctctcccttgcacctgtacctcttggtctttgaataaagcctgagtaggaaggctagcaaaaaaaaaaaaaaaaaaaaaaaaaaaaaaaaaaaaaaaaaaaaaaaaaaaaaaaaaaaaaaaaaaaaaaaaaaaaaaaa

SEQ ID NO: 12448 - RNA, 5785 nt, synthetic construct
  source 1..5785: mol_type = other RNA
aggaaataagagagaaaagaagagtaagaagaaatataagagccaccatggcccctaagaagaagcgtaaagtgagccggatggaacgcctcgtctacgaggtgcggcagaagtgcagaaacatcgaggacatctgcatctcctgcggatctctgaacgtgaccctggagcacccactgttcatcggcggcatgtgccagaactgtaaaaactgttttctggagtgtgcctatcaatacgacgatgacggctaccagagctactgcaccatctgttgcggcggaagagaggtgctgatgtgtggaaataacaactgctgccggtgcttctgcgtggaatgcgtggacctgctggtgggccccggcgccgcccaggccgctattaaggaagatccttggaactgctacatgtgcggccacaagggcacatacggcctgctgagacggagagaggactggcctagcagactgcagatgttcttcgccaataaccacgaccaggagttcgacccccctaaggtgtaccctcccgtccccgccgagaagagaaagcccatccgggtcctgagcctgttcgatggcatcgccaccggtctgctggtgctgaaggacctgggcatccaggtggataggtacattgcctccgaggtgtgcgaggactccatcaccgtgggaatggtgcgtcatcagggcaagatcatgtacgtgggcgacgtgcggagcgtgacacagaagcatatccaggagtggggccctttcgacctggtgatcggcggcagcccttgcaatgacctgagcatcgtgaacccagcccggaagggcctgtacgagggaaccggcagactgttcttcgagttttacagactgctgcacgacgcccggcctaaggaaggcgacgaccggcccttcttttggctgttcgagaatgtggtggccatgggagtcagcgacaagcgggatattagccggttcctggagagcaaccccgtgatgatcgatgccaaggaagtgagcgccgcccaccgggccagatacttctggggcaatctgcctggcatgaacagacccctggccagcaccgtgaacgacaagctggagctgcaggagtgcctggagcacggccggatcgccaagttcagcaaggtgagaaccatcaccacccgaagcaacagcatcaaacaaggcaaggaccagcactttcctgtgttcatgaacgagaaggaggacatcctgtggtgtaccgagatggagagagtgttcgggttcccagtccactacacagatgtcagcaacatgtctagactggccagacagagactgctgggaagaagctggtccgtccctgtgatcagacacctgttcgcccctctgaaggagtacttcgcctgcgtgagcagcggcaacagcaacgccaacagccggggccccagcttctctagcggcctggtgccactgtccctgagagggagccacatgggccccatggagatctacaaaaccgtgagcgcctggaagcggcagcctgtgcgcgtgctgagcctgtttcggaatatcgataaagtcctgaaaagcctgggattcctggagagcggctctggctccggcggtggcaccctgaagtacgtggaggatgtgacaaacgtggtcagacgggatgtggagaagtggggccccttcgatctggtgtacggcagcacccaacccctgggcagctcttgtgaccggtgccctggctggtacatgtttcagttccaccggatcctgcagtacgccctgccgagacaggagtcccagcggccattcttttggattttcatggacaacttgctgctgaccgaggatgaccaggaaactaccactcggttcctgcagaccgaagccgtgaccctgcaggacgtgagaggccgggactaccagaacgccatgcgggtgtggtccaacatccctggactgaaaagcaagcacgcacctctgacccctaaagaagaggagtacctgcaggcccaggtgcggagcagaagcaagctggacgcccctaaggtggatctgctggtgaagaattgcctcctgcccctgagagagtacttcaagtatttcagccagaatagtctgcccctgggaggcagcggcggcggcccccaggagctggtgaccttcgaggacgtggccgtgtacctgaccaaggaggagtgggagcacctgggccccgcccagaggaggctgtacagggacgtgatgctggagaactacgagaacgtggtgagcctgggcttccccgtgagcaagcccgacctgatcagccagctggagcagggcgaggtgccctgcctgcccgacctgcccaggaccgaggtgcccgagatccacggcggccccctgggcggcccaagcagcggcgcccctcctcccagcggcggcagcccagccggctccccaacctctaccgaggagggcacctctgagtccgccacccccgagagcggccctggcacctccaccgagcccagcgagggcagcgcacccggcagccctgccggcagccccacctccacagaggagggaaccagcaccgagcccagcgaaggcagcgccccaggcaccagcaccgagcctagtgagcaggagattaaacggatcaacaagatcagaagaagacttgtgaaagacagcaacaccaagaaggccggcaagacaggccccatgaaaaccctgctggttagagtgatgacacccgatctgagagagcggctggaaaacctgagaaagaagcctgaaaatatcccccagcccatcagcaatacatctagagccaacctgaataagctgctgaccgattacaccgaaatgaagaaggcgatcctgcatgtgtactgggaagagttccagaaggaccctgtgggcctgatgagccgggtggcccagcctgccagcaagaagatcgatcagaacaagctgaaacctgagatggacgagaagggcaacctgaccaccgccggctttgcctgctctcagtgtggccagcccctgttcgtgtacaagctggagcaggtgtctgagaagggcaaggcttacaccaactacttcggacggtgcaatgtggccgagcacgaaaagctgatcctgctggcccagctgaagcccgagaaggatagcgacgaagccgtgacatatagcctgggaaagtttgggcagagggccctggatttctacagcattcatgtgaccaaggagtccacccaccccgtgaagcccctggcccagatcgccggaaacagatacgcctccggacctgtgggaaaggccctgagcgacgcatgtatgggcacaatcgcctccttcctgtctaagtaccaggacatcatcatcgaacaccagaaggtggtgaagggcaaccagaagagactggagagcctgcgggagctggccggcaaggaaaacctggaataccctagcgtgaccctgccacctcagcctcacaccaaggagggcgttgatgcctacaacgaagtgatcgcccgggtgcgaatgtgggtgaacctgaacctgtggcagaagctgaagctaagcagagatgatgccaagcctctgctgagactgaagggattcccttcctttcctctggtcgagagacaggccaacgaagtggactggtgggacatggtgtgtaacgtgaagaagctgatcaacgagaaaaaggaggatggcaaggtgttttggcagaatctggctggctacaagagacaggaagccctgagaccatacctgagcagcgaggaagatcggaagaagggaaagaaattcgctcggtaccagctgggcgacctgctgctgcacctggaaaagaagcacggcgaggactggggaaaggtgtacgacgaggcctgggagcggattgacaagaaagtggaaggcctgagcaagcacatcaagctggaagaggaacggagaagcgaggacgcccagagcaaggccgccctgaccgactggctgcgggctaaggccagcttcgtgatcgagggcctgaaggaggccgacaaggacgagttctgcagatgcgagctgaagctgcagaagtggtacggggacctgcggggaaagcccttcgccatcgaagccgagaacagcatcctggacatcagcggcttcagcaagcagtacaactgtgccttcatctggcagaaggacggcgtgaagaagctgaacctgtacctgatcatcaactacttcaagggcggcaagctgcggttcaagaagatcaaacctgaagccttcgaagccaacagattctacaccgtgatcaacaaaaagagcggcgagatcgtgcccatggaggtgaacttcaacttcgacgaccccaacctgatcatcctgcctctggcctttggcaagagacagggcagagaattcatctggaacgacctgctgtccctggaaaccggcagcctgaagctggccaacggaagagtgatcgagaagacactgtacaacagaagaacccggcaggatgagcctgccctgttcgtggccctgaccttcgagcggcgggaggtcctggactcctccaatatcaaaccaatgaacctgatcggcgtggcaagaggcgaaaacatccccgccgtgatcgccctgaccgaccccgagggctgcccactgagccggtttaaggatagcctgggaaacccaacccacatcctgagaatcggcgagagctataaggagaagcagcggaccatccaggccaagaaggaggtggagcagcggagagccggcggctacagccggaagtacgccagcaaagccaagaatctggcagacgatatggtgagaaacaccgctagagatctgctgtactacgccgtgacccaggatgccatgctgatcttcgccaacctgagccggggcttcggccggcagggcaagcggaccttcatggccgagagacagtacacacggatggaggactggctgaccgccaagctggcctacgagggcctgagcaagacctacctgtccaagacactggcccagtacacctccaagacatgcagcaactgtgggtttaccatcaccagcgccgactacgacagggtgctggagaagctgaagaagacagcaacaggctggatgaccacaattaacggcaaggagctgaaggtggagggccagattacctactacaacagatacaagagacagaacgtagtcaaggacctgtccgtcgagctggatagactgagcgaagaatctgtgaacaacgacatctcctcctggacaaagggcagaagcggagaagctctgagcctcctgaagaaaagattctcccatagacccgtgcaggagaagttcgtgtgcctgaactgcggcttcgagacacacgcagccgagcaagccgccctgaacatcgccagatcctggctgttcctgcggagccaggagtacaagaaataccagacaaacaagacaaccggcaacaccgataagagagccttcgtcgagacctggcagtccttttaccggaagaagcttaaggaggtgtggaaacctgccgtgcggtctggcggatctggcggaggctccaccagccccaagaaaaagagaaaagtctaagctgccttctgcggggcttgccttctggccatgcccttcttctctcccttgcacctgtacctcttggtctttgaataaagcctgagtaggaaggctagcaaaaaaaaaaaaaaaaaaaaaaaaaaaaaaaaaaaaaaaaaaaaaaaaaaaaaaaaaaaaaaaaaaaaaaaaaaaaaaaa

SEQ ID NO: 12449 - RNA, 5785 nt, synthetic construct
  source 1..5785: mol_type = other RNA
aggaaataagagagaaaagaagagtaagaagaaatataagagccaccatggcccctaagaagaagcgtaaagtgagccggatggaacgcctcgtctacgaggtgcggcagaagtgcagaaacatcgaggacatctgcatctcctgcggatctctgaacgtgaccctggagcacccactgttcatcggcggcatgtgccagaactgtaaaaactgttttctggagtgtgcctatcaatacgacgatgacggctaccagagctactgcaccatctgttgcggcggaagagaggtgctgatgtgtggaaataacaactgctgccggtgcttctgcgtggaatgcgtggacctgctggtgggccccggcgccgcccaggccgctattaaggaagatccttggaactgctacatgtgcggccacaagggcacatacggcctgctgagacggagagaggactggcctagcagactgcagatgttcttcgccaataaccacgaccaggagttcgacccccctaaggtgtaccctcccgtccccgccgagaagagaaagcccatccgggtcctgagcctgttcgatggcatcgccaccggtctgctggtgctgaaggacctgggcatccaggtggataggtacattgcctccgaggtgtgcgaggactccatcaccgtgggaatggtgcgtcatcagggcaagatcatgtacgtgggcgacgtgcggagcgtgacacagaagcatatccaggagtggggccctttcgacctggtgatcggcggcagcccttgcaatgacctgagcatcgtgaacccagcccggaagggcctgtacgagggaaccggcagactgttcttcgagttttacagactgctgcacgacgcccggcctaaggaaggcgacgaccggcccttcttttggctgttcgagaatgtggtggccatgggagtcagcgacaagcgggatattagccggttcctggagagcaaccccgtgatgatcgatgccaaggaagtgagcgccgcccaccgggccagatacttctggggcaatctgcctggcatgaacagacccctggccagcaccgtgaacgacaagctggagctgcaggagtgcctggagcacggccggatcgccaagttcagcaaggtgagaaccatcaccacccgaagcaacagcatcaaacaaggcaaggaccagcactttcctgtgttcatgaacgagaaggaggacatcctgtggtgtaccgagatggagagagtgttcgggttcccagtccactacacagatgtcagcaacatgtctagactggccagacagagactgctgggaagaagctggtccgtccctgtgatcagacacctgttcgcccctctgaaggagtacttcgcctgcgtgagcagcggcaacagcaacgccaacagccggggccccagcttctctagcggcctggtgccactgtccctgagagggagccacatgggccccatggagatctacaaaaccgtgagcgcctggaagcggcagcctgtgcgcgtgctgagcctgtttcggaatatcgataaagtcctgaaaagcctgggattcctggagagcggctctggctccggcggtggcaccctgaagtacgtggaggatgtgacaaacgtggtcagacgggatgtggagaagtggggccccttcgatctggtgtacggcagcacccaacccctgggcagctcttgtgaccggtgccctggctggtacatgtttcagttccaccggatcctgcagtacgccctgccgagacaggagtcccagcggccattcttttggattttcatggacaacttgctgctgaccgaggatgaccaggaaactaccactcggttcctgcagaccgaagccgtgaccctgcaggacgtgagaggccgggactaccagaacgccatgcgggtgtggtccaacatccctggactgaaaagcaagcacgcacctctgacccctaaagaagaggagtacctgcaggcccaggtgcggagcagaagcaagctggacgcccctaaggtggatctgctggtgaagaattgcctcctgcccctgagagagtacttcaagtatttcagccagaatagtctgcccctgggaggcagcggcggcggcttccaggaggccgtgaccttcaaggacgtggccgtggtgttcagcgaggaggagctgggcctgctggacagcacccagaggaagctgtacagggacgtgatgctggagaacttcaggaacctggtgagcgtgggccacagcagcagcaagcccgacatgatcagccagctggagagggaggaggagaagctgtacgtgaaggagatctgcaccgagaggggcaggcacagcgacaagaactgcggcggcccaagcagcggcgcccctcctcccagcggcggcagcccagccggctccccaacctctaccgaggagggcacctctgagtccgccacccccgagagcggccctggcacctccaccgagcccagcgagggcagcgcacccggcagccctgccggcagccccacctccacagaggagggaaccagcaccgagcccagcgaaggcagcgccccaggcaccagcaccgagcctagtgagcaggagattaaacggatcaacaagatcagaagaagacttgtgaaagacagcaacaccaagaaggccggcaagacaggccccatgaaaaccctgctggttagagtgatgacacccgatctgagagagcggctggaaaacctgagaaagaagcctgaaaatatcccccagcccatcagcaatacatctagagccaacctgaataagctgctgaccgattacaccgaaatgaagaaggcgatcctgcatgtgtactgggaagagttccagaaggaccctgtgggcctgatgagccgggtggcccagcctgccagcaagaagatcgatcagaacaagctgaaacctgagatggacgagaagggcaacctgaccaccgccggctttgcctgctctcagtgtggccagcccctgttcgtgtacaagctggagcaggtgtctgagaagggcaaggcttacaccaactacttcggacggtgcaatgtggccgagcacgaaaagctgatcctgctggcccagctgaagcccgagaaggatagcgacgaagccgtgacatatagcctgggaaagtttgggcagagggccctggatttctacagcattcatgtgaccaaggagtccacccaccccgtgaagcccctggcccagatcgccggaaacagatacgcctccggacctgtgggaaaggccctgagcgacgcatgtatgggcacaatcgcctccttcctgtctaagtaccaggacatcatcatcgaacaccagaaggtggtgaagggcaaccagaagagactggagagcctgcgggagctggccggcaaggaaaacctggaataccctagcgtgaccctgccacctcagcctcacaccaaggagggcgttgatgcctacaacgaagtgatcgcccgggtgcgaatgtgggtgaacctgaacctgtggcagaagctgaagctaagcagagatgatgccaagcctctgctgagactgaagggattcccttcctttcctctggtcgagagacaggccaacgaagtggactggtgggacatggtgtgtaacgtgaagaagctgatcaacgagaaaaaggaggatggcaaggtgttttggcagaatctggctggctacaagagacaggaagccctgagaccatacctgagcagcgaggaagatcggaagaagggaaagaaattcgctcggtaccagctgggcgacctgctgctgcacctggaaaagaagcacggcgaggactggggaaaggtgtacgacgaggcctgggagcggattgacaagaaagtggaaggcctgagcaagcacatcaagctggaagaggaacggagaagcgaggacgcccagagcaaggccgccctgaccgactggctgcgggctaaggccagcttcgtgatcgagggcctgaaggaggccgacaaggacgagttctgcagatgcgagctgaagctgcagaagtggtacggggacctgcggggaaagcccttcgccatcgaagccgagaacagcatcctggacatcagcggcttcagcaagcagtacaactgtgccttcatctggcagaaggacggcgtgaagaagctgaacctgtacctgatcatcaactacttcaagggcggcaagctgcggttcaagaagatcaaacctgaagccttcgaagccaacagattctacaccgtgatcaacaaaaagagcggcgagatcgtgcccatggaggtgaacttcaacttcgacgaccccaacctgatcatcctgcctctggcctttggcaagagacagggcagagaattcatctggaacgacctgctgtccctggaaaccggcagcctgaagctggccaacggaagagtgatcgagaagacactgtacaacagaagaacccggcaggatgagcctgccctgttcgtggccctgaccttcgagcggcgggaggtcctggactcctccaatatcaaaccaatgaacctgatcggcgtggcaagaggcgaaaacatccccgccgtgatcgccctgaccgaccccgagggctgcccactgagccggtttaaggatagcctgggaaacccaacccacatcctgagaatcggcgagagctataaggagaagcagcggaccatccaggccaagaaggaggtggagcagcggagagccggcggctacagccggaagtacgccagcaaagccaagaatctggcagacgatatggtgagaaacaccgctagagatctgctgtactacgccgtgacccaggatgccatgctgatcttcgccaacctgagccggggcttcggccggcagggcaagcggaccttcatggccgagagacagtacacacggatggaggactggctgaccgccaagctggcctacgagggcctgagcaagacctacctgtccaagacactggcccagtacacctccaagacatgcagcaactgtgggtttaccatcaccagcgccgactacgacagggtgctggagaagctgaagaagacagcaacaggctggatgaccacaattaacggcaaggagctgaaggtggagggccagattacctactacaacagatacaagagacagaacgtagtcaaggacctgtccgtcgagctggatagactgagcgaagaatctgtgaacaacgacatctcctcctggacaaagggcagaagcggagaagctctgagcctcctgaagaaaagattctcccatagacccgtgcaggagaagttcgtgtgcctgaactgcggcttcgagacacacgcagccgagcaagccgccctgaacatcgccagatcctggctgttcctgcggagccaggagtacaagaaataccagacaaacaagacaaccggcaacaccgataagagagccttcgtcgagacctggcagtccttttaccggaagaagcttaaggaggtgtggaaacctgccgtgcggtctggcggatctggcggaggctccaccagccccaagaaaaagagaaaagtctaagctgccttctgcggggcttgccttctggccatgcccttcttctctcccttgcacctgtacctcttggtctttgaataaagcctgagtaggaaggctagcaaaaaaaaaaaaaaaaaaaaaaaaaaaaaaaaaaaaaaaaaaaaaaaaaaaaaaaaaaaaaaaaaaaaaaaaaaaaaaaa

SEQ ID NO: 12450 - RNA, 5785 nt, synthetic construct
  source 1..5785: mol_type = other RNA
aggaaataagagagaaaagaagagtaagaagaaatataagagccaccatggcccctaagaagaagcgtaaagtgagccggatggaacgcctcgtctacgaggtgcggcagaagtgcagaaacatcgaggacatctgcatctcctgcggatctctgaacgtgaccctggagcacccactgttcatcggcggcatgtgccagaactgtaaaaactgttttctggagtgtgcctatcaatacgacgatgacggctaccagagctactgcaccatctgttgcggcggaagagaggtgctgatgtgtggaaataacaactgctgccggtgcttctgcgtggaatgcgtggacctgctggtgggccccggcgccgcccaggccgctattaaggaagatccttggaactgctacatgtgcggccacaagggcacatacggcctgctgagacggagagaggactggcctagcagactgcagatgttcttcgccaataaccacgaccaggagttcgacccccctaaggtgtaccctcccgtccccgccgagaagagaaagcccatccgggtcctgagcctgttcgatggcatcgccaccggtctgctggtgctgaaggacctgggcatccaggtggataggtacattgcctccgaggtgtgcgaggactccatcaccgtgggaatggtgcgtcatcagggcaagatcatgtacgtgggcgacgtgcggagcgtgacacagaagcatatccaggagtggggccctttcgacctggtgatcggcggcagcccttgcaatgacctgagcatcgtgaacccagcccggaagggcctgtacgagggaaccggcagactgttcttcgagttttacagactgctgcacgacgcccggcctaaggaaggcgacgaccggcccttcttttggctgttcgagaatgtggtggccatgggagtcagcgacaagcgggatattagccggttcctggagagcaaccccgtgatgatcgatgccaaggaagtgagcgccgcccaccgggccagatacttctggggcaatctgcctggcatgaacagacccctggccagcaccgtgaacgacaagctggagctgcaggagtgcctggagcacggccggatcgccaagttcagcaaggtgagaaccatcaccacccgaagcaacagcatcaaacaaggcaaggaccagcactttcctgtgttcatgaacgagaaggaggacatcctgtggtgtaccgagatggagagagtgttcgggttcccagtccactacacagatgtcagcaacatgtctagactggccagacagagactgctgggaagaagctggtccgtccctgtgatcagacacctgttcgcccctctgaaggagtacttcgcctgcgtgagcagcggcaacagcaacgccaacagccggggccccagcttctctagcggcctggtgccactgtccctgagagggagccacatgggccccatggagatctacaaaaccgtgagcgcctggaagcggcagcctgtgcgcgtgctgagcctgtttcggaatatcgataaagtcctgaaaagcctgggattcctggagagcggctctggctccggcggtggcaccctgaagtacgtggaggatgtgacaaacgtggtcagacgggatgtggagaagtggggccccttcgatctggtgtacggcagcacccaacccctgggcagctcttgtgaccggtgccctggctggtacatgtttcagttccaccggatcctgcagtacgccctgccgagacaggagtcccagcggccattcttttggattttcatggacaacttgctgctgaccgaggatgaccaggaaactaccactcggttcctgcagaccgaagccgtgaccctgcaggacgtgagaggccgggactaccagaacgccatgcgggtgtggtccaacatccctggactgaaaagcaagcacgcacctctgacccctaaagaagaggagtacctgcaggcccaggtgcggagcagaagcaagctggacgcccctaaggtggatctgctggtgaagaattgcctcctgcccctgagagagtacttcaagtatttcagccagaatagtctgcccctgggaggcagcggcggcggcgcccaggcccccctgagcttcgaggacgtggccgtgagcttcagcagggaggagtggaggctgctggtgcccgcccagaaggacctgtacagggacgtgatgctggagaactacaggaacctggtgagcgtgggctaccaggccagcgagcccgacagcctgttccagctggagcacggcggccccctgtgggccgtggagggcgccgcccccaggcccccctgccccggcttcgtgctgcagggcggcccaagcagcggcgcccctcctcccagcggcggcagcccagccggctccccaacctctaccgaggagggcacctctgagtccgccacccccgagagcggccctggcacctccaccgagcccagcgagggcagcgcacccggcagccctgccggcagccccacctccacagaggagggaaccagcaccgagcccagcgaaggcagcgccccaggcaccagcaccgagcctagtgagcaggagattaaacggatcaacaagatcagaagaagacttgtgaaagacagcaacaccaagaaggccggcaagacaggccccatgaaaaccctgctggttagagtgatgacacccgatctgagagagcggctggaaaacctgagaaagaagcctgaaaatatcccccagcccatcagcaatacatctagagccaacctgaataagctgctgaccgattacaccgaaatgaagaaggcgatcctgcatgtgtactgggaagagttccagaaggaccctgtgggcctgatgagccgggtggcccagcctgccagcaagaagatcgatcagaacaagctgaaacctgagatggacgagaagggcaacctgaccaccgccggctttgcctgctctcagtgtggccagcccctgttcgtgtacaagctggagcaggtgtctgagaagggcaaggcttacaccaactacttcggacggtgcaatgtggccgagcacgaaaagctgatcctgctggcccagctgaagcccgagaaggatagcgacgaagccgtgacatatagcctgggaaagtttgggcagagggccctggatttctacagcattcatgtgaccaaggagtccacccaccccgtgaagcccctggcccagatcgccggaaacagatacgcctccggacctgtgggaaaggccctgagcgacgcatgtatgggcacaatcgcctccttcctgtctaagtaccaggacatcatcatcgaacaccagaaggtggtgaagggcaaccagaagagactggagagcctgcgggagctggccggcaaggaaaacctggaataccctagcgtgaccctgccacctcagcctcacaccaaggagggcgttgatgcctacaacgaagtgatcgcccgggtgcgaatgtgggtgaacctgaacctgtggcagaagctgaagctaagcagagatgatgccaagcctctgctgagactgaagggattcccttcctttcctctggtcgagagacaggccaacgaagtggactggtgggacatggtgtgtaacgtgaagaagctgatcaacgagaaaaaggaggatggcaaggtgttttggcagaatctggctggctacaagagacaggaagccctgagaccatacctgagcagcgaggaagatcggaagaagggaaagaaattcgctcggtaccagctgggcgacctgctgctgcacctggaaaagaagcacggcgaggactggggaaaggtgtacgacgaggcctgggagcggattgacaagaaagtggaaggcctgagcaagcacatcaagctggaagaggaacggagaagcgaggacgcccagagcaaggccgccctgaccgactggctgcgggctaaggccagcttcgtgatcgagggcctgaaggaggccgacaaggacgagttctgcagatgcgagctgaagctgcagaagtggtacggggacctgcggggaaagcccttcgccatcgaagccgagaacagcatcctggacatcagcggcttcagcaagcagtacaactgtgccttcatctggcagaaggacggcgtgaagaagctgaacctgtacctgatcatcaactacttcaagggcggcaagctgcggttcaagaagatcaaacctgaagccttcgaagccaacagattctacaccgtgatcaacaaaaagagcggcgagatcgtgcccatggaggtgaacttcaacttcgacgaccccaacctgatcatcctgcctctggcctttggcaagagacagggcagagaattcatctggaacgacctgctgtccctggaaaccggcagcctgaagctggccaacggaagagtgatcgagaagacactgtacaacagaagaacccggcaggatgagcctgccctgttcgtggccctgaccttcgagcggcgggaggtcctggactcctccaatatcaaaccaatgaacctgatcggcgtggcaagaggcgaaaacatccccgccgtgatcgccctgaccgaccccgagggctgcccactgagccggtttaaggatagcctgggaaacccaacccacatcctgagaatcggcgagagctataaggagaagcagcggaccatccaggccaagaaggaggtggagcagcggagagccggcggctacagccggaagtacgccagcaaagccaagaatctggcagacgatatggtgagaaacaccgctagagatctgctgtactacgccgtgacccaggatgccatgctgatcttcgccaacctgagccggggcttcggccggcagggcaagcggaccttcatggccgagagacagtacacacggatggaggactggctgaccgccaagctggcctacgagggcctgagcaagacctacctgtccaagacactggcccagtacacctccaagacatgcagcaactgtgggtttaccatcaccagcgccgactacgacagggtgctggagaagctgaagaagacagcaacaggctggatgaccacaattaacggcaaggagctgaaggtggagggccagattacctactacaacagatacaagagacagaacgtagtcaaggacctgtccgtcgagctggatagactgagcgaagaatctgtgaacaacgacatctcctcctggacaaagggcagaagcggagaagctctgagcctcctgaagaaaagattctcccatagacccgtgcaggagaagttcgtgtgcctgaactgcggcttcgagacacacgcagccgagcaagccgccctgaacatcgccagatcctggctgttcctgcggagccaggagtacaagaaataccagacaaacaagacaaccggcaacaccgataagagagccttcgtcgagacctggcagtccttttaccggaagaagcttaaggaggtgtggaaacctgccgtgcggtctggcggatctggcggaggctccaccagccccaagaaaaagagaaaagtctaagctgccttctgcggggcttgccttctggccatgcccttcttctctcccttgcacctgtacctcttggtctttgaataaagcctgagtaggaaggctagcaaaaaaaaaaaaaaaaaaaaaaaaaaaaaaaaaaaaaaaaaaaaaaaaaaaaaaaaaaaaaaaaaaaaaaaaaaaaaaaa

SEQ ID NO: 12451 - RNA, 5785 nt, synthetic construct
  source 1..5785: mol_type = other RNA
aggaaataagagagaaaagaagagtaagaagaaatataagagccaccatggcccctaagaagaagcgtaaagtgagccggatggaacgcctcgtctacgaggtgcggcagaagtgcagaaacatcgaggacatctgcatctcctgcggatctctgaacgtgaccctggagcacccactgttcatcggcggcatgtgccagaactgtaaaaactgttttctggagtgtgcctatcaatacgacgatgacggctaccagagctactgcaccatctgttgcggcggaagagaggtgctgatgtgtggaaataacaactgctgccggtgcttctgcgtggaatgcgtggacctgctggtgggccccggcgccgcccaggccgctattaaggaagatccttggaactgctacatgtgcggccacaagggcacatacggcctgctgagacggagagaggactggcctagcagactgcagatgttcttcgccaataaccacgaccaggagttcgacccccctaaggtgtaccctcccgtccccgccgagaagagaaagcccatccgggtcctgagcctgttcgatggcatcgccaccggtctgctggtgctgaaggacctgggcatccaggtggataggtacattgcctccgaggtgtgcgaggactccatcaccgtgggaatggtgcgtcatcagggcaagatcatgtacgtgggcgacgtgcggagcgtgacacagaagcatatccaggagtggggccctttcgacctggtgatcggcggcagcccttgcaatgacctgagcatcgtgaacccagcccggaagggcctgtacgagggaaccggcagactgttcttcgagttttacagactgctgcacgacgcccggcctaaggaaggcgacgaccggcccttcttttggctgttcgagaatgtggtggccatgggagtcagcgacaagcgggatattagccggttcctggagagcaaccccgtgatgatcgatgccaaggaagtgagcgccgcccaccgggccagatacttctggggcaatctgcctggcatgaacagacccctggccagcaccgtgaacgacaagctggagctgcaggagtgcctggagcacggccggatcgccaagttcagcaaggtgagaaccatcaccacccgaagcaacagcatcaaacaaggcaaggaccagcactttcctgtgttcatgaacgagaaggaggacatcctgtggtgtaccgagatggagagagtgttcgggttcccagtccactacacagatgtcagcaacatgtctagactggccagacagagactgctgggaagaagctggtccgtccctgtgatcagacacctgttcgcccctctgaaggagtacttcgcctgcgtgagcagcggcaacagcaacgccaacagccggggccccagcttctctagcggcctggtgccactgtccctgagagggagccacatgggccccatggagatctacaaaaccgtgagcgcctggaagcggcagcctgtgcgcgtgctgagcctgtttcggaatatcgataaagtcctgaaaagcctgggattcctggagagcggctctggctccggcggtggcaccctgaagtacgtggaggatgtgacaaacgtggtcagacgggatgtggagaagtggggccccttcgatctggtgtacggcagcacccaacccctgggcagctcttgtgaccggtgccctggctggtacatgtttcagttccaccggatcctgcagtacgccctgccgagacaggagtcccagcggccattcttttggattttcatggacaacttgctgctgaccgaggatgaccaggaaactaccactcggttcctgcagaccgaagccgtgaccctgcaggacgtgagaggccgggactaccagaacgccatgcgggtgtggtccaacatccctggactgaaaagcaagcacgcacctctgacccctaaagaagaggagtacctgcaggcccaggtgcggagcagaagcaagctggacgcccctaaggtggatctgctggtgaagaattgcctcctgcccctgagagagtacttcaagtatttcagccagaatagtctgcccctgggaggcagcggcggcggcttccagggcagcctgaccttcagcgacgtggccatcggcttcagccagcaggagtgggagtgcctggaccccgtgcagaagagcctgtacagggacgtgatgatggagaactacggcaacctggtgagcctgggctacagcatcagcaagcccgacgtgatcaccctgctggagcagggcaaggagccctggatggtgctgagggaggagaccaagaggtgggacaccgacagcttcctgagcggcggcccaagcagcggcgcccctcctcccagcggcggcagcccagccggctccccaacctctaccgaggagggcacctctgagtccgccacccccgagagcggccctggcacctccaccgagcccagcgagggcagcgcacccggcagccctgccggcagccccacctccacagaggagggaaccagcaccgagcccagcgaaggcagcgccccaggcaccagcaccgagcctagtgagcaggagattaaacggatcaacaagatcagaagaagacttgtgaaagacagcaacaccaagaaggccggcaagacaggccccatgaaaaccctgctggttagagtgatgacacccgatctgagagagcggctggaaaacctgagaaagaagcctgaaaatatcccccagcccatcagcaatacatctagagccaacctgaataagctgctgaccgattacaccgaaatgaagaaggcgatcctgcatgtgtactgggaagagttccagaaggaccctgtgggcctgatgagccgggtggcccagcctgccagcaagaagatcgatcagaacaagctgaaacctgagatggacgagaagggcaacctgaccaccgccggctttgcctgctctcagtgtggccagcccctgttcgtgtacaagctggagcaggtgtctgagaagggcaaggcttacaccaactacttcggacggtgcaatgtggccgagcacgaaaagctgatcctgctggcccagctgaagcccgagaaggatagcgacgaagccgtgacatatagcctgggaaagtttgggcagagggccctggatttctacagcattcatgtgaccaaggagtccacccaccccgtgaagcccctggcccagatcgccggaaacagatacgcctccggacctgtgggaaaggccctgagcgacgcatgtatgggcacaatcgcctccttcctgtctaagtaccaggacatcatcatcgaacaccagaaggtggtgaagggcaaccagaagagactggagagcctgcgggagctggccggcaaggaaaacctggaataccctagcgtgaccctgccacctcagcctcacaccaaggagggcgttgatgcctacaacgaagtgatcgcccgggtgcgaatgtgggtgaacctgaacctgtggcagaagctgaagctaagcagagatgatgccaagcctctgctgagactgaagggattcccttcctttcctctggtcgagagacaggccaacgaagtggactggtgggacatggtgtgtaacgtgaagaagctgatcaacgagaaaaaggaggatggcaaggtgttttggcagaatctggctggctacaagagacaggaagccctgagaccatacctgagcagcgaggaagatcggaagaagggaaagaaattcgctcggtaccagctgggcgacctgctgctgcacctggaaaagaagcacggcgaggactggggaaaggtgtacgacgaggcctgggagcggattgacaagaaagtggaaggcctgagcaagcacatcaagctggaagaggaacggagaagcgaggacgcccagagcaaggccgccctgaccgactggctgcgggctaaggccagcttcgtgatcgagggcctgaaggaggccgacaaggacgagttctgcagatgcgagctgaagctgcagaagtggtacggggacctgcggggaaagcccttcgccatcgaagccgagaacagcatcctggacatcagcggcttcagcaagcagtacaactgtgccttcatctggcagaaggacggcgtgaagaagctgaacctgtacctgatcatcaactacttcaagggcggcaagctgcggttcaagaagatcaaacctgaagccttcgaagccaacagattctacaccgtgatcaacaaaaagagcggcgagatcgtgcccatggaggtgaacttcaacttcgacgaccccaacctgatcatcctgcctctggcctttggcaagagacagggcagagaattcatctggaacgacctgctgtccctggaaaccggcagcctgaagctggccaacggaagagtgatcgagaagacactgtacaacagaagaacccggcaggatgagcctgccctgttcgtggccctgaccttcgagcggcgggaggtcctggactcctccaatatcaaaccaatgaacctgatcggcgtggcaagaggcgaaaacatccccgccgtgatcgccctgaccgaccccgagggctgcccactgagccggtttaaggatagcctgggaaacccaacccacatcctgagaatcggcgagagctataaggagaagcagcggaccatccaggccaagaaggaggtggagcagcggagagccggcggctacagccggaagtacgccagcaaagccaagaatctggcagacgatatggtgagaaacaccgctagagatctgctgtactacgccgtgacccaggatgccatgctgatcttcgccaacctgagccggggcttcggccggcagggcaagcggaccttcatggccgagagacagtacacacggatggaggactggctgaccgccaagctggcctacgagggcctgagcaagacctacctgtccaagacactggcccagtacacctccaagacatgcagcaactgtgggtttaccatcaccagcgccgactacgacagggtgctggagaagctgaagaagacagcaacaggctggatgaccacaattaacggcaaggagctgaaggtggagggccagattacctactacaacagatacaagagacagaacgtagtcaaggacctgtccgtcgagctggatagactgagcgaagaatctgtgaacaacgacatctcctcctggacaaagggcagaagcggagaagctctgagcctcctgaagaaaagattctcccatagacccgtgcaggagaagttcgtgtgcctgaactgcggcttcgagacacacgcagccgagcaagccgccctgaacatcgccagatcctggctgttcctgcggagccaggagtacaagaaataccagacaaacaagacaaccggcaacaccgataagagagccttcgtcgagacctggcagtccttttaccggaagaagcttaaggaggtgtggaaacctgccgtgcggtctggcggatctggcggaggctccaccagccccaagaaaaagagaaaagtctaagctgccttctgcggggcttgccttctggccatgcccttcttctctcccttgcacctgtacctcttggtctttgaataaagcctgagtaggaaggctagcaaaaaaaaaaaaaaaaaaaaaaaaaaaaaaaaaaaaaaaaaaaaaaaaaaaaaaaaaaaaaaaaaaaaaaaaaaaaaaaa

SEQ ID NO: 12452 - RNA, 5785 nt, synthetic construct
  source 1..5785: mol_type = other RNA
aggaaataagagagaaaagaagagtaagaagaaatataagagccaccatggcccctaagaagaagcgtaaagtgagccggatggaacgcctcgtctacgaggtgcggcagaagtgcagaaacatcgaggacatctgcatctcctgcggatctctgaacgtgaccctggagcacccactgttcatcggcggcatgtgccagaactgtaaaaactgttttctggagtgtgcctatcaatacgacgatgacggctaccagagctactgcaccatctgttgcggcggaagagaggtgctgatgtgtggaaataacaactgctgccggtgcttctgcgtggaatgcgtggacctgctggtgggccccggcgccgcccaggccgctattaaggaagatccttggaactgctacatgtgcggccacaagggcacatacggcctgctgagacggagagaggactggcctagcagactgcagatgttcttcgccaataaccacgaccaggagttcgacccccctaaggtgtaccctcccgtccccgccgagaagagaaagcccatccgggtcctgagcctgttcgatggcatcgccaccggtctgctggtgctgaaggacctgggcatccaggtggataggtacattgcctccgaggtgtgcgaggactccatcaccgtgggaatggtgcgtcatcagggcaagatcatgtacgtgggcgacgtgcggagcgtgacacagaagcatatccaggagtggggccctttcgacctggtgatcggcggcagcccttgcaatgacctgagcatcgtgaacccagcccggaagggcctgtacgagggaaccggcagactgttcttcgagttttacagactgctgcacgacgcccggcctaaggaaggcgacgaccggcccttcttttggctgttcgagaatgtggtggccatgggagtcagcgacaagcgggatattagccggttcctggagagcaaccccgtgatgatcgatgccaaggaagtgagcgccgcccaccgggccagatacttctggggcaatctgcctggcatgaacagacccctggccagcaccgtgaacgacaagctggagctgcaggagtgcctggagcacggccggatcgccaagttcagcaaggtgagaaccatcaccacccgaagcaacagcatcaaacaaggcaaggaccagcactttcctgtgttcatgaacgagaaggaggacatcctgtggtgtaccgagatggagagagtgttcgggttcccagtccactacacagatgtcagcaacatgtctagactggccagacagagactgctgggaagaagctggtccgtccctgtgatcagacacctgttcgcccctctgaaggagtacttcgcctgcgtgagcagcggcaacagcaacgccaacagccggggccccagcttctctagcggcctggtgccactgtccctgagagggagccacatgggccccatggagatctacaaaaccgtgagcgcctggaagcggcagcctgtgcgcgtgctgagcctgtttcggaatatcgataaagtcctgaaaagcctgggattcctggagagcggctctggctccggcggtggcaccctgaagtacgtggaggatgtgacaaacgtggtcagacgggatgtggagaagtggggccccttcgatctggtgtacggcagcacccaacccctgggcagctcttgtgaccggtgccctggctggtacatgtttcagttccaccggatcctgcagtacgccctgccgagacaggagtcccagcggccattcttttggattttcatggacaacttgctgctgaccgaggatgaccaggaaactaccactcggttcctgcagaccgaagccgtgaccctgcaggacgtgagaggccgggactaccagaacgccatgcgggtgtggtccaacatccctggactgaaaagcaagcacgcacctctgacccctaaagaagaggagtacctgcaggcccaggtgcggagcagaagcaagctggacgcccctaaggtggatctgctggtgaagaattgcctcctgcccctgagagagtacttcaagtatttcagccagaatagtctgcccctgggaggcagcggcggcggccaggacgtggtgaccttcaaggacgtggccatctacttcagccccgaggagtgggtgaggctgagcgccggccagagggagctgtaccaggaggtgatgctggacaactacgagctggtgaccagcctggacagggagagcaagctgctgtacaagatggaccccgaggaggagagctgcgagggcgtgccctacagcagcgccgacagcggcgcccccgacagcagcagcaccagcgcctgcggcggcccaagcagcggcgcccctcctcccagcggcggcagcccagccggctccccaacctctaccgaggagggcacctctgagtccgccacccccgagagcggccctggcacctccaccgagcccagcgagggcagcgcacccggcagccctgccggcagccccacctccacagaggagggaaccagcaccgagcccagcgaaggcagcgccccaggcaccagcaccgagcctagtgagcaggagattaaacggatcaacaagatcagaagaagacttgtgaaagacagcaacaccaagaaggccggcaagacaggccccatgaaaaccctgctggttagagtgatgacacccgatctgagagagcggctggaaaacctgagaaagaagcctgaaaatatcccccagcccatcagcaatacatctagagccaacctgaataagctgctgaccgattacaccgaaatgaagaaggcgatcctgcatgtgtactgggaagagttccagaaggaccctgtgggcctgatgagccgggtggcccagcctgccagcaagaagatcgatcagaacaagctgaaacctgagatggacgagaagggcaacctgaccaccgccggctttgcctgctctcagtgtggccagcccctgttcgtgtacaagctggagcaggtgtctgagaagggcaaggcttacaccaactacttcggacggtgcaatgtggccgagcacgaaaagctgatcctgctggcccagctgaagcccgagaaggatagcgacgaagccgtgacatatagcctgggaaagtttgggcagagggccctggatttctacagcattcatgtgaccaaggagtccacccaccccgtgaagcccctggcccagatcgccggaaacagatacgcctccggacctgtgggaaaggccctgagcgacgcatgtatgggcacaatcgcctccttcctgtctaagtaccaggacatcatcatcgaacaccagaaggtggtgaagggcaaccagaagagactggagagcctgcgggagctggccggcaaggaaaacctggaataccctagcgtgaccctgccacctcagcctcacaccaaggagggcgttgatgcctacaacgaagtgatcgcccgggtgcgaatgtgggtgaacctgaacctgtggcagaagctgaagctaagcagagatgatgccaagcctctgctgagactgaagggattcccttcctttcctctggtcgagagacaggccaacgaagtggactggtgggacatggtgtgtaacgtgaagaagctgatcaacgagaaaaaggaggatggcaaggtgttttggcagaatctggctggctacaagagacaggaagccctgagaccatacctgagcagcgaggaagatcggaagaagggaaagaaattcgctcggtaccagctgggcgacctgctgctgcacctggaaaagaagcacggcgaggactggggaaaggtgtacgacgaggcctgggagcggattgacaagaaagtggaaggcctgagcaagcacatcaagctggaagaggaacggagaagcgaggacgcccagagcaaggccgccctgaccgactggctgcgggctaaggccagcttcgtgatcgagggcctgaaggaggccgacaaggacgagttctgcagatgcgagctgaagctgcagaagtggtacggggacctgcggggaaagcccttcgccatcgaagccgagaacagcatcctggacatcagcggcttcagcaagcagtacaactgtgccttcatctggcagaaggacggcgtgaagaagctgaacctgtacctgatcatcaactacttcaagggcggcaagctgcggttcaagaagatcaaacctgaagccttcgaagccaacagattctacaccgtgatcaacaaaaagagcggcgagatcgtgcccatggaggtgaacttcaacttcgacgaccccaacctgatcatcctgcctctggcctttggcaagagacagggcagagaattcatctggaacgacctgctgtccctggaaaccggcagcctgaagctggccaacggaagagtgatcgagaagacactgtacaacagaagaacccggcaggatgagcctgccctgttcgtggccctgaccttcgagcggcgggaggtcctggactcctccaatatcaaaccaatgaacctgatcggcgtggcaagaggcgaaaacatccccgccgtgatcgccctgaccgaccccgagggctgcccactgagccggtttaaggatagcctgggaaacccaacccacatcctgagaatcggcgagagctataaggagaagcagcggaccatccaggccaagaaggaggtggagcagcggagagccggcggctacagccggaagtacgccagcaaagccaagaatctggcagacgatatggtgagaaacaccgctagagatctgctgtactacgccgtgacccaggatgccatgctgatcttcgccaacctgagccggggcttcggccggcagggcaagcggaccttcatggccgagagacagtacacacggatggaggactggctgaccgccaagctggcctacgagggcctgagcaagacctacctgtccaagacactggcccagtacacctccaagacatgcagcaactgtgggtttaccatcaccagcgccgactacgacagggtgctggagaagctgaagaagacagcaacaggctggatgaccacaattaacggcaaggagctgaaggtggagggccagattacctactacaacagatacaagagacagaacgtagtcaaggacctgtccgtcgagctggatagactgagcgaagaatctgtgaacaacgacatctcctcctggacaaagggcagaagcggagaagctctgagcctcctgaagaaaagattctcccatagacccgtgcaggagaagttcgtgtgcctgaactgcggcttcgagacacacgcagccgagcaagccgccctgaacatcgccagatcctggctgttcctgcggagccaggagtacaagaaataccagacaaacaagacaaccggcaacaccgataagagagccttcgtcgagacctggcagtccttttaccggaagaagcttaaggaggtgtggaaacctgccgtgcggtctggcggatctggcggaggctccaccagccccaagaaaaagagaaaagtctaagctgccttctgcggggcttgccttctggccatgcccttcttctctcccttgcacctgtacctcttggtctttgaataaagcctgagtaggaaggctagcaaaaaaaaaaaaaaaaaaaaaaaaaaaaaaaaaaaaaaaaaaaaaaaaaaaaaaaaaaaaaaaaaaaaaaaaaaaaaaaa

SEQ ID NO: 12453 - RNA, 5785 nt, synthetic construct
  source 1..5785: mol_type = other RNA
aggaaataagagagaaaagaagagtaagaagaaatataagagccaccatggcccctaagaagaagcgtaaagtgagccggatggaacgcctcgtctacgaggtgcggcagaagtgcagaaacatcgaggacatctgcatctcctgcggatctctgaacgtgaccctggagcacccactgttcatcggcggcatgtgccagaactgtaaaaactgttttctggagtgtgcctatcaatacgacgatgacggctaccagagctactgcaccatctgttgcggcggaagagaggtgctgatgtgtggaaataacaactgctgccggtgcttctgcgtggaatgcgtggacctgctggtgggccccggcgccgcccaggccgctattaaggaagatccttggaactgctacatgtgcggccacaagggcacatacggcctgctgagacggagagaggactggcctagcagactgcagatgttcttcgccaataaccacgaccaggagttcgacccccctaaggtgtaccctcccgtccccgccgagaagagaaagcccatccgggtcctgagcctgttcgatggcatcgccaccggtctgctggtgctgaaggacctgggcatccaggtggataggtacattgcctccgaggtgtgcgaggactccatcaccgtgggaatggtgcgtcatcagggcaagatcatgtacgtgggcgacgtgcggagcgtgacacagaagcatatccaggagtggggccctttcgacctggtgatcggcggcagcccttgcaatgacctgagcatcgtgaacccagcccggaagggcctgtacgagggaaccggcagactgttcttcgagttttacagactgctgcacgacgcccggcctaaggaaggcgacgaccggcccttcttttggctgttcgagaatgtggtggccatgggagtcagcgacaagcgggatattagccggttcctggagagcaaccccgtgatgatcgatgccaaggaagtgagcgccgcccaccgggccagatacttctggggcaatctgcctggcatgaacagacccctggccagcaccgtgaacgacaagctggagctgcaggagtgcctggagcacggccggatcgccaagttcagcaaggtgagaaccatcaccacccgaagcaacagcatcaaacaaggcaaggaccagcactttcctgtgttcatgaacgagaaggaggacatcctgtggtgtaccgagatggagagagtgttcgggttcccagtccactacacagatgtcagcaacatgtctagactggccagacagagactgctgggaagaagctggtccgtccctgtgatcagacacctgttcgcccctctgaaggagtacttcgcctgcgtgagcagcggcaacagcaacgccaacagccggggccccagcttctctagcggcctggtgccactgtccctgagagggagccacatgggccccatggagatctacaaaaccgtgagcgcctggaagcggcagcctgtgcgcgtgctgagcctgtttcggaatatcgataaagtcctgaaaagcctgggattcctggagagcggctctggctccggcggtggcaccctgaagtacgtggaggatgtgacaaacgtggtcagacgggatgtggagaagtggggccccttcgatctggtgtacggcagcacccaacccctgggcagctcttgtgaccggtgccctggctggtacatgtttcagttccaccggatcctgcagtacgccctgccgagacaggagtcccagcggccattcttttggattttcatggacaacttgctgctgaccgaggatgaccaggaaactaccactcggttcctgcagaccgaagccgtgaccctgcaggacgtgagaggccgggactaccagaacgccatgcgggtgtggtccaacatccctggactgaaaagcaagcacgcacctctgacccctaaagaagaggagtacctgcaggcccaggtgcggagcagaagcaagctggacgcccctaaggtggatctgctggtgaagaattgcctcctgcccctgagagagtacttcaagtatttcagccagaatagtctgcccctgggaggcagcggcggcggcgtggagcccgtgagcttcgaggaggtggccgtgtacttcagcgaggaggagtgggccctgctggaccccggccagagggccctgtactgggacgtgatgcaggagaactacgaggccgtgagctggctggtgaggggcaggggcgtgagcaaggcccacgtgatcagctgggtggagaggggcgaggagctgtggatccccgacaggcagggctgcgaggagggcgagagcatcagcgacatcggcggcccaagcagcggcgcccctcctcccagcggcggcagcccagccggctccccaacctctaccgaggagggcacctctgagtccgccacccccgagagcggccctggcacctccaccgagcccagcgagggcagcgcacccggcagccctgccggcagccccacctccacagaggagggaaccagcaccgagcccagcgaaggcagcgccccaggcaccagcaccgagcctagtgagcaggagattaaacggatcaacaagatcagaagaagacttgtgaaagacagcaacaccaagaaggccggcaagacaggccccatgaaaaccctgctggttagagtgatgacacccgatctgagagagcggctggaaaacctgagaaagaagcctgaaaatatcccccagcccatcagcaatacatctagagccaacctgaataagctgctgaccgattacaccgaaatgaagaaggcgatcctgcatgtgtactgggaagagttccagaaggaccctgtgggcctgatgagccgggtggcccagcctgccagcaagaagatcgatcagaacaagctgaaacctgagatggacgagaagggcaacctgaccaccgccggctttgcctgctctcagtgtggccagcccctgttcgtgtacaagctggagcaggtgtctgagaagggcaaggcttacaccaactacttcggacggtgcaatgtggccgagcacgaaaagctgatcctgctggcccagctgaagcccgagaaggatagcgacgaagccgtgacatatagcctgggaaagtttgggcagagggccctggatttctacagcattcatgtgaccaaggagtccacccaccccgtgaagcccctggcccagatcgccggaaacagatacgcctccggacctgtgggaaaggccctgagcgacgcatgtatgggcacaatcgcctccttcctgtctaagtaccaggacatcatcatcgaacaccagaaggtggtgaagggcaaccagaagagactggagagcctgcgggagctggccggcaaggaaaacctggaataccctagcgtgaccctgccacctcagcctcacaccaaggagggcgttgatgcctacaacgaagtgatcgcccgggtgcgaatgtgggtgaacctgaacctgtggcagaagctgaagctaagcagagatgatgccaagcctctgctgagactgaagggattcccttcctttcctctggtcgagagacaggccaacgaagtggactggtgggacatggtgtgtaacgtgaagaagctgatcaacgagaaaaaggaggatggcaaggtgttttggcagaatctggctggctacaagagacaggaagccctgagaccatacctgagcagcgaggaagatcggaagaagggaaagaaattcgctcggtaccagctgggcgacctgctgctgcacctggaaaagaagcacggcgaggactggggaaaggtgtacgacgaggcctgggagcggattgacaagaaagtggaaggcctgagcaagcacatcaagctggaagaggaacggagaagcgaggacgcccagagcaaggccgccctgaccgactggctgcgggctaaggccagcttcgtgatcgagggcctgaaggaggccgacaaggacgagttctgcagatgcgagctgaagctgcagaagtggtacggggacctgcggggaaagcccttcgccatcgaagccgagaacagcatcctggacatcagcggcttcagcaagcagtacaactgtgccttcatctggcagaaggacggcgtgaagaagctgaacctgtacctgatcatcaactacttcaagggcggcaagctgcggttcaagaagatcaaacctgaagccttcgaagccaacagattctacaccgtgatcaacaaaaagagcggcgagatcgtgcccatggaggtgaacttcaacttcgacgaccccaacctgatcatcctgcctctggcctttggcaagagacagggcagagaattcatctggaacgacctgctgtccctggaaaccggcagcctgaagctggccaacggaagagtgatcgagaagacactgtacaacagaagaacccggcaggatgagcctgccctgttcgtggccctgaccttcgagcggcgggaggtcctggactcctccaatatcaaaccaatgaacctgatcggcgtggcaagaggcgaaaacatccccgccgtgatcgccctgaccgaccccgagggctgcccactgagccggtttaaggatagcctgggaaacccaacccacatcctgagaatcggcgagagctataaggagaagcagcggaccatccaggccaagaaggaggtggagcagcggagagccggcggctacagccggaagtacgccagcaaagccaagaatctggcagacgatatggtgagaaacaccgctagagatctgctgtactacgccgtgacccaggatgccatgctgatcttcgccaacctgagccggggcttcggccggcagggcaagcggaccttcatggccgagagacagtacacacggatggaggactggctgaccgccaagctggcctacgagggcctgagcaagacctacctgtccaagacactggcccagtacacctccaagacatgcagcaactgtgggtttaccatcaccagcgccgactacgacagggtgctggagaagctgaagaagacagcaacaggctggatgaccacaattaacggcaaggagctgaaggtggagggccagattacctactacaacagatacaagagacagaacgtagtcaaggacctgtccgtcgagctggatagactgagcgaagaatctgtgaacaacgacatctcctcctggacaaagggcagaagcggagaagctctgagcctcctgaagaaaagattctcccatagacccgtgcaggagaagttcgtgtgcctgaactgcggcttcgagacacacgcagccgagcaagccgccctgaacatcgccagatcctggctgttcctgcggagccaggagtacaagaaataccagacaaacaagacaaccggcaacaccgataagagagccttcgtcgagacctggcagtccttttaccggaagaagcttaaggaggtgtggaaacctgccgtgcggtctggcggatctggcggaggctccaccagccccaagaaaaagagaaaagtctaagctgccttctgcggggcttgccttctggccatgcccttcttctctcccttgcacctgtacctcttggtctttgaataaagcctgagtaggaaggctagcaaaaaaaaaaaaaaaaaaaaaaaaaaaaaaaaaaaaaaaaaaaaaaaaaaaaaaaaaaaaaaaaaaaaaaaaaaaaaaaa

SEQ ID NO: 12454 - RNA, 5785 nt, synthetic construct
  source 1..5785: mol_type = other RNA
aggaaataagagagaaaagaagagtaagaagaaatataagagccaccatggcccctaagaagaagcgtaaagtgagccggatggaacgcctcgtctacgaggtgcggcagaagtgcagaaacatcgaggacatctgcatctcctgcggatctctgaacgtgaccctggagcacccactgttcatcggcggcatgtgccagaactgtaaaaactgttttctggagtgtgcctatcaatacgacgatgacggctaccagagctactgcaccatctgttgcggcggaagagaggtgctgatgtgtggaaataacaactgctgccggtgcttctgcgtggaatgcgtggacctgctggtgggccccggcgccgcccaggccgctattaaggaagatccttggaactgctacatgtgcggccacaagggcacatacggcctgctgagacggagagaggactggcctagcagactgcagatgttcttcgccaataaccacgaccaggagttcgacccccctaaggtgtaccctcccgtccccgccgagaagagaaagcccatccgggtcctgagcctgttcgatggcatcgccaccggtctgctggtgctgaaggacctgggcatccaggtggataggtacattgcctccgaggtgtgcgaggactccatcaccgtgggaatggtgcgtcatcagggcaagatcatgtacgtgggcgacgtgcggagcgtgacacagaagcatatccaggagtggggccctttcgacctggtgatcggcggcagcccttgcaatgacctgagcatcgtgaacccagcccggaagggcctgtacgagggaaccggcagactgttcttcgagttttacagactgctgcacgacgcccggcctaaggaaggcgacgaccggcccttcttttggctgttcgagaatgtggtggccatgggagtcagcgacaagcgggatattagccggttcctggagagcaaccccgtgatgatcgatgccaaggaagtgagcgccgcccaccgggccagatacttctggggcaatctgcctggcatgaacagacccctggccagcaccgtgaacgacaagctggagctgcaggagtgcctggagcacggccggatcgccaagttcagcaaggtgagaaccatcaccacccgaagcaacagcatcaaacaaggcaaggaccagcactttcctgtgttcatgaacgagaaggaggacatcctgtggtgtaccgagatggagagagtgttcgggttcccagtccactacacagatgtcagcaacatgtctagactggccagacagagactgctgggaagaagctggtccgtccctgtgatcagacacctgttcgcccctctgaaggagtacttcgcctgcgtgagcagcggcaacagcaacgccaacagccggggccccagcttctctagcggcctggtgccactgtccctgagagggagccacatgggccccatggagatctacaaaaccgtgagcgcctggaagcggcagcctgtgcgcgtgctgagcctgtttcggaatatcgataaagtcctgaaaagcctgggattcctggagagcggctctggctccggcggtggcaccctgaagtacgtggaggatgtgacaaacgtggtcagacgggatgtggagaagtggggccccttcgatctggtgtacggcagcacccaacccctgggcagctcttgtgaccggtgccctggctggtacatgtttcagttccaccggatcctgcagtacgccctgccgagacaggagtcccagcggccattcttttggattttcatggacaacttgctgctgaccgaggatgaccaggaaactaccactcggttcctgcagaccgaagccgtgaccctgcaggacgtgagaggccgggactaccagaacgccatgcgggtgtggtccaacatccctggactgaaaagcaagcacgcacctctgacccctaaagaagaggagtacctgcaggcccaggtgcggagcagaagcaagctggacgcccctaaggtggatctgctggtgaagaattgcctcctgcccctgagagagtacttcaagtatttcagccagaatagtctgcccctgggaggcagcggcggcggcggcagcgtgagcttcgacgaggtgagcgtgaggttcagcaacgaggagtgggccctgctggaccccggccagagggccctgtacgaggaggtgatggaggagatcagggagatgatgaccagcgtgggcgacgtgagcgagttcctgaccgagggcgagcagagcgagctgagcagggagggcgccgaggagcagaaggagcagaggaagcagagggtgcaggtgggcacctacaggaacgagggcggcccaagcagcggcgcccctcctcccagcggcggcagcccagccggctccccaacctctaccgaggagggcacctctgagtccgccacccccgagagcggccctggcacctccaccgagcccagcgagggcagcgcacccggcagccctgccggcagccccacctccacagaggagggaaccagcaccgagcccagcgaaggcagcgccccaggcaccagcaccgagcctagtgagcaggagattaaacggatcaacaagatcagaagaagacttgtgaaagacagcaacaccaagaaggccggcaagacaggccccatgaaaaccctgctggttagagtgatgacacccgatctgagagagcggctggaaaacctgagaaagaagcctgaaaatatcccccagcccatcagcaatacatctagagccaacctgaataagctgctgaccgattacaccgaaatgaagaaggcgatcctgcatgtgtactgggaagagttccagaaggaccctgtgggcctgatgagccgggtggcccagcctgccagcaagaagatcgatcagaacaagctgaaacctgagatggacgagaagggcaacctgaccaccgccggctttgcctgctctcagtgtggccagcccctgttcgtgtacaagctggagcaggtgtctgagaagggcaaggcttacaccaactacttcggacggtgcaatgtggccgagcacgaaaagctgatcctgctggcccagctgaagcccgagaaggatagcgacgaagccgtgacatatagcctgggaaagtttgggcagagggccctggatttctacagcattcatgtgaccaaggagtccacccaccccgtgaagcccctggcccagatcgccggaaacagatacgcctccggacctgtgggaaaggccctgagcgacgcatgtatgggcacaatcgcctccttcctgtctaagtaccaggacatcatcatcgaacaccagaaggtggtgaagggcaaccagaagagactggagagcctgcgggagctggccggcaaggaaaacctggaataccctagcgtgaccctgccacctcagcctcacaccaaggagggcgttgatgcctacaacgaagtgatcgcccgggtgcgaatgtgggtgaacctgaacctgtggcagaagctgaagctaagcagagatgatgccaagcctctgctgagactgaagggattcccttcctttcctctggtcgagagacaggccaacgaagtggactggtgggacatggtgtgtaacgtgaagaagctgatcaacgagaaaaaggaggatggcaaggtgttttggcagaatctggctggctacaagagacaggaagccctgagaccatacctgagcagcgaggaagatcggaagaagggaaagaaattcgctcggtaccagctgggcgacctgctgctgcacctggaaaagaagcacggcgaggactggggaaaggtgtacgacgaggcctgggagcggattgacaagaaagtggaaggcctgagcaagcacatcaagctggaagaggaacggagaagcgaggacgcccagagcaaggccgccctgaccgactggctgcgggctaaggccagcttcgtgatcgagggcctgaaggaggccgacaaggacgagttctgcagatgcgagctgaagctgcagaagtggtacggggacctgcggggaaagcccttcgccatcgaagccgagaacagcatcctggacatcagcggcttcagcaagcagtacaactgtgccttcatctggcagaaggacggcgtgaagaagctgaacctgtacctgatcatcaactacttcaagggcggcaagctgcggttcaagaagatcaaacctgaagccttcgaagccaacagattctacaccgtgatcaacaaaaagagcggcgagatcgtgcccatggaggtgaacttcaacttcgacgaccccaacctgatcatcctgcctctggcctttggcaagagacagggcagagaattcatctggaacgacctgctgtccctggaaaccggcagcctgaagctggccaacggaagagtgatcgagaagacactgtacaacagaagaacccggcaggatgagcctgccctgttcgtggccctgaccttcgagcggcgggaggtcctggactcctccaatatcaaaccaatgaacctgatcggcgtggcaagaggcgaaaacatccccgccgtgatcgccctgaccgaccccgagggctgcccactgagccggtttaaggatagcctgggaaacccaacccacatcctgagaatcggcgagagctataaggagaagcagcggaccatccaggccaagaaggaggtggagcagcggagagccggcggctacagccggaagtacgccagcaaagccaagaatctggcagacgatatggtgagaaacaccgctagagatctgctgtactacgccgtgacccaggatgccatgctgatcttcgccaacctgagccggggcttcggccggcagggcaagcggaccttcatggccgagagacagtacacacggatggaggactggctgaccgccaagctggcctacgagggcctgagcaagacctacctgtccaagacactggcccagtacacctccaagacatgcagcaactgtgggtttaccatcaccagcgccgactacgacagggtgctggagaagctgaagaagacagcaacaggctggatgaccacaattaacggcaaggagctgaaggtggagggccagattacctactacaacagatacaagagacagaacgtagtcaaggacctgtccgtcgagctggatagactgagcgaagaatctgtgaacaacgacatctcctcctggacaaagggcagaagcggagaagctctgagcctcctgaagaaaagattctcccatagacccgtgcaggagaagttcgtgtgcctgaactgcggcttcgagacacacgcagccgagcaagccgccctgaacatcgccagatcctggctgttcctgcggagccaggagtacaagaaataccagacaaacaagacaaccggcaacaccgataagagagccttcgtcgagacctggcagtccttttaccggaagaagcttaaggaggtgtggaaacctgccgtgcggtctggcggatctggcggaggctccaccagccccaagaaaaagagaaaagtctaagctgccttctgcggggcttgccttctggccatgcccttcttctctcccttgcacctgtacctcttggtctttgaataaagcctgagtaggaaggctagcaaaaaaaaaaaaaaaaaaaaaaaaaaaaaaaaaaaaaaaaaaaaaaaaaaaaaaaaaaaaaaaaaaaaaaaaaaaaaaaa

SEQ ID NO: 12455 - RNA, 5821 nt, synthetic construct
  source 1..5821: mol_type = other RNA
aggaaataagagagaaaagaagagtaagaagaaatataagagccaccatggcccctaagaagaagcgtaaagtgagccggatggaacgcctcgtctacgaggtgcggcagaagtgcagaaacatcgaggacatctgcatctcctgcggatctctgaacgtgaccctggagcacccactgttcatcggcggcatgtgccagaactgtaaaaactgttttctggagtgtgcctatcaatacgacgatgacggctaccagagctactgcaccatctgttgcggcggaagagaggtgctgatgtgtggaaataacaactgctgccggtgcttctgcgtggaatgcgtggacctgctggtgggccccggcgccgcccaggccgctattaaggaagatccttggaactgctacatgtgcggccacaagggcacatacggcctgctgagacggagagaggactggcctagcagactgcagatgttcttcgccaataaccacgaccaggagttcgacccccctaaggtgtaccctcccgtccccgccgagaagagaaagcccatccgggtcctgagcctgttcgatggcatcgccaccggtctgctggtgctgaaggacctgggcatccaggtggataggtacattgcctccgaggtgtgcgaggactccatcaccgtgggaatggtgcgtcatcagggcaagatcatgtacgtgggcgacgtgcggagcgtgacacagaagcatatccaggagtggggccctttcgacctggtgatcggcggcagcccttgcaatgacctgagcatcgtgaacccagcccggaagggcctgtacgagggaaccggcagactgttcttcgagttttacagactgctgcacgacgcccggcctaaggaaggcgacgaccggcccttcttttggctgttcgagaatgtggtggccatgggagtcagcgacaagcgggatattagccggttcctggagagcaaccccgtgatgatcgatgccaaggaagtgagcgccgcccaccgggccagatacttctggggcaatctgcctggcatgaacagacccctggccagcaccgtgaacgacaagctggagctgcaggagtgcctggagcacggccggatcgccaagttcagcaaggtgagaaccatcaccacccgaagcaacagcatcaaacaaggcaaggaccagcactttcctgtgttcatgaacgagaaggaggacatcctgtggtgtaccgagatggagagagtgttcgggttcccagtccactacacagatgtcagcaacatgtctagactggccagacagagactgctgggaagaagctggtccgtccctgtgatcagacacctgttcgcccctctgaaggagtacttcgcctgcgtgagcagcggcaacagcaacgccaacagccggggccccagcttctctagcggcctggtgccactgtccctgagagggagccacatgggccccatggagatctacaaaaccgtgagcgcctggaagcggcagcctgtgcgcgtgctgagcctgtttcggaatatcgataaagtcctgaaaagcctgggattcctggagagcggctctggctccggcggtggcaccctgaagtacgtggaggatgtgacaaacgtggtcagacgggatgtggagaagtggggccccttcgatctggtgtacggcagcacccaacccctgggcagctcttgtgaccggtgccctggctggtacatgtttcagttccaccggatcctgcagtacgccctgccgagacaggagtcccagcggccattcttttggattttcatggacaacttgctgctgaccgaggatgaccaggaaactaccactcggttcctgcagaccgaagccgtgaccctgcaggacgtgagaggccgggactaccagaacgccatgcgggtgtggtccaacatccctggactgaaaagcaagcacgcacctctgacccctaaagaagaggagtacctgcaggcccaggtgcggagcagaagcaagctggacgcccctaaggtggatctgctggtgaagaattgcctcctgcccctgagagagtacttcaagtatttcagccagaatagtctgcccctgggaggcagcggcggcggcgtgacctacgaggacgtgcacgtgaacttcacccaggaggagtgggccctgctggaccccagccagaagaagctgtacaaggacgtgatgctggagacctacaggaacctgaacgccatcggcttcagctgggaggcccagaacatcgaggagcactgccagagcttcggcaggcacaggaggtgcgagaggagccagagggccgagaagcccagcgagtacacccagcccgacaagggcttcgccctgagggcccacagccacgcccagaggcacgagggcggcccaagcagcggcgcccctcctcccagcggcggcagcccagccggctccccaacctctaccgaggagggcacctctgagtccgccacccccgagagcggccctggcacctccaccgagcccagcgagggcagcgcacccggcagccctgccggcagccccacctccacagaggagggaaccagcaccgagcccagcgaaggcagcgccccaggcaccagcaccgagcctagtgagcaggagattaaacggatcaacaagatcagaagaagacttgtgaaagacagcaacaccaagaaggccggcaagacaggccccatgaaaaccctgctggttagagtgatgacacccgatctgagagagcggctggaaaacctgagaaagaagcctgaaaatatcccccagcccatcagcaatacatctagagccaacctgaataagctgctgaccgattacaccgaaatgaagaaggcgatcctgcatgtgtactgggaagagttccagaaggaccctgtgggcctgatgagccgggtggcccagcctgccagcaagaagatcgatcagaacaagctgaaacctgagatggacgagaagggcaacctgaccaccgccggctttgcctgctctcagtgtggccagcccctgttcgtgtacaagctggagcaggtgtctgagaagggcaaggcttacaccaactacttcggacggtgcaatgtggccgagcacgaaaagctgatcctgctggcccagctgaagcccgagaaggatagcgacgaagccgtgacatatagcctgggaaagtttgggcagagggccctggatttctacagcattcatgtgaccaaggagtccacccaccccgtgaagcccctggcccagatcgccggaaacagatacgcctccggacctgtgggaaaggccctgagcgacgcatgtatgggcacaatcgcctccttcctgtctaagtaccaggacatcatcatcgaacaccagaaggtggtgaagggcaaccagaagagactggagagcctgcgggagctggccggcaaggaaaacctggaataccctagcgtgaccctgccacctcagcctcacaccaaggagggcgttgatgcctacaacgaagtgatcgcccgggtgcgaatgtgggtgaacctgaacctgtggcagaagctgaagctaagcagagatgatgccaagcctctgctgagactgaagggattcccttcctttcctctggtcgagagacaggccaacgaagtggactggtgggacatggtgtgtaacgtgaagaagctgatcaacgagaaaaaggaggatggcaaggtgttttggcagaatctggctggctacaagagacaggaagccctgagaccatacctgagcagcgaggaagatcggaagaagggaaagaaattcgctcggtaccagctgggcgacctgctgctgcacctggaaaagaagcacggcgaggactggggaaaggtgtacgacgaggcctgggagcggattgacaagaaagtggaaggcctgagcaagcacatcaagctggaagaggaacggagaagcgaggacgcccagagcaaggccgccctgaccgactggctgcgggctaaggccagcttcgtgatcgagggcctgaaggaggccgacaaggacgagttctgcagatgcgagctgaagctgcagaagtggtacggggacctgcggggaaagcccttcgccatcgaagccgagaacagcatcctggacatcagcggcttcagcaagcagtacaactgtgccttcatctggcagaaggacggcgtgaagaagctgaacctgtacctgatcatcaactacttcaagggcggcaagctgcggttcaagaagatcaaacctgaagccttcgaagccaacagattctacaccgtgatcaacaaaaagagcggcgagatcgtgcccatggaggtgaacttcaacttcgacgaccccaacctgatcatcctgcctctggcctttggcaagagacagggcagagaattcatctggaacgacctgctgtccctggaaaccggcagcctgaagctggccaacggaagagtgatcgagaagacactgtacaacagaagaacccggcaggatgagcctgccctgttcgtggccctgaccttcgagcggcgggaggtcctggactcctccaatatcaaaccaatgaacctgatcggcgtggcaagaggcgaaaacatccccgccgtgatcgccctgaccgaccccgagggctgcccactgagccggtttaaggatagcctgggaaacccaacccacatcctgagaatcggcgagagctataaggagaagcagcggaccatccaggccaagaaggaggtggagcagcggagagccggcggctacagccggaagtacgccagcaaagccaagaatctggcagacgatatggtgagaaacaccgctagagatctgctgtactacgccgtgacccaggatgccatgctgatcttcgccaacctgagccggggcttcggccggcagggcaagcggaccttcatggccgagagacagtacacacggatggaggactggctgaccgccaagctggcctacgagggcctgagcaagacctacctgtccaagacactggcccagtacacctccaagacatgcagcaactgtgggtttaccatcaccagcgccgactacgacagggtgctggagaagctgaagaagacagcaacaggctggatgaccacaattaacggcaaggagctgaaggtggagggccagattacctactacaacagatacaagagacagaacgtagtcaaggacctgtccgtcgagctggatagactgagcgaagaatctgtgaacaacgacatctcctcctggacaaagggcagaagcggagaagctctgagcctcctgaagaaaagattctcccatagacccgtgcaggagaagttcgtgtgcctgaactgcggcttcgagacacacgcagccgagcaagccgccctgaacatcgccagatcctggctgttcctgcggagccaggagtacaagaaataccagacaaacaagacaaccggcaacaccgataagagagccttcgtcgagacctggcagtccttttaccggaagaagcttaaggaggtgtggaaacctgccgtgcggtctggcggatctggcggaggctccaccagccccaagaaaaagagaaaagtctaagctgccttctgcggggcttgccttctggccatgcccttcttctctcccttgcacctgtacctcttggtctttgaataaagcctgagtaggaaggctagcaaaaaaaaaaaaaaaaaaaaaaaaaaaaaaaaaaaaaaaaaaaaaaaaaaaaaaaaaaaaaaaaaaaaaaaaaaaaaaaa

SEQ ID NO: 12456 - RNA, 5785 nt, synthetic construct
  source 1..5785: mol_type = other RNA
aggaaataagagagaaaagaagagtaagaagaaatataagagccaccatggcccctaagaagaagcgtaaagtgagccggatggaacgcctcgtctacgaggtgcggcagaagtgcagaaacatcgaggacatctgcatctcctgcggatctctgaacgtgaccctggagcacccactgttcatcggcggcatgtgccagaactgtaaaaactgttttctggagtgtgcctatcaatacgacgatgacggctaccagagctactgcaccatctgttgcggcggaagagaggtgctgatgtgtggaaataacaactgctgccggtgcttctgcgtggaatgcgtggacctgctggtgggccccggcgccgcccaggccgctattaaggaagatccttggaactgctacatgtgcggccacaagggcacatacggcctgctgagacggagagaggactggcctagcagactgcagatgttcttcgccaataaccacgaccaggagttcgacccccctaaggtgtaccctcccgtccccgccgagaagagaaagcccatccgggtcctgagcctgttcgatggcatcgccaccggtctgctggtgctgaaggacctgggcatccaggtggataggtacattgcctccgaggtgtgcgaggactccatcaccgtgggaatggtgcgtcatcagggcaagatcatgtacgtgggcgacgtgcggagcgtgacacagaagcatatccaggagtggggccctttcgacctggtgatcggcggcagcccttgcaatgacctgagcatcgtgaacccagcccggaagggcctgtacgagggaaccggcagactgttcttcgagttttacagactgctgcacgacgcccggcctaaggaaggcgacgaccggcccttcttttggctgttcgagaatgtggtggccatgggagtcagcgacaagcgggatattagccggttcctggagagcaaccccgtgatgatcgatgccaaggaagtgagcgccgcccaccgggccagatacttctggggcaatctgcctggcatgaacagacccctggccagcaccgtgaacgacaagctggagctgcaggagtgcctggagcacggccggatcgccaagttcagcaaggtgagaaccatcaccacccgaagcaacagcatcaaacaaggcaaggaccagcactttcctgtgttcatgaacgagaaggaggacatcctgtggtgtaccgagatggagagagtgttcgggttcccagtccactacacagatgtcagcaacatgtctagactggccagacagagactgctgggaagaagctggtccgtccctgtgatcagacacctgttcgcccctctgaaggagtacttcgcctgcgtgagcagcggcaacagcaacgccaacagccggggccccagcttctctagcggcctggtgccactgtccctgagagggagccacatgggccccatggagatctacaaaaccgtgagcgcctggaagcggcagcctgtgcgcgtgctgagcctgtttcggaatatcgataaagtcctgaaaagcctgggattcctggagagcggctctggctccggcggtggcaccctgaagtacgtggaggatgtgacaaacgtggtcagacgggatgtggagaagtggggccccttcgatctggtgtacggcagcacccaacccctgggcagctcttgtgaccggtgccctggctggtacatgtttcagttccaccggatcctgcagtacgccctgccgagacaggagtcccagcggccattcttttggattttcatggacaacttgctgctgaccgaggatgaccaggaaactaccactcggttcctgcagaccgaagccgtgaccctgcaggacgtgagaggccgggactaccagaacgccatgcgggtgtggtccaacatccctggactgaaaagcaagcacgcacctctgacccctaaagaagaggagtacctgcaggcccaggtgcggagcagaagcaagctggacgcccctaaggtggatctgctggtgaagaattgcctcctgcccctgagagagtacttcaagtatttcagccagaatagtctgcccctgggaggcagcggcggcggcatggccggcgaggccgaggcccagctggaccccagcctgcagggcctggtgatgttcgaggacgtgaccgtgtacttcagcagggaggagtggggcctgctgaacgtgacccagaagggcctgtacagggacgtgatgctggagaacttcgccctggtgagcagcctgggcctggcccccagcaggagccccgtgttcacccagctggaggacgacgagcagagctgggtgcccaactgggtgggcggcccaagcagcggcgcccctcctcccagcggcggcagcccagccggctccccaacctctaccgaggagggcacctctgagtccgccacccccgagagcggccctggcacctccaccgagcccagcgagggcagcgcacccggcagccctgccggcagccccacctccacagaggagggaaccagcaccgagcccagcgaaggcagcgccccaggcaccagcaccgagcctagtgagcaggagattaaacggatcaacaagatcagaagaagacttgtgaaagacagcaacaccaagaaggccggcaagacaggccccatgaaaaccctgctggttagagtgatgacacccgatctgagagagcggctggaaaacctgagaaagaagcctgaaaatatcccccagcccatcagcaatacatctagagccaacctgaataagctgctgaccgattacaccgaaatgaagaaggcgatcctgcatgtgtactgggaagagttccagaaggaccctgtgggcctgatgagccgggtggcccagcctgccagcaagaagatcgatcagaacaagctgaaacctgagatggacgagaagggcaacctgaccaccgccggctttgcctgctctcagtgtggccagcccctgttcgtgtacaagctggagcaggtgtctgagaagggcaaggcttacaccaactacttcggacggtgcaatgtggccgagcacgaaaagctgatcctgctggcccagctgaagcccgagaaggatagcgacgaagccgtgacatatagcctgggaaagtttgggcagagggccctggatttctacagcattcatgtgaccaaggagtccacccaccccgtgaagcccctggcccagatcgccggaaacagatacgcctccggacctgtgggaaaggccctgagcgacgcatgtatgggcacaatcgcctccttcctgtctaagtaccaggacatcatcatcgaacaccagaaggtggtgaagggcaaccagaagagactggagagcctgcgggagctggccggcaaggaaaacctggaataccctagcgtgaccctgccacctcagcctcacaccaaggagggcgttgatgcctacaacgaagtgatcgcccgggtgcgaatgtgggtgaacctgaacctgtggcagaagctgaagctaagcagagatgatgccaagcctctgctgagactgaagggattcccttcctttcctctggtcgagagacaggccaacgaagtggactggtgggacatggtgtgtaacgtgaagaagctgatcaacgagaaaaaggaggatggcaaggtgttttggcagaatctggctggctacaagagacaggaagccctgagaccatacctgagcagcgaggaagatcggaagaagggaaagaaattcgctcggtaccagctgggcgacctgctgctgcacctggaaaagaagcacggcgaggactggggaaaggtgtacgacgaggcctgggagcggattgacaagaaagtggaaggcctgagcaagcacatcaagctggaagaggaacggagaagcgaggacgcccagagcaaggccgccctgaccgactggctgcgggctaaggccagcttcgtgatcgagggcctgaaggaggccgacaaggacgagttctgcagatgcgagctgaagctgcagaagtggtacggggacctgcggggaaagcccttcgccatcgaagccgagaacagcatcctggacatcagcggcttcagcaagcagtacaactgtgccttcatctggcagaaggacggcgtgaagaagctgaacctgtacctgatcatcaactacttcaagggcggcaagctgcggttcaagaagatcaaacctgaagccttcgaagccaacagattctacaccgtgatcaacaaaaagagcggcgagatcgtgcccatggaggtgaacttcaacttcgacgaccccaacctgatcatcctgcctctggcctttggcaagagacagggcagagaattcatctggaacgacctgctgtccctggaaaccggcagcctgaagctggccaacggaagagtgatcgagaagacactgtacaacagaagaacccggcaggatgagcctgccctgttcgtggccctgaccttcgagcggcgggaggtcctggactcctccaatatcaaaccaatgaacctgatcggcgtggcaagaggcgaaaacatccccgccgtgatcgccctgaccgaccccgagggctgcccactgagccggtttaaggatagcctgggaaacccaacccacatcctgagaatcggcgagagctataaggagaagcagcggaccatccaggccaagaaggaggtggagcagcggagagccggcggctacagccggaagtacgccagcaaagccaagaatctggcagacgatatggtgagaaacaccgctagagatctgctgtactacgccgtgacccaggatgccatgctgatcttcgccaacctgagccggggcttcggccggcagggcaagcggaccttcatggccgagagacagtacacacggatggaggactggctgaccgccaagctggcctacgagggcctgagcaagacctacctgtccaagacactggcccagtacacctccaagacatgcagcaactgtgggtttaccatcaccagcgccgactacgacagggtgctggagaagctgaagaagacagcaacaggctggatgaccacaattaacggcaaggagctgaaggtggagggccagattacctactacaacagatacaagagacagaacgtagtcaaggacctgtccgtcgagctggatagactgagcgaagaatctgtgaacaacgacatctcctcctggacaaagggcagaagcggagaagctctgagcctcctgaagaaaagattctcccatagacccgtgcaggagaagttcgtgtgcctgaactgcggcttcgagacacacgcagccgagcaagccgccctgaacatcgccagatcctggctgttcctgcggagccaggagtacaagaaataccagacaaacaagacaaccggcaacaccgataagagagccttcgtcgagacctggcagtccttttaccggaagaagcttaaggaggtgtggaaacctgccgtgcggtctggcggatctggcggaggctccaccagccccaagaaaaagagaaaagtctaagctgccttctgcggggcttgccttctggccatgcccttcttctctcccttgcacctgtacctcttggtctttgaataaagcctgagtaggaaggctagcaaaaaaaaaaaaaaaaaaaaaaaaaaaaaaaaaaaaaaaaaaaaaaaaaaaaaaaaaaaaaaaaaaaaaaaaaaaaaaaa

SEQ ID NO: 12457 - RNA, 5785 nt, synthetic construct
  source 1..5785: mol_type = other RNA
aggaaataagagagaaaagaagagtaagaagaaatataagagccaccatggcccctaagaagaagcgtaaagtgagccggatggaacgcctcgtctacgaggtgcggcagaagtgcagaaacatcgaggacatctgcatctcctgcggatctctgaacgtgaccctggagcacccactgttcatcggcggcatgtgccagaactgtaaaaactgttttctggagtgtgcctatcaatacgacgatgacggctaccagagctactgcaccatctgttgcggcggaagagaggtgctgatgtgtggaaataacaactgctgccggtgcttctgcgtggaatgcgtggacctgctggtgggccccggcgccgcccaggccgctattaaggaagatccttggaactgctacatgtgcggccacaagggcacatacggcctgctgagacggagagaggactggcctagcagactgcagatgttcttcgccaataaccacgaccaggagttcgacccccctaaggtgtaccctcccgtccccgccgagaagagaaagcccatccgggtcctgagcctgttcgatggcatcgccaccggtctgctggtgctgaaggacctgggcatccaggtggataggtacattgcctccgaggtgtgcgaggactccatcaccgtgggaatggtgcgtcatcagggcaagatcatgtacgtgggcgacgtgcggagcgtgacacagaagcatatccaggagtggggccctttcgacctggtgatcggcggcagcccttgcaatgacctgagcatcgtgaacccagcccggaagggcctgtacgagggaaccggcagactgttcttcgagttttacagactgctgcacgacgcccggcctaaggaaggcgacgaccggcccttcttttggctgttcgagaatgtggtggccatgggagtcagcgacaagcgggatattagccggttcctggagagcaaccccgtgatgatcgatgccaaggaagtgagcgccgcccaccgggccagatacttctggggcaatctgcctggcatgaacagacccctggccagcaccgtgaacgacaagctggagctgcaggagtgcctggagcacggccggatcgccaagttcagcaaggtgagaaccatcaccacccgaagcaacagcatcaaacaaggcaaggaccagcactttcctgtgttcatgaacgagaaggaggacatcctgtggtgtaccgagatggagagagtgttcgggttcccagtccactacacagatgtcagcaacatgtctagactggccagacagagactgctgggaagaagctggtccgtccctgtgatcagacacctgttcgcccctctgaaggagtacttcgcctgcgtgagcagcggcaacagcaacgccaacagccggggccccagcttctctagcggcctggtgccactgtccctgagagggagccacatgggccccatggagatctacaaaaccgtgagcgcctggaagcggcagcctgtgcgcgtgctgagcctgtttcggaatatcgataaagtcctgaaaagcctgggattcctggagagcggctctggctccggcggtggcaccctgaagtacgtggaggatgtgacaaacgtggtcagacgggatgtggagaagtggggccccttcgatctggtgtacggcagcacccaacccctgggcagctcttgtgaccggtgccctggctggtacatgtttcagttccaccggatcctgcagtacgccctgccgagacaggagtcccagcggccattcttttggattttcatggacaacttgctgctgaccgaggatgaccaggaaactaccactcggttcctgcagaccgaagccgtgaccctgcaggacgtgagaggccgggactaccagaacgccatgcgggtgtggtccaacatccctggactgaaaagcaagcacgcacctctgacccctaaagaagaggagtacctgcaggcccaggtgcggagcagaagcaagctggacgcccctaaggtggatctgctggtgaagaattgcctcctgcccctgagagagtacttcaagtatttcagccagaatagtctgcccctgggaggcagcggcggcggccaggagcccgtgaccttcgaggacgtggccgtgtacttcacccagaaccagtgggccaagctggaccccacccagagggccctgtacagggaggtgatgctggagaactacgccaacgtggccagcctgggcgtggccttccccttccccaagcccgacctggtgagccagctggagaggggcgaggtgccctggggccccgacccctgggaggccgaggtgctgaggggcatctgccccggcggcggcccaagcagcggcgcccctcctcccagcggcggcagcccagccggctccccaacctctaccgaggagggcacctctgagtccgccacccccgagagcggccctggcacctccaccgagcccagcgagggcagcgcacccggcagccctgccggcagccccacctccacagaggagggaaccagcaccgagcccagcgaaggcagcgccccaggcaccagcaccgagcctagtgagcaggagattaaacggatcaacaagatcagaagaagacttgtgaaagacagcaacaccaagaaggccggcaagacaggccccatgaaaaccctgctggttagagtgatgacacccgatctgagagagcggctggaaaacctgagaaagaagcctgaaaatatcccccagcccatcagcaatacatctagagccaacctgaataagctgctgaccgattacaccgaaatgaagaaggcgatcctgcatgtgtactgggaagagttccagaaggaccctgtgggcctgatgagccgggtggcccagcctgccagcaagaagatcgatcagaacaagctgaaacctgagatggacgagaagggcaacctgaccaccgccggctttgcctgctctcagtgtggccagcccctgttcgtgtacaagctggagcaggtgtctgagaagggcaaggcttacaccaactacttcggacggtgcaatgtggccgagcacgaaaagctgatcctgctggcccagctgaagcccgagaaggatagcgacgaagccgtgacatatagcctgggaaagtttgggcagagggccctggatttctacagcattcatgtgaccaaggagtccacccaccccgtgaagcccctggcccagatcgccggaaacagatacgcctccggacctgtgggaaaggccctgagcgacgcatgtatgggcacaatcgcctccttcctgtctaagtaccaggacatcatcatcgaacaccagaaggtggtgaagggcaaccagaagagactggagagcctgcgggagctggccggcaaggaaaacctggaataccctagcgtgaccctgccacctcagcctcacaccaaggagggcgttgatgcctacaacgaagtgatcgcccgggtgcgaatgtgggtgaacctgaacctgtggcagaagctgaagctaagcagagatgatgccaagcctctgctgagactgaagggattcccttcctttcctctggtcgagagacaggccaacgaagtggactggtgggacatggtgtgtaacgtgaagaagctgatcaacgagaaaaaggaggatggcaaggtgttttggcagaatctggctggctacaagagacaggaagccctgagaccatacctgagcagcgaggaagatcggaagaagggaaagaaattcgctcggtaccagctgggcgacctgctgctgcacctggaaaagaagcacggcgaggactggggaaaggtgtacgacgaggcctgggagcggattgacaagaaagtggaaggcctgagcaagcacatcaagctggaagaggaacggagaagcgaggacgcccagagcaaggccgccctgaccgactggctgcgggctaaggccagcttcgtgatcgagggcctgaaggaggccgacaaggacgagttctgcagatgcgagctgaagctgcagaagtggtacggggacctgcggggaaagcccttcgccatcgaagccgagaacagcatcctggacatcagcggcttcagcaagcagtacaactgtgccttcatctggcagaaggacggcgtgaagaagctgaacctgtacctgatcatcaactacttcaagggcggcaagctgcggttcaagaagatcaaacctgaagccttcgaagccaacagattctacaccgtgatcaacaaaaagagcggcgagatcgtgcccatggaggtgaacttcaacttcgacgaccccaacctgatcatcctgcctctggcctttggcaagagacagggcagagaattcatctggaacgacctgctgtccctggaaaccggcagcctgaagctggccaacggaagagtgatcgagaagacactgtacaacagaagaacccggcaggatgagcctgccctgttcgtggccctgaccttcgagcggcgggaggtcctggactcctccaatatcaaaccaatgaacctgatcggcgtggcaagaggcgaaaacatccccgccgtgatcgccctgaccgaccccgagggctgcccactgagccggtttaaggatagcctgggaaacccaacccacatcctgagaatcggcgagagctataaggagaagcagcggaccatccaggccaagaaggaggtggagcagcggagagccggcggctacagccggaagtacgccagcaaagccaagaatctggcagacgatatggtgagaaacaccgctagagatctgctgtactacgccgtgacccaggatgccatgctgatcttcgccaacctgagccggggcttcggccggcagggcaagcggaccttcatggccgagagacagtacacacggatggaggactggctgaccgccaagctggcctacgagggcctgagcaagacctacctgtccaagacactggcccagtacacctccaagacatgcagcaactgtgggtttaccatcaccagcgccgactacgacagggtgctggagaagctgaagaagacagcaacaggctggatgaccacaattaacggcaaggagctgaaggtggagggccagattacctactacaacagatacaagagacagaacgtagtcaaggacctgtccgtcgagctggatagactgagcgaagaatctgtgaacaacgacatctcctcctggacaaagggcagaagcggagaagctctgagcctcctgaagaaaagattctcccatagacccgtgcaggagaagttcgtgtgcctgaactgcggcttcgagacacacgcagccgagcaagccgccctgaacatcgccagatcctggctgttcctgcggagccaggagtacaagaaataccagacaaacaagacaaccggcaacaccgataagagagccttcgtcgagacctggcagtccttttaccggaagaagcttaaggaggtgtggaaacctgccgtgcggtctggcggatctggcggaggctccaccagccccaagaaaaagagaaaagtctaagctgccttctgcggggcttgccttctggccatgcccttcttctctcccttgcacctgtacctcttggtctttgaataaagcctgagtaggaaggctagcaaaaaaaaaaaaaaaaaaaaaaaaaaaaaaaaaaaaaaaaaaaaaaaaaaaaaaaaaaaaaaaaaaaaaaaaaaaaaaaa

SEQ ID NO: 12458 - RNA, 5785 nt, synthetic construct
  source 1..5785: mol_type = other RNA
aggaaataagagagaaaagaagagtaagaagaaatataagagccaccatggcccctaagaagaagcgtaaagtgagccggatggaacgcctcgtctacgaggtgcggcagaagtgcagaaacatcgaggacatctgcatctcctgcggatctctgaacgtgaccctggagcacccactgttcatcggcggcatgtgccagaactgtaaaaactgttttctggagtgtgcctatcaatacgacgatgacggctaccagagctactgcaccatctgttgcggcggaagagaggtgctgatgtgtggaaataacaactgctgccggtgcttctgcgtggaatgcgtggacctgctggtgggccccggcgccgcccaggccgctattaaggaagatccttggaactgctacatgtgcggccacaagggcacatacggcctgctgagacggagagaggactggcctagcagactgcagatgttcttcgccaataaccacgaccaggagttcgacccccctaaggtgtaccctcccgtccccgccgagaagagaaagcccatccgggtcctgagcctgttcgatggcatcgccaccggtctgctggtgctgaaggacctgggcatccaggtggataggtacattgcctccgaggtgtgcgaggactccatcaccgtgggaatggtgcgtcatcagggcaagatcatgtacgtgggcgacgtgcggagcgtgacacagaagcatatccaggagtggggccctttcgacctggtgatcggcggcagcccttgcaatgacctgagcatcgtgaacccagcccggaagggcctgtacgagggaaccggcagactgttcttcgagttttacagactgctgcacgacgcccggcctaaggaaggcgacgaccggcccttcttttggctgttcgagaatgtggtggccatgggagtcagcgacaagcgggatattagccggttcctggagagcaaccccgtgatgatcgatgccaaggaagtgagcgccgcccaccgggccagatacttctggggcaatctgcctggcatgaacagacccctggccagcaccgtgaacgacaagctggagctgcaggagtgcctggagcacggccggatcgccaagttcagcaaggtgagaaccatcaccacccgaagcaacagcatcaaacaaggcaaggaccagcactttcctgtgttcatgaacgagaaggaggacatcctgtggtgtaccgagatggagagagtgttcgggttcccagtccactacacagatgtcagcaacatgtctagactggccagacagagactgctgggaagaagctggtccgtccctgtgatcagacacctgttcgcccctctgaaggagtacttcgcctgcgtgagcagcggcaacagcaacgccaacagccggggccccagcttctctagcggcctggtgccactgtccctgagagggagccacatgggccccatggagatctacaaaaccgtgagcgcctggaagcggcagcctgtgcgcgtgctgagcctgtttcggaatatcgataaagtcctgaaaagcctgggattcctggagagcggctctggctccggcggtggcaccctgaagtacgtggaggatgtgacaaacgtggtcagacgggatgtggagaagtggggccccttcgatctggtgtacggcagcacccaacccctgggcagctcttgtgaccggtgccctggctggtacatgtttcagttccaccggatcctgcagtacgccctgccgagacaggagtcccagcggccattcttttggattttcatggacaacttgctgctgaccgaggatgaccaggaaactaccactcggttcctgcagaccgaagccgtgaccctgcaggacgtgagaggccgggactaccagaacgccatgcgggtgtggtccaacatccctggactgaaaagcaagcacgcacctctgacccctaaagaagaggagtacctgcaggcccaggtgcggagcagaagcaagctggacgcccctaaggtggatctgctggtgaagaattgcctcctgcccctgagagagtacttcaagtatttcagccagaatagtctgcccctgggaggcagcggcggcggcatgaccaagttccaggaggccgtgaccttcaaggacgtggccgtggccttcaccgaggaggagctgggcctgctggacagcgcccagaggaagctgtacagggacgtgatgctggagaacttcaggaacctggtgagcgtgggccaccagagcttcaagcccgacgtgatcagccagctggagagggaggagaagctgtggatgaaggagctgcagacccagaggggcaagcacagcgagaccggcggcccaagcagcggcgcccctcctcccagcggcggcagcccagccggctccccaacctctaccgaggagggcacctctgagtccgccacccccgagagcggccctggcacctccaccgagcccagcgagggcagcgcacccggcagccctgccggcagccccacctccacagaggagggaaccagcaccgagcccagcgaaggcagcgccccaggcaccagcaccgagcctagtgagcaggagattaaacggatcaacaagatcagaagaagacttgtgaaagacagcaacaccaagaaggccggcaagacaggccccatgaaaaccctgctggttagagtgatgacacccgatctgagagagcggctggaaaacctgagaaagaagcctgaaaatatcccccagcccatcagcaatacatctagagccaacctgaataagctgctgaccgattacaccgaaatgaagaaggcgatcctgcatgtgtactgggaagagttccagaaggaccctgtgggcctgatgagccgggtggcccagcctgccagcaagaagatcgatcagaacaagctgaaacctgagatggacgagaagggcaacctgaccaccgccggctttgcctgctctcagtgtggccagcccctgttcgtgtacaagctggagcaggtgtctgagaagggcaaggcttacaccaactacttcggacggtgcaatgtggccgagcacgaaaagctgatcctgctggcccagctgaagcccgagaaggatagcgacgaagccgtgacatatagcctgggaaagtttgggcagagggccctggatttctacagcattcatgtgaccaaggagtccacccaccccgtgaagcccctggcccagatcgccggaaacagatacgcctccggacctgtgggaaaggccctgagcgacgcatgtatgggcacaatcgcctccttcctgtctaagtaccaggacatcatcatcgaacaccagaaggtggtgaagggcaaccagaagagactggagagcctgcgggagctggccggcaaggaaaacctggaataccctagcgtgaccctgccacctcagcctcacaccaaggagggcgttgatgcctacaacgaagtgatcgcccgggtgcgaatgtgggtgaacctgaacctgtggcagaagctgaagctaagcagagatgatgccaagcctctgctgagactgaagggattcccttcctttcctctggtcgagagacaggccaacgaagtggactggtgggacatggtgtgtaacgtgaagaagctgatcaacgagaaaaaggaggatggcaaggtgttttggcagaatctggctggctacaagagacaggaagccctgagaccatacctgagcagcgaggaagatcggaagaagggaaagaaattcgctcggtaccagctgggcgacctgctgctgcacctggaaaagaagcacggcgaggactggggaaaggtgtacgacgaggcctgggagcggattgacaagaaagtggaaggcctgagcaagcacatcaagctggaagaggaacggagaagcgaggacgcccagagcaaggccgccctgaccgactggctgcgggctaaggccagcttcgtgatcgagggcctgaaggaggccgacaaggacgagttctgcagatgcgagctgaagctgcagaagtggtacggggacctgcggggaaagcccttcgccatcgaagccgagaacagcatcctggacatcagcggcttcagcaagcagtacaactgtgccttcatctggcagaaggacggcgtgaagaagctgaacctgtacctgatcatcaactacttcaagggcggcaagctgcggttcaagaagatcaaacctgaagccttcgaagccaacagattctacaccgtgatcaacaaaaagagcggcgagatcgtgcccatggaggtgaacttcaacttcgacgaccccaacctgatcatcctgcctctggcctttggcaagagacagggcagagaattcatctggaacgacctgctgtccctggaaaccggcagcctgaagctggccaacggaagagtgatcgagaagacactgtacaacagaagaacccggcaggatgagcctgccctgttcgtggccctgaccttcgagcggcgggaggtcctggactcctccaatatcaaaccaatgaacctgatcggcgtggcaagaggcgaaaacatccccgccgtgatcgccctgaccgaccccgagggctgcccactgagccggtttaaggatagcctgggaaacccaacccacatcctgagaatcggcgagagctataaggagaagcagcggaccatccaggccaagaaggaggtggagcagcggagagccggcggctacagccggaagtacgccagcaaagccaagaatctggcagacgatatggtgagaaacaccgctagagatctgctgtactacgccgtgacccaggatgccatgctgatcttcgccaacctgagccggggcttcggccggcagggcaagcggaccttcatggccgagagacagtacacacggatggaggactggctgaccgccaagctggcctacgagggcctgagcaagacctacctgtccaagacactggcccagtacacctccaagacatgcagcaactgtgggtttaccatcaccagcgccgactacgacagggtgctggagaagctgaagaagacagcaacaggctggatgaccacaattaacggcaaggagctgaaggtggagggccagattacctactacaacagatacaagagacagaacgtagtcaaggacctgtccgtcgagctggatagactgagcgaagaatctgtgaacaacgacatctcctcctggacaaagggcagaagcggagaagctctgagcctcctgaagaaaagattctcccatagacccgtgcaggagaagttcgtgtgcctgaactgcggcttcgagacacacgcagccgagcaagccgccctgaacatcgccagatcctggctgttcctgcggagccaggagtacaagaaataccagacaaacaagacaaccggcaacaccgataagagagccttcgtcgagacctggcagtccttttaccggaagaagcttaaggaggtgtggaaacctgccgtgcggtctggcggatctggcggaggctccaccagccccaagaaaaagagaaaagtctaagctgccttctgcggggcttgccttctggccatgcccttcttctctcccttgcacctgtacctcttggtctttgaataaagcctgagtaggaaggctagcaaaaaaaaaaaaaaaaaaaaaaaaaaaaaaaaaaaaaaaaaaaaaaaaaaaaaaaaaaaaaaaaaaaaaaaaaaaaaaaa

SEQ ID NO: 12459 - RNA, 5785 nt, synthetic construct
  source 1..5785: mol_type = other RNA
aggaaataagagagaaaagaagagtaagaagaaatataagagccaccatggcccctaagaagaagcgtaaagtgagccggatggaacgcctcgtctacgaggtgcggcagaagtgcagaaacatcgaggacatctgcatctcctgcggatctctgaacgtgaccctggagcacccactgttcatcggcggcatgtgccagaactgtaaaaactgttttctggagtgtgcctatcaatacgacgatgacggctaccagagctactgcaccatctgttgcggcggaagagaggtgctgatgtgtggaaataacaactgctgccggtgcttctgcgtggaatgcgtggacctgctggtgggccccggcgccgcccaggccgctattaaggaagatccttggaactgctacatgtgcggccacaagggcacatacggcctgctgagacggagagaggactggcctagcagactgcagatgttcttcgccaataaccacgaccaggagttcgacccccctaaggtgtaccctcccgtccccgccgagaagagaaagcccatccgggtcctgagcctgttcgatggcatcgccaccggtctgctggtgctgaaggacctgggcatccaggtggataggtacattgcctccgaggtgtgcgaggactccatcaccgtgggaatggtgcgtcatcagggcaagatcatgtacgtgggcgacgtgcggagcgtgacacagaagcatatccaggagtggggccctttcgacctggtgatcggcggcagcccttgcaatgacctgagcatcgtgaacccagcccggaagggcctgtacgagggaaccggcagactgttcttcgagttttacagactgctgcacgacgcccggcctaaggaaggcgacgaccggcccttcttttggctgttcgagaatgtggtggccatgggagtcagcgacaagcgggatattagccggttcctggagagcaaccccgtgatgatcgatgccaaggaagtgagcgccgcccaccgggccagatacttctggggcaatctgcctggcatgaacagacccctggccagcaccgtgaacgacaagctggagctgcaggagtgcctggagcacggccggatcgccaagttcagcaaggtgagaaccatcaccacccgaagcaacagcatcaaacaaggcaaggaccagcactttcctgtgttcatgaacgagaaggaggacatcctgtggtgtaccgagatggagagagtgttcgggttcccagtccactacacagatgtcagcaacatgtctagactggccagacagagactgctgggaagaagctggtccgtccctgtgatcagacacctgttcgcccctctgaaggagtacttcgcctgcgtgagcagcggcaacagcaacgccaacagccggggccccagcttctctagcggcctggtgccactgtccctgagagggagccacatgggccccatggagatctacaaaaccgtgagcgcctggaagcggcagcctgtgcgcgtgctgagcctgtttcggaatatcgataaagtcctgaaaagcctgggattcctggagagcggctctggctccggcggtggcaccctgaagtacgtggaggatgtgacaaacgtggtcagacgggatgtggagaagtggggccccttcgatctggtgtacggcagcacccaacccctgggcagctcttgtgaccggtgccctggctggtacatgtttcagttccaccggatcctgcagtacgccctgccgagacaggagtcccagcggccattcttttggattttcatggacaacttgctgctgaccgaggatgaccaggaaactaccactcggttcctgcagaccgaagccgtgaccctgcaggacgtgagaggccgggactaccagaacgccatgcgggtgtggtccaacatccctggactgaaaagcaagcacgcacctctgacccctaaagaagaggagtacctgcaggcccaggtgcggagcagaagcaagctggacgcccctaaggtggatctgctggtgaagaattgcctcctgcccctgagagagtacttcaagtatttcagccagaatagtctgcccctgggaggcagcggcggcggcatgaacgccgtgacctacgaggacgtgcacgtgaacttcacccaggaggagtgggccctgctggaccccagccagaagaagctgtacaaggacgtgatgctggagacctacaggaacctgaacgccatcggcttcaactgggacagcaagatcttcaagaacatcgtgcaggtgctggaggacaccgagggcatgaaggaggtgagggtgcagaggaagaggctgaacatcctgaacgtgatcggcggcccaagcagcggcgcccctcctcccagcggcggcagcccagccggctccccaacctctaccgaggagggcacctctgagtccgccacccccgagagcggccctggcacctccaccgagcccagcgagggcagcgcacccggcagccctgccggcagccccacctccacagaggagggaaccagcaccgagcccagcgaaggcagcgccccaggcaccagcaccgagcctagtgagcaggagattaaacggatcaacaagatcagaagaagacttgtgaaagacagcaacaccaagaaggccggcaagacaggccccatgaaaaccctgctggttagagtgatgacacccgatctgagagagcggctggaaaacctgagaaagaagcctgaaaatatcccccagcccatcagcaatacatctagagccaacctgaataagctgctgaccgattacaccgaaatgaagaaggcgatcctgcatgtgtactgggaagagttccagaaggaccctgtgggcctgatgagccgggtggcccagcctgccagcaagaagatcgatcagaacaagctgaaacctgagatggacgagaagggcaacctgaccaccgccggctttgcctgctctcagtgtggccagcccctgttcgtgtacaagctggagcaggtgtctgagaagggcaaggcttacaccaactacttcggacggtgcaatgtggccgagcacgaaaagctgatcctgctggcccagctgaagcccgagaaggatagcgacgaagccgtgacatatagcctgggaaagtttgggcagagggccctggatttctacagcattcatgtgaccaaggagtccacccaccccgtgaagcccctggcccagatcgccggaaacagatacgcctccggacctgtgggaaaggccctgagcgacgcatgtatgggcacaatcgcctccttcctgtctaagtaccaggacatcatcatcgaacaccagaaggtggtgaagggcaaccagaagagactggagagcctgcgggagctggccggcaaggaaaacctggaataccctagcgtgaccctgccacctcagcctcacaccaaggagggcgttgatgcctacaacgaagtgatcgcccgggtgcgaatgtgggtgaacctgaacctgtggcagaagctgaagctaagcagagatgatgccaagcctctgctgagactgaagggattcccttcctttcctctggtcgagagacaggccaacgaagtggactggtgggacatggtgtgtaacgtgaagaagctgatcaacgagaaaaaggaggatggcaaggtgttttggcagaatctggctggctacaagagacaggaagccctgagaccatacctgagcagcgaggaagatcggaagaagggaaagaaattcgctcggtaccagctgggcgacctgctgctgcacctggaaaagaagcacggcgaggactggggaaaggtgtacgacgaggcctgggagcggattgacaagaaagtggaaggcctgagcaagcacatcaagctggaagaggaacggagaagcgaggacgcccagagcaaggccgccctgaccgactggctgcgggctaaggccagcttcgtgatcgagggcctgaaggaggccgacaaggacgagttctgcagatgcgagctgaagctgcagaagtggtacggggacctgcggggaaagcccttcgccatcgaagccgagaacagcatcctggacatcagcggcttcagcaagcagtacaactgtgccttcatctggcagaaggacggcgtgaagaagctgaacctgtacctgatcatcaactacttcaagggcggcaagctgcggttcaagaagatcaaacctgaagccttcgaagccaacagattctacaccgtgatcaacaaaaagagcggcgagatcgtgcccatggaggtgaacttcaacttcgacgaccccaacctgatcatcctgcctctggcctttggcaagagacagggcagagaattcatctggaacgacctgctgtccctggaaaccggcagcctgaagctggccaacggaagagtgatcgagaagacactgtacaacagaagaacccggcaggatgagcctgccctgttcgtggccctgaccttcgagcggcgggaggtcctggactcctccaatatcaaaccaatgaacctgatcggcgtggcaagaggcgaaaacatccccgccgtgatcgccctgaccgaccccgagggctgcccactgagccggtttaaggatagcctgggaaacccaacccacatcctgagaatcggcgagagctataaggagaagcagcggaccatccaggccaagaaggaggtggagcagcggagagccggcggctacagccggaagtacgccagcaaagccaagaatctggcagacgatatggtgagaaacaccgctagagatctgctgtactacgccgtgacccaggatgccatgctgatcttcgccaacctgagccggggcttcggccggcagggcaagcggaccttcatggccgagagacagtacacacggatggaggactggctgaccgccaagctggcctacgagggcctgagcaagacctacctgtccaagacactggcccagtacacctccaagacatgcagcaactgtgggtttaccatcaccagcgccgactacgacagggtgctggagaagctgaagaagacagcaacaggctggatgaccacaattaacggcaaggagctgaaggtggagggccagattacctactacaacagatacaagagacagaacgtagtcaaggacctgtccgtcgagctggatagactgagcgaagaatctgtgaacaacgacatctcctcctggacaaagggcagaagcggagaagctctgagcctcctgaagaaaagattctcccatagacccgtgcaggagaagttcgtgtgcctgaactgcggcttcgagacacacgcagccgagcaagccgccctgaacatcgccagatcctggctgttcctgcggagccaggagtacaagaaataccagacaaacaagacaaccggcaacaccgataagagagccttcgtcgagacctggcagtccttttaccggaagaagcttaaggaggtgtggaaacctgccgtgcggtctggcggatctggcggaggctccaccagccccaagaaaaagagaaaagtctaagctgccttctgcggggcttgccttctggccatgcccttcttctctcccttgcacctgtacctcttggtctttgaataaagcctgagtaggaaggctagcaaaaaaaaaaaaaaaaaaaaaaaaaaaaaaaaaaaaaaaaaaaaaaaaaaaaaaaaaaaaaaaaaaaaaaaaaaaaaaaa

SEQ ID NO: 12460 - RNA, 5785 nt, synthetic construct
  source 1..5785: mol_type = other RNA
aggaaataagagagaaaagaagagtaagaagaaatataagagccaccatggcccctaagaagaagcgtaaagtgagccggatggaacgcctcgtctacgaggtgcggcagaagtgcagaaacatcgaggacatctgcatctcctgcggatctctgaacgtgaccctggagcacccactgttcatcggcggcatgtgccagaactgtaaaaactgttttctggagtgtgcctatcaatacgacgatgacggctaccagagctactgcaccatctgttgcggcggaagagaggtgctgatgtgtggaaataacaactgctgccggtgcttctgcgtggaatgcgtggacctgctggtgggccccggcgccgcccaggccgctattaaggaagatccttggaactgctacatgtgcggccacaagggcacatacggcctgctgagacggagagaggactggcctagcagactgcagatgttcttcgccaataaccacgaccaggagttcgacccccctaaggtgtaccctcccgtccccgccgagaagagaaagcccatccgggtcctgagcctgttcgatggcatcgccaccggtctgctggtgctgaaggacctgggcatccaggtggataggtacattgcctccgaggtgtgcgaggactccatcaccgtgggaatggtgcgtcatcagggcaagatcatgtacgtgggcgacgtgcggagcgtgacacagaagcatatccaggagtggggccctttcgacctggtgatcggcggcagcccttgcaatgacctgagcatcgtgaacccagcccggaagggcctgtacgagggaaccggcagactgttcttcgagttttacagactgctgcacgacgcccggcctaaggaaggcgacgaccggcccttcttttggctgttcgagaatgtggtggccatgggagtcagcgacaagcgggatattagccggttcctggagagcaaccccgtgatgatcgatgccaaggaagtgagcgccgcccaccgggccagatacttctggggcaatctgcctggcatgaacagacccctggccagcaccgtgaacgacaagctggagctgcaggagtgcctggagcacggccggatcgccaagttcagcaaggtgagaaccatcaccacccgaagcaacagcatcaaacaaggcaaggaccagcactttcctgtgttcatgaacgagaaggaggacatcctgtggtgtaccgagatggagagagtgttcgggttcccagtccactacacagatgtcagcaacatgtctagactggccagacagagactgctgggaagaagctggtccgtccctgtgatcagacacctgttcgcccctctgaaggagtacttcgcctgcgtgagcagcggcaacagcaacgccaacagccggggccccagcttctctagcggcctggtgccactgtccctgagagggagccacatgggccccatggagatctacaaaaccgtgagcgcctggaagcggcagcctgtgcgcgtgctgagcctgtttcggaatatcgataaagtcctgaaaagcctgggattcctggagagcggctctggctccggcggtggcaccctgaagtacgtggaggatgtgacaaacgtggtcagacgggatgtggagaagtggggccccttcgatctggtgtacggcagcacccaacccctgggcagctcttgtgaccggtgccctggctggtacatgtttcagttccaccggatcctgcagtacgccctgccgagacaggagtcccagcggccattcttttggattttcatggacaacttgctgctgaccgaggatgaccaggaaactaccactcggttcctgcagaccgaagccgtgaccctgcaggacgtgagaggccgggactaccagaacgccatgcgggtgtggtccaacatccctggactgaaaagcaagcacgcacctctgacccctaaagaagaggagtacctgcaggcccaggtgcggagcagaagcaagctggacgcccctaaggtggatctgctggtgaagaattgcctcctgcccctgagagagtacttcaagtatttcagccagaatagtctgcccctgggaggcagcggcggcggcatggtgaccttcgaggacgtggccgtgcacttcaccaagaccgagtggaccggcctgagccccgcccagagggccctgtacaggagcgtgatgctggagaacttcggcaacctgaccgccctgggctaccccgtgcccaagcccgccctgatcagcctgctggagggcggcgacatggcctggggcctggaggcccaggacgacccccccgccgagaccaccaagaacgtgaggaaggacgtgggcggcccaagcagcggcgcccctcctcccagcggcggcagcccagccggctccccaacctctaccgaggagggcacctctgagtccgccacccccgagagcggccctggcacctccaccgagcccagcgagggcagcgcacccggcagccctgccggcagccccacctccacagaggagggaaccagcaccgagcccagcgaaggcagcgccccaggcaccagcaccgagcctagtgagcaggagattaaacggatcaacaagatcagaagaagacttgtgaaagacagcaacaccaagaaggccggcaagacaggccccatgaaaaccctgctggttagagtgatgacacccgatctgagagagcggctggaaaacctgagaaagaagcctgaaaatatcccccagcccatcagcaatacatctagagccaacctgaataagctgctgaccgattacaccgaaatgaagaaggcgatcctgcatgtgtactgggaagagttccagaaggaccctgtgggcctgatgagccgggtggcccagcctgccagcaagaagatcgatcagaacaagctgaaacctgagatggacgagaagggcaacctgaccaccgccggctttgcctgctctcagtgtggccagcccctgttcgtgtacaagctggagcaggtgtctgagaagggcaaggcttacaccaactacttcggacggtgcaatgtggccgagcacgaaaagctgatcctgctggcccagctgaagcccgagaaggatagcgacgaagccgtgacatatagcctgggaaagtttgggcagagggccctggatttctacagcattcatgtgaccaaggagtccacccaccccgtgaagcccctggcccagatcgccggaaacagatacgcctccggacctgtgggaaaggccctgagcgacgcatgtatgggcacaatcgcctccttcctgtctaagtaccaggacatcatcatcgaacaccagaaggtggtgaagggcaaccagaagagactggagagcctgcgggagctggccggcaaggaaaacctggaataccctagcgtgaccctgccacctcagcctcacaccaaggagggcgttgatgcctacaacgaagtgatcgcccgggtgcgaatgtgggtgaacctgaacctgtggcagaagctgaagctaagcagagatgatgccaagcctctgctgagactgaagggattcccttcctttcctctggtcgagagacaggccaacgaagtggactggtgggacatggtgtgtaacgtgaagaagctgatcaacgagaaaaaggaggatggcaaggtgttttggcagaatctggctggctacaagagacaggaagccctgagaccatacctgagcagcgaggaagatcggaagaagggaaagaaattcgctcggtaccagctgggcgacctgctgctgcacctggaaaagaagcacggcgaggactggggaaaggtgtacgacgaggcctgggagcggattgacaagaaagtggaaggcctgagcaagcacatcaagctggaagaggaacggagaagcgaggacgcccagagcaaggccgccctgaccgactggctgcgggctaaggccagcttcgtgatcgagggcctgaaggaggccgacaaggacgagttctgcagatgcgagctgaagctgcagaagtggtacggggacctgcggggaaagcccttcgccatcgaagccgagaacagcatcctggacatcagcggcttcagcaagcagtacaactgtgccttcatctggcagaaggacggcgtgaagaagctgaacctgtacctgatcatcaactacttcaagggcggcaagctgcggttcaagaagatcaaacctgaagccttcgaagccaacagattctacaccgtgatcaacaaaaagagcggcgagatcgtgcccatggaggtgaacttcaacttcgacgaccccaacctgatcatcctgcctctggcctttggcaagagacagggcagagaattcatctggaacgacctgctgtccctggaaaccggcagcctgaagctggccaacggaagagtgatcgagaagacactgtacaacagaagaacccggcaggatgagcctgccctgttcgtggccctgaccttcgagcggcgggaggtcctggactcctccaatatcaaaccaatgaacctgatcggcgtggcaagaggcgaaaacatccccgccgtgatcgccctgaccgaccccgagggctgcccactgagccggtttaaggatagcctgggaaacccaacccacatcctgagaatcggcgagagctataaggagaagcagcggaccatccaggccaagaaggaggtggagcagcggagagccggcggctacagccggaagtacgccagcaaagccaagaatctggcagacgatatggtgagaaacaccgctagagatctgctgtactacgccgtgacccaggatgccatgctgatcttcgccaacctgagccggggcttcggccggcagggcaagcggaccttcatggccgagagacagtacacacggatggaggactggctgaccgccaagctggcctacgagggcctgagcaagacctacctgtccaagacactggcccagtacacctccaagacatgcagcaactgtgggtttaccatcaccagcgccgactacgacagggtgctggagaagctgaagaagacagcaacaggctggatgaccacaattaacggcaaggagctgaaggtggagggccagattacctactacaacagatacaagagacagaacgtagtcaaggacctgtccgtcgagctggatagactgagcgaagaatctgtgaacaacgacatctcctcctggacaaagggcagaagcggagaagctctgagcctcctgaagaaaagattctcccatagacccgtgcaggagaagttcgtgtgcctgaactgcggcttcgagacacacgcagccgagcaagccgccctgaacatcgccagatcctggctgttcctgcggagccaggagtacaagaaataccagacaaacaagacaaccggcaacaccgataagagagccttcgtcgagacctggcagtccttttaccggaagaagcttaaggaggtgtggaaacctgccgtgcggtctggcggatctggcggaggctccaccagccccaagaaaaagagaaaagtctaagctgccttctgcggggcttgccttctggccatgcccttcttctctcccttgcacctgtacctcttggtctttgaataaagcctgagtaggaaggctagcaaaaaaaaaaaaaaaaaaaaaaaaaaaaaaaaaaaaaaaaaaaaaaaaaaaaaaaaaaaaaaaaaaaaaaaaaaaaaaaa

SEQ ID NO: 12461 - RNA, 5785 nt, synthetic construct
  source 1..5785: mol_type = other RNA
aggaaataagagagaaaagaagagtaagaagaaatataagagccaccatggcccctaagaagaagcgtaaagtgagccggatggaacgcctcgtctacgaggtgcggcagaagtgcagaaacatcgaggacatctgcatctcctgcggatctctgaacgtgaccctggagcacccactgttcatcggcggcatgtgccagaactgtaaaaactgttttctggagtgtgcctatcaatacgacgatgacggctaccagagctactgcaccatctgttgcggcggaagagaggtgctgatgtgtggaaataacaactgctgccggtgcttctgcgtggaatgcgtggacctgctggtgggccccggcgccgcccaggccgctattaaggaagatccttggaactgctacatgtgcggccacaagggcacatacggcctgctgagacggagagaggactggcctagcagactgcagatgttcttcgccaataaccacgaccaggagttcgacccccctaaggtgtaccctcccgtccccgccgagaagagaaagcccatccgggtcctgagcctgttcgatggcatcgccaccggtctgctggtgctgaaggacctgggcatccaggtggataggtacattgcctccgaggtgtgcgaggactccatcaccgtgggaatggtgcgtcatcagggcaagatcatgtacgtgggcgacgtgcggagcgtgacacagaagcatatccaggagtggggccctttcgacctggtgatcggcggcagcccttgcaatgacctgagcatcgtgaacccagcccggaagggcctgtacgagggaaccggcagactgttcttcgagttttacagactgctgcacgacgcccggcctaaggaaggcgacgaccggcccttcttttggctgttcgagaatgtggtggccatgggagtcagcgacaagcgggatattagccggttcctggagagcaaccccgtgatgatcgatgccaaggaagtgagcgccgcccaccgggccagatacttctggggcaatctgcctggcatgaacagacccctggccagcaccgtgaacgacaagctggagctgcaggagtgcctggagcacggccggatcgccaagttcagcaaggtgagaaccatcaccacccgaagcaacagcatcaaacaaggcaaggaccagcactttcctgtgttcatgaacgagaaggaggacatcctgtggtgtaccgagatggagagagtgttcgggttcccagtccactacacagatgtcagcaacatgtctagactggccagacagagactgctgggaagaagctggtccgtccctgtgatcagacacctgttcgcccctctgaaggagtacttcgcctgcgtgagcagcggcaacagcaacgccaacagccggggccccagcttctctagcggcctggtgccactgtccctgagagggagccacatgggccccatggagatctacaaaaccgtgagcgcctggaagcggcagcctgtgcgcgtgctgagcctgtttcggaatatcgataaagtcctgaaaagcctgggattcctggagagcggctctggctccggcggtggcaccctgaagtacgtggaggatgtgacaaacgtggtcagacgggatgtggagaagtggggccccttcgatctggtgtacggcagcacccaacccctgggcagctcttgtgaccggtgccctggctggtacatgtttcagttccaccggatcctgcagtacgccctgccgagacaggagtcccagcggccattcttttggattttcatggacaacttgctgctgaccgaggatgaccaggaaactaccactcggttcctgcagaccgaagccgtgaccctgcaggacgtgagaggccgggactaccagaacgccatgcgggtgtggtccaacatccctggactgaaaagcaagcacgcacctctgacccctaaagaagaggagtacctgcaggcccaggtgcggagcagaagcaagctggacgcccctaaggtggatctgctggtgaagaattgcctcctgcccctgagagagtacttcaagtatttcagccagaatagtctgcccctgggaggcagcggcggcggcgtgcaggtgcccgtgaccttcgaggacgtggccgtgtacttcagcgaggacgagtggggcatgctggccggctggcagaaggagctgtacaaggagaccatgaaggagaactacgagaccctgaccctgctgggctgcctgagcgagaagcccagcctgatcagcaagatcgagagggaggaggacccctgcgtgagggaccagcaggaccccagggacaggaggaagctgaggagcagctggggcggcccaagcagcggcgcccctcctcccagcggcggcagcccagccggctccccaacctctaccgaggagggcacctctgagtccgccacccccgagagcggccctggcacctccaccgagcccagcgagggcagcgcacccggcagccctgccggcagccccacctccacagaggagggaaccagcaccgagcccagcgaaggcagcgccccaggcaccagcaccgagcctagtgagcaggagattaaacggatcaacaagatcagaagaagacttgtgaaagacagcaacaccaagaaggccggcaagacaggccccatgaaaaccctgctggttagagtgatgacacccgatctgagagagcggctggaaaacctgagaaagaagcctgaaaatatcccccagcccatcagcaatacatctagagccaacctgaataagctgctgaccgattacaccgaaatgaagaaggcgatcctgcatgtgtactgggaagagttccagaaggaccctgtgggcctgatgagccgggtggcccagcctgccagcaagaagatcgatcagaacaagctgaaacctgagatggacgagaagggcaacctgaccaccgccggctttgcctgctctcagtgtggccagcccctgttcgtgtacaagctggagcaggtgtctgagaagggcaaggcttacaccaactacttcggacggtgcaatgtggccgagcacgaaaagctgatcctgctggcccagctgaagcccgagaaggatagcgacgaagccgtgacatatagcctgggaaagtttgggcagagggccctggatttctacagcattcatgtgaccaaggagtccacccaccccgtgaagcccctggcccagatcgccggaaacagatacgcctccggacctgtgggaaaggccctgagcgacgcatgtatgggcacaatcgcctccttcctgtctaagtaccaggacatcatcatcgaacaccagaaggtggtgaagggcaaccagaagagactggagagcctgcgggagctggccggcaaggaaaacctggaataccctagcgtgaccctgccacctcagcctcacaccaaggagggcgttgatgcctacaacgaagtgatcgcccgggtgcgaatgtgggtgaacctgaacctgtggcagaagctgaagctaagcagagatgatgccaagcctctgctgagactgaagggattcccttcctttcctctggtcgagagacaggccaacgaagtggactggtgggacatggtgtgtaacgtgaagaagctgatcaacgagaaaaaggaggatggcaaggtgttttggcagaatctggctggctacaagagacaggaagccctgagaccatacctgagcagcgaggaagatcggaagaagggaaagaaattcgctcggtaccagctgggcgacctgctgctgcacctggaaaagaagcacggcgaggactggggaaaggtgtacgacgaggcctgggagcggattgacaagaaagtggaaggcctgagcaagcacatcaagctggaagaggaacggagaagcgaggacgcccagagcaaggccgccctgaccgactggctgcgggctaaggccagcttcgtgatcgagggcctgaaggaggccgacaaggacgagttctgcagatgcgagctgaagctgcagaagtggtacggggacctgcggggaaagcccttcgccatcgaagccgagaacagcatcctggacatcagcggcttcagcaagcagtacaactgtgccttcatctggcagaaggacggcgtgaagaagctgaacctgtacctgatcatcaactacttcaagggcggcaagctgcggttcaagaagatcaaacctgaagccttcgaagccaacagattctacaccgtgatcaacaaaaagagcggcgagatcgtgcccatggaggtgaacttcaacttcgacgaccccaacctgatcatcctgcctctggcctttggcaagagacagggcagagaattcatctggaacgacctgctgtccctggaaaccggcagcctgaagctggccaacggaagagtgatcgagaagacactgtacaacagaagaacccggcaggatgagcctgccctgttcgtggccctgaccttcgagcggcgggaggtcctggactcctccaatatcaaaccaatgaacctgatcggcgtggcaagaggcgaaaacatccccgccgtgatcgccctgaccgaccccgagggctgcccactgagccggtttaaggatagcctgggaaacccaacccacatcctgagaatcggcgagagctataaggagaagcagcggaccatccaggccaagaaggaggtggagcagcggagagccggcggctacagccggaagtacgccagcaaagccaagaatctggcagacgatatggtgagaaacaccgctagagatctgctgtactacgccgtgacccaggatgccatgctgatcttcgccaacctgagccggggcttcggccggcagggcaagcggaccttcatggccgagagacagtacacacggatggaggactggctgaccgccaagctggcctacgagggcctgagcaagacctacctgtccaagacactggcccagtacacctccaagacatgcagcaactgtgggtttaccatcaccagcgccgactacgacagggtgctggagaagctgaagaagacagcaacaggctggatgaccacaattaacggcaaggagctgaaggtggagggccagattacctactacaacagatacaagagacagaacgtagtcaaggacctgtccgtcgagctggatagactgagcgaagaatctgtgaacaacgacatctcctcctggacaaagggcagaagcggagaagctctgagcctcctgaagaaaagattctcccatagacccgtgcaggagaagttcgtgtgcctgaactgcggcttcgagacacacgcagccgagcaagccgccctgaacatcgccagatcctggctgttcctgcggagccaggagtacaagaaataccagacaaacaagacaaccggcaacaccgataagagagccttcgtcgagacctggcagtccttttaccggaagaagcttaaggaggtgtggaaacctgccgtgcggtctggcggatctggcggaggctccaccagccccaagaaaaagagaaaagtctaagctgccttctgcggggcttgccttctggccatgcccttcttctctcccttgcacctgtacctcttggtctttgaataaagcctgagtaggaaggctagcaaaaaaaaaaaaaaaaaaaaaaaaaaaaaaaaaaaaaaaaaaaaaaaaaaaaaaaaaaaaaaaaaaaaaaaaaaaaaaaa

SEQ ID NO: 12462 - RNA, 5785 nt, synthetic construct
  source 1..5785: mol_type = other RNA
aggaaataagagagaaaagaagagtaagaagaaatataagagccaccatggcccctaagaagaagcgtaaagtgagccggatggaacgcctcgtctacgaggtgcggcagaagtgcagaaacatcgaggacatctgcatctcctgcggatctctgaacgtgaccctggagcacccactgttcatcggcggcatgtgccagaactgtaaaaactgttttctggagtgtgcctatcaatacgacgatgacggctaccagagctactgcaccatctgttgcggcggaagagaggtgctgatgtgtggaaataacaactgctgccggtgcttctgcgtggaatgcgtggacctgctggtgggccccggcgccgcccaggccgctattaaggaagatccttggaactgctacatgtgcggccacaagggcacatacggcctgctgagacggagagaggactggcctagcagactgcagatgttcttcgccaataaccacgaccaggagttcgacccccctaaggtgtaccctcccgtccccgccgagaagagaaagcccatccgggtcctgagcctgttcgatggcatcgccaccggtctgctggtgctgaaggacctgggcatccaggtggataggtacattgcctccgaggtgtgcgaggactccatcaccgtgggaatggtgcgtcatcagggcaagatcatgtacgtgggcgacgtgcggagcgtgacacagaagcatatccaggagtggggccctttcgacctggtgatcggcggcagcccttgcaatgacctgagcatcgtgaacccagcccggaagggcctgtacgagggaaccggcagactgttcttcgagttttacagactgctgcacgacgcccggcctaaggaaggcgacgaccggcccttcttttggctgttcgagaatgtggtggccatgggagtcagcgacaagcgggatattagccggttcctggagagcaaccccgtgatgatcgatgccaaggaagtgagcgccgcccaccgggccagatacttctggggcaatctgcctggcatgaacagacccctggccagcaccgtgaacgacaagctggagctgcaggagtgcctggagcacggccggatcgccaagttcagcaaggtgagaaccatcaccacccgaagcaacagcatcaaacaaggcaaggaccagcactttcctgtgttcatgaacgagaaggaggacatcctgtggtgtaccgagatggagagagtgttcgggttcccagtccactacacagatgtcagcaacatgtctagactggccagacagagactgctgggaagaagctggtccgtccctgtgatcagacacctgttcgcccctctgaaggagtacttcgcctgcgtgagcagcggcaacagcaacgccaacagccggggccccagcttctctagcggcctggtgccactgtccctgagagggagccacatgggccccatggagatctacaaaaccgtgagcgcctggaagcggcagcctgtgcgcgtgctgagcctgtttcggaatatcgataaagtcctgaaaagcctgggattcctggagagcggctctggctccggcggtggcaccctgaagtacgtggaggatgtgacaaacgtggtcagacgggatgtggagaagtggggccccttcgatctggtgtacggcagcacccaacccctgggcagctcttgtgaccggtgccctggctggtacatgtttcagttccaccggatcctgcagtacgccctgccgagacaggagtcccagcggccattcttttggattttcatggacaacttgctgctgaccgaggatgaccaggaaactaccactcggttcctgcagaccgaagccgtgaccctgcaggacgtgagaggccgggactaccagaacgccatgcgggtgtggtccaacatccctggactgaaaagcaagcacgcacctctgacccctaaagaagaggagtacctgcaggcccaggtgcggagcagaagcaagctggacgcccctaaggtggatctgctggtgaagaattgcctcctgcccctgagagagtacttcaagtatttcagccagaatagtctgcccctgggaggcagcggcggcggcgacagcgtggccttcgaggacgtggccgtgaacttcacccaggaggagtgggccctgctggaccccagccagaagaacctgtacagggaggtgatgcaggagaccctgaggaacctgaccagcatcggcaagaagtggaacaaccagtacatcgaggacgagcaccagaaccccaagaggaacctgaggaggctgatcggcgagaggctgagcgagagcaaggagagccaccagcacggcgagggcggcccaagcagcggcgcccctcctcccagcggcggcagcccagccggctccccaacctctaccgaggagggcacctctgagtccgccacccccgagagcggccctggcacctccaccgagcccagcgagggcagcgcacccggcagccctgccggcagccccacctccacagaggagggaaccagcaccgagcccagcgaaggcagcgccccaggcaccagcaccgagcctagtgagcaggagattaaacggatcaacaagatcagaagaagacttgtgaaagacagcaacaccaagaaggccggcaagacaggccccatgaaaaccctgctggttagagtgatgacacccgatctgagagagcggctggaaaacctgagaaagaagcctgaaaatatcccccagcccatcagcaatacatctagagccaacctgaataagctgctgaccgattacaccgaaatgaagaaggcgatcctgcatgtgtactgggaagagttccagaaggaccctgtgggcctgatgagccgggtggcccagcctgccagcaagaagatcgatcagaacaagctgaaacctgagatggacgagaagggcaacctgaccaccgccggctttgcctgctctcagtgtggccagcccctgttcgtgtacaagctggagcaggtgtctgagaagggcaaggcttacaccaactacttcggacggtgcaatgtggccgagcacgaaaagctgatcctgctggcccagctgaagcccgagaaggatagcgacgaagccgtgacatatagcctgggaaagtttgggcagagggccctggatttctacagcattcatgtgaccaaggagtccacccaccccgtgaagcccctggcccagatcgccggaaacagatacgcctccggacctgtgggaaaggccctgagcgacgcatgtatgggcacaatcgcctccttcctgtctaagtaccaggacatcatcatcgaacaccagaaggtggtgaagggcaaccagaagagactggagagcctgcgggagctggccggcaaggaaaacctggaataccctagcgtgaccctgccacctcagcctcacaccaaggagggcgttgatgcctacaacgaagtgatcgcccgggtgcgaatgtgggtgaacctgaacctgtggcagaagctgaagctaagcagagatgatgccaagcctctgctgagactgaagggattcccttcctttcctctggtcgagagacaggccaacgaagtggactggtgggacatggtgtgtaacgtgaagaagctgatcaacgagaaaaaggaggatggcaaggtgttttggcagaatctggctggctacaagagacaggaagccctgagaccatacctgagcagcgaggaagatcggaagaagggaaagaaattcgctcggtaccagctgggcgacctgctgctgcacctggaaaagaagcacggcgaggactggggaaaggtgtacgacgaggcctgggagcggattgacaagaaagtggaaggcctgagcaagcacatcaagctggaagaggaacggagaagcgaggacgcccagagcaaggccgccctgaccgactggctgcgggctaaggccagcttcgtgatcgagggcctgaaggaggccgacaaggacgagttctgcagatgcgagctgaagctgcagaagtggtacggggacctgcggggaaagcccttcgccatcgaagccgagaacagcatcctggacatcagcggcttcagcaagcagtacaactgtgccttcatctggcagaaggacggcgtgaagaagctgaacctgtacctgatcatcaactacttcaagggcggcaagctgcggttcaagaagatcaaacctgaagccttcgaagccaacagattctacaccgtgatcaacaaaaagagcggcgagatcgtgcccatggaggtgaacttcaacttcgacgaccccaacctgatcatcctgcctctggcctttggcaagagacagggcagagaattcatctggaacgacctgctgtccctggaaaccggcagcctgaagctggccaacggaagagtgatcgagaagacactgtacaacagaagaacccggcaggatgagcctgccctgttcgtggccctgaccttcgagcggcgggaggtcctggactcctccaatatcaaaccaatgaacctgatcggcgtggcaagaggcgaaaacatccccgccgtgatcgccctgaccgaccccgagggctgcccactgagccggtttaaggatagcctgggaaacccaacccacatcctgagaatcggcgagagctataaggagaagcagcggaccatccaggccaagaaggaggtggagcagcggagagccggcggctacagccggaagtacgccagcaaagccaagaatctggcagacgatatggtgagaaacaccgctagagatctgctgtactacgccgtgacccaggatgccatgctgatcttcgccaacctgagccggggcttcggccggcagggcaagcggaccttcatggccgagagacagtacacacggatggaggactggctgaccgccaagctggcctacgagggcctgagcaagacctacctgtccaagacactggcccagtacacctccaagacatgcagcaactgtgggtttaccatcaccagcgccgactacgacagggtgctggagaagctgaagaagacagcaacaggctggatgaccacaattaacggcaaggagctgaaggtggagggccagattacctactacaacagatacaagagacagaacgtagtcaaggacctgtccgtcgagctggatagactgagcgaagaatctgtgaacaacgacatctcctcctggacaaagggcagaagcggagaagctctgagcctcctgaagaaaagattctcccatagacccgtgcaggagaagttcgtgtgcctgaactgcggcttcgagacacacgcagccgagcaagccgccctgaacatcgccagatcctggctgttcctgcggagccaggagtacaagaaataccagacaaacaagacaaccggcaacaccgataagagagccttcgtcgagacctggcagtccttttaccggaagaagcttaaggaggtgtggaaacctgccgtgcggtctggcggatctggcggaggctccaccagccccaagaaaaagagaaaagtctaagctgccttctgcggggcttgccttctggccatgcccttcttctctcccttgcacctgtacctcttggtctttgaataaagcctgagtaggaaggctagcaaaaaaaaaaaaaaaaaaaaaaaaaaaaaaaaaaaaaaaaaaaaaaaaaaaaaaaaaaaaaaaaaaaaaaaaaaaaaaaa

SEQ ID NO: 12463 - RNA, 5785 nt, synthetic construct
  source 1..5785: mol_type = other RNA
aggaaataagagagaaaagaagagtaagaagaaatataagagccaccatggcccctaagaagaagcgtaaagtgagccggatggaacgcctcgtctacgaggtgcggcagaagtgcagaaacatcgaggacatctgcatctcctgcggatctctgaacgtgaccctggagcacccactgttcatcggcggcatgtgccagaactgtaaaaactgttttctggagtgtgcctatcaatacgacgatgacggctaccagagctactgcaccatctgttgcggcggaagagaggtgctgatgtgtggaaataacaactgctgccggtgcttctgcgtggaatgcgtggacctgctggtgggccccggcgccgcccaggccgctattaaggaagatccttggaactgctacatgtgcggccacaagggcacatacggcctgctgagacggagagaggactggcctagcagactgcagatgttcttcgccaataaccacgaccaggagttcgacccccctaaggtgtaccctcccgtccccgccgagaagagaaagcccatccgggtcctgagcctgttcgatggcatcgccaccggtctgctggtgctgaaggacctgggcatccaggtggataggtacattgcctccgaggtgtgcgaggactccatcaccgtgggaatggtgcgtcatcagggcaagatcatgtacgtgggcgacgtgcggagcgtgacacagaagcatatccaggagtggggccctttcgacctggtgatcggcggcagcccttgcaatgacctgagcatcgtgaacccagcccggaagggcctgtacgagggaaccggcagactgttcttcgagttttacagactgctgcacgacgcccggcctaaggaaggcgacgaccggcccttcttttggctgttcgagaatgtggtggccatgggagtcagcgacaagcgggatattagccggttcctggagagcaaccccgtgatgatcgatgccaaggaagtgagcgccgcccaccgggccagatacttctggggcaatctgcctggcatgaacagacccctggccagcaccgtgaacgacaagctggagctgcaggagtgcctggagcacggccggatcgccaagttcagcaaggtgagaaccatcaccacccgaagcaacagcatcaaacaaggcaaggaccagcactttcctgtgttcatgaacgagaaggaggacatcctgtggtgtaccgagatggagagagtgttcgggttcccagtccactacacagatgtcagcaacatgtctagactggccagacagagactgctgggaagaagctggtccgtccctgtgatcagacacctgttcgcccctctgaaggagtacttcgcctgcgtgagcagcggcaacagcaacgccaacagccggggccccagcttctctagcggcctggtgccactgtccctgagagggagccacatgggccccatggagatctacaaaaccgtgagcgcctggaagcggcagcctgtgcgcgtgctgagcctgtttcggaatatcgataaagtcctgaaaagcctgggattcctggagagcggctctggctccggcggtggcaccctgaagtacgtggaggatgtgacaaacgtggtcagacgggatgtggagaagtggggccccttcgatctggtgtacggcagcacccaacccctgggcagctcttgtgaccggtgccctggctggtacatgtttcagttccaccggatcctgcagtacgccctgccgagacaggagtcccagcggccattcttttggattttcatggacaacttgctgctgaccgaggatgaccaggaaactaccactcggttcctgcagaccgaagccgtgaccctgcaggacgtgagaggccgggactaccagaacgccatgcgggtgtggtccaacatccctggactgaaaagcaagcacgcacctctgacccctaaagaagaggagtacctgcaggcccaggtgcggagcagaagcaagctggacgcccctaaggtggatctgctggtgaagaattgcctcctgcccctgagagagtacttcaagtatttcagccagaatagtctgcccctgggaggcagcggcggcggcgtgcaggagcccgtgaccttcaaggacgtggccgtggacttcacccaggaggagtggggccagctggacctggtgcagaggaccctgtacagggacgtgatgctggagacctacggccacctgctgagcgtgggcaaccagatcgccaagcccgaggtgatcagcctgctggagcagggcgaggagccctggagcgtggagcaggcctgcccccagaggaccggccccgagtgggtgaggaacggcggcccaagcagcggcgcccctcctcccagcggcggcagcccagccggctccccaacctctaccgaggagggcacctctgagtccgccacccccgagagcggccctggcacctccaccgagcccagcgagggcagcgcacccggcagccctgccggcagccccacctccacagaggagggaaccagcaccgagcccagcgaaggcagcgccccaggcaccagcaccgagcctagtgagcaggagattaaacggatcaacaagatcagaagaagacttgtgaaagacagcaacaccaagaaggccggcaagacaggccccatgaaaaccctgctggttagagtgatgacacccgatctgagagagcggctggaaaacctgagaaagaagcctgaaaatatcccccagcccatcagcaatacatctagagccaacctgaataagctgctgaccgattacaccgaaatgaagaaggcgatcctgcatgtgtactgggaagagttccagaaggaccctgtgggcctgatgagccgggtggcccagcctgccagcaagaagatcgatcagaacaagctgaaacctgagatggacgagaagggcaacctgaccaccgccggctttgcctgctctcagtgtggccagcccctgttcgtgtacaagctggagcaggtgtctgagaagggcaaggcttacaccaactacttcggacggtgcaatgtggccgagcacgaaaagctgatcctgctggcccagctgaagcccgagaaggatagcgacgaagccgtgacatatagcctgggaaagtttgggcagagggccctggatttctacagcattcatgtgaccaaggagtccacccaccccgtgaagcccctggcccagatcgccggaaacagatacgcctccggacctgtgggaaaggccctgagcgacgcatgtatgggcacaatcgcctccttcctgtctaagtaccaggacatcatcatcgaacaccagaaggtggtgaagggcaaccagaagagactggagagcctgcgggagctggccggcaaggaaaacctggaataccctagcgtgaccctgccacctcagcctcacaccaaggagggcgttgatgcctacaacgaagtgatcgcccgggtgcgaatgtgggtgaacctgaacctgtggcagaagctgaagctaagcagagatgatgccaagcctctgctgagactgaagggattcccttcctttcctctggtcgagagacaggccaacgaagtggactggtgggacatggtgtgtaacgtgaagaagctgatcaacgagaaaaaggaggatggcaaggtgttttggcagaatctggctggctacaagagacaggaagccctgagaccatacctgagcagcgaggaagatcggaagaagggaaagaaattcgctcggtaccagctgggcgacctgctgctgcacctggaaaagaagcacggcgaggactggggaaaggtgtacgacgaggcctgggagcggattgacaagaaagtggaaggcctgagcaagcacatcaagctggaagaggaacggagaagcgaggacgcccagagcaaggccgccctgaccgactggctgcgggctaaggccagcttcgtgatcgagggcctgaaggaggccgacaaggacgagttctgcagatgcgagctgaagctgcagaagtggtacggggacctgcggggaaagcccttcgccatcgaagccgagaacagcatcctggacatcagcggcttcagcaagcagtacaactgtgccttcatctggcagaaggacggcgtgaagaagctgaacctgtacctgatcatcaactacttcaagggcggcaagctgcggttcaagaagatcaaacctgaagccttcgaagccaacagattctacaccgtgatcaacaaaaagagcggcgagatcgtgcccatggaggtgaacttcaacttcgacgaccccaacctgatcatcctgcctctggcctttggcaagagacagggcagagaattcatctggaacgacctgctgtccctggaaaccggcagcctgaagctggccaacggaagagtgatcgagaagacactgtacaacagaagaacccggcaggatgagcctgccctgttcgtggccctgaccttcgagcggcgggaggtcctggactcctccaatatcaaaccaatgaacctgatcggcgtggcaagaggcgaaaacatccccgccgtgatcgccctgaccgaccccgagggctgcccactgagccggtttaaggatagcctgggaaacccaacccacatcctgagaatcggcgagagctataaggagaagcagcggaccatccaggccaagaaggaggtggagcagcggagagccggcggctacagccggaagtacgccagcaaagccaagaatctggcagacgatatggtgagaaacaccgctagagatctgctgtactacgccgtgacccaggatgccatgctgatcttcgccaacctgagccggggcttcggccggcagggcaagcggaccttcatggccgagagacagtacacacggatggaggactggctgaccgccaagctggcctacgagggcctgagcaagacctacctgtccaagacactggcccagtacacctccaagacatgcagcaactgtgggtttaccatcaccagcgccgactacgacagggtgctggagaagctgaagaagacagcaacaggctggatgaccacaattaacggcaaggagctgaaggtggagggccagattacctactacaacagatacaagagacagaacgtagtcaaggacctgtccgtcgagctggatagactgagcgaagaatctgtgaacaacgacatctcctcctggacaaagggcagaagcggagaagctctgagcctcctgaagaaaagattctcccatagacccgtgcaggagaagttcgtgtgcctgaactgcggcttcgagacacacgcagccgagcaagccgccctgaacatcgccagatcctggctgttcctgcggagccaggagtacaagaaataccagacaaacaagacaaccggcaacaccgataagagagccttcgtcgagacctggcagtccttttaccggaagaagcttaaggaggtgtggaaacctgccgtgcggtctggcggatctggcggaggctccaccagccccaagaaaaagagaaaagtctaagctgccttctgcggggcttgccttctggccatgcccttcttctctcccttgcacctgtacctcttggtctttgaataaagcctgagtaggaaggctagcaaaaaaaaaaaaaaaaaaaaaaaaaaaaaaaaaaaaaaaaaaaaaaaaaaaaaaaaaaaaaaaaaaaaaaaaaaaaaaaa

SEQ ID NO: 12464 - RNA, 5785 nt, synthetic construct
  source 1..5785: mol_type = other RNA
aggaaataagagagaaaagaagagtaagaagaaatataagagccaccatggcccctaagaagaagcgtaaagtgagccggatggaacgcctcgtctacgaggtgcggcagaagtgcagaaacatcgaggacatctgcatctcctgcggatctctgaacgtgaccctggagcacccactgttcatcggcggcatgtgccagaactgtaaaaactgttttctggagtgtgcctatcaatacgacgatgacggctaccagagctactgcaccatctgttgcggcggaagagaggtgctgatgtgtggaaataacaactgctgccggtgcttctgcgtggaatgcgtggacctgctggtgggccccggcgccgcccaggccgctattaaggaagatccttggaactgctacatgtgcggccacaagggcacatacggcctgctgagacggagagaggactggcctagcagactgcagatgttcttcgccaataaccacgaccaggagttcgacccccctaaggtgtaccctcccgtccccgccgagaagagaaagcccatccgggtcctgagcctgttcgatggcatcgccaccggtctgctggtgctgaaggacctgggcatccaggtggataggtacattgcctccgaggtgtgcgaggactccatcaccgtgggaatggtgcgtcatcagggcaagatcatgtacgtgggcgacgtgcggagcgtgacacagaagcatatccaggagtggggccctttcgacctggtgatcggcggcagcccttgcaatgacctgagcatcgtgaacccagcccggaagggcctgtacgagggaaccggcagactgttcttcgagttttacagactgctgcacgacgcccggcctaaggaaggcgacgaccggcccttcttttggctgttcgagaatgtggtggccatgggagtcagcgacaagcgggatattagccggttcctggagagcaaccccgtgatgatcgatgccaaggaagtgagcgccgcccaccgggccagatacttctggggcaatctgcctggcatgaacagacccctggccagcaccgtgaacgacaagctggagctgcaggagtgcctggagcacggccggatcgccaagttcagcaaggtgagaaccatcaccacccgaagcaacagcatcaaacaaggcaaggaccagcactttcctgtgttcatgaacgagaaggaggacatcctgtggtgtaccgagatggagagagtgttcgggttcccagtccactacacagatgtcagcaacatgtctagactggccagacagagactgctgggaagaagctggtccgtccctgtgatcagacacctgttcgcccctctgaaggagtacttcgcctgcgtgagcagcggcaacagcaacgccaacagccggggccccagcttctctagcggcctggtgccactgtccctgagagggagccacatgggccccatggagatctacaaaaccgtgagcgcctggaagcggcagcctgtgcgcgtgctgagcctgtttcggaatatcgataaagtcctgaaaagcctgggattcctggagagcggctctggctccggcggtggcaccctgaagtacgtggaggatgtgacaaacgtggtcagacgggatgtggagaagtggggccccttcgatctggtgtacggcagcacccaacccctgggcagctcttgtgaccggtgccctggctggtacatgtttcagttccaccggatcctgcagtacgccctgccgagacaggagtcccagcggccattcttttggattttcatggacaacttgctgctgaccgaggatgaccaggaaactaccactcggttcctgcagaccgaagccgtgaccctgcaggacgtgagaggccgggactaccagaacgccatgcgggtgtggtccaacatccctggactgaaaagcaagcacgcacctctgacccctaaagaagaggagtacctgcaggcccaggtgcggagcagaagcaagctggacgcccctaaggtggatctgctggtgaagaattgcctcctgcccctgagagagtacttcaagtatttcagccagaatagtctgcccctgggaggcagcggcggcggcttccaggagagcgtggccttcgaggacgtggccgtgtacttcacccagaaccagtggggcagcctggaccccgcccagagggccctgtacagcgaggtgatgctggagaactacgccaacgtggccagcctggccttccccttccccaagcccgccctgatcagccacctggagaagggcgaggccccctggggccccgacccctgggacgccgagatccccagcggcatcaaccagggcggcggcggcccaagcagcggcgcccctcctcccagcggcggcagcccagccggctccccaacctctaccgaggagggcacctctgagtccgccacccccgagagcggccctggcacctccaccgagcccagcgagggcagcgcacccggcagccctgccggcagccccacctccacagaggagggaaccagcaccgagcccagcgaaggcagcgccccaggcaccagcaccgagcctagtgagcaggagattaaacggatcaacaagatcagaagaagacttgtgaaagacagcaacaccaagaaggccggcaagacaggccccatgaaaaccctgctggttagagtgatgacacccgatctgagagagcggctggaaaacctgagaaagaagcctgaaaatatcccccagcccatcagcaatacatctagagccaacctgaataagctgctgaccgattacaccgaaatgaagaaggcgatcctgcatgtgtactgggaagagttccagaaggaccctgtgggcctgatgagccgggtggcccagcctgccagcaagaagatcgatcagaacaagctgaaacctgagatggacgagaagggcaacctgaccaccgccggctttgcctgctctcagtgtggccagcccctgttcgtgtacaagctggagcaggtgtctgagaagggcaaggcttacaccaactacttcggacggtgcaatgtggccgagcacgaaaagctgatcctgctggcccagctgaagcccgagaaggatagcgacgaagccgtgacatatagcctgggaaagtttgggcagagggccctggatttctacagcattcatgtgaccaaggagtccacccaccccgtgaagcccctggcccagatcgccggaaacagatacgcctccggacctgtgggaaaggccctgagcgacgcatgtatgggcacaatcgcctccttcctgtctaagtaccaggacatcatcatcgaacaccagaaggtggtgaagggcaaccagaagagactggagagcctgcgggagctggccggcaaggaaaacctggaataccctagcgtgaccctgccacctcagcctcacaccaaggagggcgttgatgcctacaacgaagtgatcgcccgggtgcgaatgtgggtgaacctgaacctgtggcagaagctgaagctaagcagagatgatgccaagcctctgctgagactgaagggattcccttcctttcctctggtcgagagacaggccaacgaagtggactggtgggacatggtgtgtaacgtgaagaagctgatcaacgagaaaaaggaggatggcaaggtgttttggcagaatctggctggctacaagagacaggaagccctgagaccatacctgagcagcgaggaagatcggaagaagggaaagaaattcgctcggtaccagctgggcgacctgctgctgcacctggaaaagaagcacggcgaggactggggaaaggtgtacgacgaggcctgggagcggattgacaagaaagtggaaggcctgagcaagcacatcaagctggaagaggaacggagaagcgaggacgcccagagcaaggccgccctgaccgactggctgcgggctaaggccagcttcgtgatcgagggcctgaaggaggccgacaaggacgagttctgcagatgcgagctgaagctgcagaagtggtacggggacctgcggggaaagcccttcgccatcgaagccgagaacagcatcctggacatcagcggcttcagcaagcagtacaactgtgccttcatctggcagaaggacggcgtgaagaagctgaacctgtacctgatcatcaactacttcaagggcggcaagctgcggttcaagaagatcaaacctgaagccttcgaagccaacagattctacaccgtgatcaacaaaaagagcggcgagatcgtgcccatggaggtgaacttcaacttcgacgaccccaacctgatcatcctgcctctggcctttggcaagagacagggcagagaattcatctggaacgacctgctgtccctggaaaccggcagcctgaagctggccaacggaagagtgatcgagaagacactgtacaacagaagaacccggcaggatgagcctgccctgttcgtggccctgaccttcgagcggcgggaggtcctggactcctccaatatcaaaccaatgaacctgatcggcgtggcaagaggcgaaaacatccccgccgtgatcgccctgaccgaccccgagggctgcccactgagccggtttaaggatagcctgggaaacccaacccacatcctgagaatcggcgagagctataaggagaagcagcggaccatccaggccaagaaggaggtggagcagcggagagccggcggctacagccggaagtacgccagcaaagccaagaatctggcagacgatatggtgagaaacaccgctagagatctgctgtactacgccgtgacccaggatgccatgctgatcttcgccaacctgagccggggcttcggccggcagggcaagcggaccttcatggccgagagacagtacacacggatggaggactggctgaccgccaagctggcctacgagggcctgagcaagacctacctgtccaagacactggcccagtacacctccaagacatgcagcaactgtgggtttaccatcaccagcgccgactacgacagggtgctggagaagctgaagaagacagcaacaggctggatgaccacaattaacggcaaggagctgaaggtggagggccagattacctactacaacagatacaagagacagaacgtagtcaaggacctgtccgtcgagctggatagactgagcgaagaatctgtgaacaacgacatctcctcctggacaaagggcagaagcggagaagctctgagcctcctgaagaaaagattctcccatagacccgtgcaggagaagttcgtgtgcctgaactgcggcttcgagacacacgcagccgagcaagccgccctgaacatcgccagatcctggctgttcctgcggagccaggagtacaagaaataccagacaaacaagacaaccggcaacaccgataagagagccttcgtcgagacctggcagtccttttaccggaagaagcttaaggaggtgtggaaacctgccgtgcggtctggcggatctggcggaggctccaccagccccaagaaaaagagaaaagtctaagctgccttctgcggggcttgccttctggccatgcccttcttctctcccttgcacctgtacctcttggtctttgaataaagcctgagtaggaaggctagcaaaaaaaaaaaaaaaaaaaaaaaaaaaaaaaaaaaaaaaaaaaaaaaaaaaaaaaaaaaaaaaaaaaaaaaaaaaaaaaa

SEQ ID NO: 12465 - RNA, 5785 nt, synthetic construct
  source 1..5785: mol_type = other RNA
aggaaataagagagaaaagaagagtaagaagaaatataagagccaccatggcccctaagaagaagcgtaaagtgagccggatggaacgcctcgtctacgaggtgcggcagaagtgcagaaacatcgaggacatctgcatctcctgcggatctctgaacgtgaccctggagcacccactgttcatcggcggcatgtgccagaactgtaaaaactgttttctggagtgtgcctatcaatacgacgatgacggctaccagagctactgcaccatctgttgcggcggaagagaggtgctgatgtgtggaaataacaactgctgccggtgcttctgcgtggaatgcgtggacctgctggtgggccccggcgccgcccaggccgctattaaggaagatccttggaactgctacatgtgcggccacaagggcacatacggcctgctgagacggagagaggactggcctagcagactgcagatgttcttcgccaataaccacgaccaggagttcgacccccctaaggtgtaccctcccgtccccgccgagaagagaaagcccatccgggtcctgagcctgttcgatggcatcgccaccggtctgctggtgctgaaggacctgggcatccaggtggataggtacattgcctccgaggtgtgcgaggactccatcaccgtgggaatggtgcgtcatcagggcaagatcatgtacgtgggcgacgtgcggagcgtgacacagaagcatatccaggagtggggccctttcgacctggtgatcggcggcagcccttgcaatgacctgagcatcgtgaacccagcccggaagggcctgtacgagggaaccggcagactgttcttcgagttttacagactgctgcacgacgcccggcctaaggaaggcgacgaccggcccttcttttggctgttcgagaatgtggtggccatgggagtcagcgacaagcgggatattagccggttcctggagagcaaccccgtgatgatcgatgccaaggaagtgagcgccgcccaccgggccagatacttctggggcaatctgcctggcatgaacagacccctggccagcaccgtgaacgacaagctggagctgcaggagtgcctggagcacggccggatcgccaagttcagcaaggtgagaaccatcaccacccgaagcaacagcatcaaacaaggcaaggaccagcactttcctgtgttcatgaacgagaaggaggacatcctgtggtgtaccgagatggagagagtgttcgggttcccagtccactacacagatgtcagcaacatgtctagactggccagacagagactgctgggaagaagctggtccgtccctgtgatcagacacctgttcgcccctctgaaggagtacttcgcctgcgtgagcagcggcaacagcaacgccaacagccggggccccagcttctctagcggcctggtgccactgtccctgagagggagccacatgggccccatggagatctacaaaaccgtgagcgcctggaagcggcagcctgtgcgcgtgctgagcctgtttcggaatatcgataaagtcctgaaaagcctgggattcctggagagcggctctggctccggcggtggcaccctgaagtacgtggaggatgtgacaaacgtggtcagacgggatgtggagaagtggggccccttcgatctggtgtacggcagcacccaacccctgggcagctcttgtgaccggtgccctggctggtacatgtttcagttccaccggatcctgcagtacgccctgccgagacaggagtcccagcggccattcttttggattttcatggacaacttgctgctgaccgaggatgaccaggaaactaccactcggttcctgcagaccgaagccgtgaccctgcaggacgtgagaggccgggactaccagaacgccatgcgggtgtggtccaacatccctggactgaaaagcaagcacgcacctctgacccctaaagaagaggagtacctgcaggcccaggtgcggagcagaagcaagctggacgcccctaaggtggatctgctggtgaagaattgcctcctgcccctgagagagtacttcaagtatttcagccagaatagtctgcccctgggaggcagcggcggcggcatggacgccgtgacctacgacgacgtgcacatcaacttcaccctggaggagtgggccctgctgaaccccagccagaagagcctgtacaaggacgtgatgctggacacctacaggaacctgaccgccatcggctacagctgggacgaccacaacatcgaggagatctgccagagcagcaggagccacaggaggcacctgcagaggcacgccaagatcaacaccggcgagaagccctacggcagcggcggcccaagcagcggcgcccctcctcccagcggcggcagcccagccggctccccaacctctaccgaggagggcacctctgagtccgccacccccgagagcggccctggcacctccaccgagcccagcgagggcagcgcacccggcagccctgccggcagccccacctccacagaggagggaaccagcaccgagcccagcgaaggcagcgccccaggcaccagcaccgagcctagtgagcaggagattaaacggatcaacaagatcagaagaagacttgtgaaagacagcaacaccaagaaggccggcaagacaggccccatgaaaaccctgctggttagagtgatgacacccgatctgagagagcggctggaaaacctgagaaagaagcctgaaaatatcccccagcccatcagcaatacatctagagccaacctgaataagctgctgaccgattacaccgaaatgaagaaggcgatcctgcatgtgtactgggaagagttccagaaggaccctgtgggcctgatgagccgggtggcccagcctgccagcaagaagatcgatcagaacaagctgaaacctgagatggacgagaagggcaacctgaccaccgccggctttgcctgctctcagtgtggccagcccctgttcgtgtacaagctggagcaggtgtctgagaagggcaaggcttacaccaactacttcggacggtgcaatgtggccgagcacgaaaagctgatcctgctggcccagctgaagcccgagaaggatagcgacgaagccgtgacatatagcctgggaaagtttgggcagagggccctggatttctacagcattcatgtgaccaaggagtccacccaccccgtgaagcccctggcccagatcgccggaaacagatacgcctccggacctgtgggaaaggccctgagcgacgcatgtatgggcacaatcgcctccttcctgtctaagtaccaggacatcatcatcgaacaccagaaggtggtgaagggcaaccagaagagactggagagcctgcgggagctggccggcaaggaaaacctggaataccctagcgtgaccctgccacctcagcctcacaccaaggagggcgttgatgcctacaacgaagtgatcgcccgggtgcgaatgtgggtgaacctgaacctgtggcagaagctgaagctaagcagagatgatgccaagcctctgctgagactgaagggattcccttcctttcctctggtcgagagacaggccaacgaagtggactggtgggacatggtgtgtaacgtgaagaagctgatcaacgagaaaaaggaggatggcaaggtgttttggcagaatctggctggctacaagagacaggaagccctgagaccatacctgagcagcgaggaagatcggaagaagggaaagaaattcgctcggtaccagctgggcgacctgctgctgcacctggaaaagaagcacggcgaggactggggaaaggtgtacgacgaggcctgggagcggattgacaagaaagtggaaggcctgagcaagcacatcaagctggaagaggaacggagaagcgaggacgcccagagcaaggccgccctgaccgactggctgcgggctaaggccagcttcgtgatcgagggcctgaaggaggccgacaaggacgagttctgcagatgcgagctgaagctgcagaagtggtacggggacctgcggggaaagcccttcgccatcgaagccgagaacagcatcctggacatcagcggcttcagcaagcagtacaactgtgccttcatctggcagaaggacggcgtgaagaagctgaacctgtacctgatcatcaactacttcaagggcggcaagctgcggttcaagaagatcaaacctgaagccttcgaagccaacagattctacaccgtgatcaacaaaaagagcggcgagatcgtgcccatggaggtgaacttcaacttcgacgaccccaacctgatcatcctgcctctggcctttggcaagagacagggcagagaattcatctggaacgacctgctgtccctggaaaccggcagcctgaagctggccaacggaagagtgatcgagaagacactgtacaacagaagaacccggcaggatgagcctgccctgttcgtggccctgaccttcgagcggcgggaggtcctggactcctccaatatcaaaccaatgaacctgatcggcgtggcaagaggcgaaaacatccccgccgtgatcgccctgaccgaccccgagggctgcccactgagccggtttaaggatagcctgggaaacccaacccacatcctgagaatcggcgagagctataaggagaagcagcggaccatccaggccaagaaggaggtggagcagcggagagccggcggctacagccggaagtacgccagcaaagccaagaatctggcagacgatatggtgagaaacaccgctagagatctgctgtactacgccgtgacccaggatgccatgctgatcttcgccaacctgagccggggcttcggccggcagggcaagcggaccttcatggccgagagacagtacacacggatggaggactggctgaccgccaagctggcctacgagggcctgagcaagacctacctgtccaagacactggcccagtacacctccaagacatgcagcaactgtgggtttaccatcaccagcgccgactacgacagggtgctggagaagctgaagaagacagcaacaggctggatgaccacaattaacggcaaggagctgaaggtggagggccagattacctactacaacagatacaagagacagaacgtagtcaaggacctgtccgtcgagctggatagactgagcgaagaatctgtgaacaacgacatctcctcctggacaaagggcagaagcggagaagctctgagcctcctgaagaaaagattctcccatagacccgtgcaggagaagttcgtgtgcctgaactgcggcttcgagacacacgcagccgagcaagccgccctgaacatcgccagatcctggctgttcctgcggagccaggagtacaagaaataccagacaaacaagacaaccggcaacaccgataagagagccttcgtcgagacctggcagtccttttaccggaagaagcttaaggaggtgtggaaacctgccgtgcggtctggcggatctggcggaggctccaccagccccaagaaaaagagaaaagtctaagctgccttctgcggggcttgccttctggccatgcccttcttctctcccttgcacctgtacctcttggtctttgaataaagcctgagtaggaaggctagcaaaaaaaaaaaaaaaaaaaaaaaaaaaaaaaaaaaaaaaaaaaaaaaaaaaaaaaaaaaaaaaaaaaaaaaaaaaaaaaa

SEQ ID NO: 12466 - RNA, 5785 nt, synthetic construct
  source 1..5785: mol_type = other RNA
aggaaataagagagaaaagaagagtaagaagaaatataagagccaccatggcccctaagaagaagcgtaaagtgagccggatggaacgcctcgtctacgaggtgcggcagaagtgcagaaacatcgaggacatctgcatctcctgcggatctctgaacgtgaccctggagcacccactgttcatcggcggcatgtgccagaactgtaaaaactgttttctggagtgtgcctatcaatacgacgatgacggctaccagagctactgcaccatctgttgcggcggaagagaggtgctgatgtgtggaaataacaactgctgccggtgcttctgcgtggaatgcgtggacctgctggtgggccccggcgccgcccaggccgctattaaggaagatccttggaactgctacatgtgcggccacaagggcacatacggcctgctgagacggagagaggactggcctagcagactgcagatgttcttcgccaataaccacgaccaggagttcgacccccctaaggtgtaccctcccgtccccgccgagaagagaaagcccatccgggtcctgagcctgttcgatggcatcgccaccggtctgctggtgctgaaggacctgggcatccaggtggataggtacattgcctccgaggtgtgcgaggactccatcaccgtgggaatggtgcgtcatcagggcaagatcatgtacgtgggcgacgtgcggagcgtgacacagaagcatatccaggagtggggccctttcgacctggtgatcggcggcagcccttgcaatgacctgagcatcgtgaacccagcccggaagggcctgtacgagggaaccggcagactgttcttcgagttttacagactgctgcacgacgcccggcctaaggaaggcgacgaccggcccttcttttggctgttcgagaatgtggtggccatgggagtcagcgacaagcgggatattagccggttcctggagagcaaccccgtgatgatcgatgccaaggaagtgagcgccgcccaccgggccagatacttctggggcaatctgcctggcatgaacagacccctggccagcaccgtgaacgacaagctggagctgcaggagtgcctggagcacggccggatcgccaagttcagcaaggtgagaaccatcaccacccgaagcaacagcatcaaacaaggcaaggaccagcactttcctgtgttcatgaacgagaaggaggacatcctgtggtgtaccgagatggagagagtgttcgggttcccagtccactacacagatgtcagcaacatgtctagactggccagacagagactgctgggaagaagctggtccgtccctgtgatcagacacctgttcgcccctctgaaggagtacttcgcctgcgtgagcagcggcaacagcaacgccaacagccggggccccagcttctctagcggcctggtgccactgtccctgagagggagccacatgggccccatggagatctacaaaaccgtgagcgcctggaagcggcagcctgtgcgcgtgctgagcctgtttcggaatatcgataaagtcctgaaaagcctgggattcctggagagcggctctggctccggcggtggcaccctgaagtacgtggaggatgtgacaaacgtggtcagacgggatgtggagaagtggggccccttcgatctggtgtacggcagcacccaacccctgggcagctcttgtgaccggtgccctggctggtacatgtttcagttccaccggatcctgcagtacgccctgccgagacaggagtcccagcggccattcttttggattttcatggacaacttgctgctgaccgaggatgaccaggaaactaccactcggttcctgcagaccgaagccgtgaccctgcaggacgtgagaggccgggactaccagaacgccatgcgggtgtggtccaacatccctggactgaaaagcaagcacgcacctctgacccctaaagaagaggagtacctgcaggcccaggtgcggagcagaagcaagctggacgcccctaaggtggatctgctggtgaagaattgcctcctgcccctgagagagtacttcaagtatttcagccagaatagtctgcccctgggaggcagcggcggcggcagccaggaggccgtgaccttcgaggacgtggccgtgtacttcacccagaaccagtgggccagcctggagcccgcccagaaggccctgtaccaggaggtgatgctggagaactacgccaacatcaccagcctggccgccctgcccttccccaagcccgacctgatcttccagctggagctgggcgaggccccctgggtgcccgacagctggaggcccgtgggcgaggaggccctgggcggcaggggcggcccaagcagcggcgcccctcctcccagcggcggcagcccagccggctccccaacctctaccgaggagggcacctctgagtccgccacccccgagagcggccctggcacctccaccgagcccagcgagggcagcgcacccggcagccctgccggcagccccacctccacagaggagggaaccagcaccgagcccagcgaaggcagcgccccaggcaccagcaccgagcctagtgagcaggagattaaacggatcaacaagatcagaagaagacttgtgaaagacagcaacaccaagaaggccggcaagacaggccccatgaaaaccctgctggttagagtgatgacacccgatctgagagagcggctggaaaacctgagaaagaagcctgaaaatatcccccagcccatcagcaatacatctagagccaacctgaataagctgctgaccgattacaccgaaatgaagaaggcgatcctgcatgtgtactgggaagagttccagaaggaccctgtgggcctgatgagccgggtggcccagcctgccagcaagaagatcgatcagaacaagctgaaacctgagatggacgagaagggcaacctgaccaccgccggctttgcctgctctcagtgtggccagcccctgttcgtgtacaagctggagcaggtgtctgagaagggcaaggcttacaccaactacttcggacggtgcaatgtggccgagcacgaaaagctgatcctgctggcccagctgaagcccgagaaggatagcgacgaagccgtgacatatagcctgggaaagtttgggcagagggccctggatttctacagcattcatgtgaccaaggagtccacccaccccgtgaagcccctggcccagatcgccggaaacagatacgcctccggacctgtgggaaaggccctgagcgacgcatgtatgggcacaatcgcctccttcctgtctaagtaccaggacatcatcatcgaacaccagaaggtggtgaagggcaaccagaagagactggagagcctgcgggagctggccggcaaggaaaacctggaataccctagcgtgaccctgccacctcagcctcacaccaaggagggcgttgatgcctacaacgaagtgatcgcccgggtgcgaatgtgggtgaacctgaacctgtggcagaagctgaagctaagcagagatgatgccaagcctctgctgagactgaagggattcccttcctttcctctggtcgagagacaggccaacgaagtggactggtgggacatggtgtgtaacgtgaagaagctgatcaacgagaaaaaggaggatggcaaggtgttttggcagaatctggctggctacaagagacaggaagccctgagaccatacctgagcagcgaggaagatcggaagaagggaaagaaattcgctcggtaccagctgggcgacctgctgctgcacctggaaaagaagcacggcgaggactggggaaaggtgtacgacgaggcctgggagcggattgacaagaaagtggaaggcctgagcaagcacatcaagctggaagaggaacggagaagcgaggacgcccagagcaaggccgccctgaccgactggctgcgggctaaggccagcttcgtgatcgagggcctgaaggaggccgacaaggacgagttctgcagatgcgagctgaagctgcagaagtggtacggggacctgcggggaaagcccttcgccatcgaagccgagaacagcatcctggacatcagcggcttcagcaagcagtacaactgtgccttcatctggcagaaggacggcgtgaagaagctgaacctgtacctgatcatcaactacttcaagggcggcaagctgcggttcaagaagatcaaacctgaagccttcgaagccaacagattctacaccgtgatcaacaaaaagagcggcgagatcgtgcccatggaggtgaacttcaacttcgacgaccccaacctgatcatcctgcctctggcctttggcaagagacagggcagagaattcatctggaacgacctgctgtccctggaaaccggcagcctgaagctggccaacggaagagtgatcgagaagacactgtacaacagaagaacccggcaggatgagcctgccctgttcgtggccctgaccttcgagcggcgggaggtcctggactcctccaatatcaaaccaatgaacctgatcggcgtggcaagaggcgaaaacatccccgccgtgatcgccctgaccgaccccgagggctgcccactgagccggtttaaggatagcctgggaaacccaacccacatcctgagaatcggcgagagctataaggagaagcagcggaccatccaggccaagaaggaggtggagcagcggagagccggcggctacagccggaagtacgccagcaaagccaagaatctggcagacgatatggtgagaaacaccgctagagatctgctgtactacgccgtgacccaggatgccatgctgatcttcgccaacctgagccggggcttcggccggcagggcaagcggaccttcatggccgagagacagtacacacggatggaggactggctgaccgccaagctggcctacgagggcctgagcaagacctacctgtccaagacactggcccagtacacctccaagacatgcagcaactgtgggtttaccatcaccagcgccgactacgacagggtgctggagaagctgaagaagacagcaacaggctggatgaccacaattaacggcaaggagctgaaggtggagggccagattacctactacaacagatacaagagacagaacgtagtcaaggacctgtccgtcgagctggatagactgagcgaagaatctgtgaacaacgacatctcctcctggacaaagggcagaagcggagaagctctgagcctcctgaagaaaagattctcccatagacccgtgcaggagaagttcgtgtgcctgaactgcggcttcgagacacacgcagccgagcaagccgccctgaacatcgccagatcctggctgttcctgcggagccaggagtacaagaaataccagacaaacaagacaaccggcaacaccgataagagagccttcgtcgagacctggcagtccttttaccggaagaagcttaaggaggtgtggaaacctgccgtgcggtctggcggatctggcggaggctccaccagccccaagaaaaagagaaaagtctaagctgccttctgcggggcttgccttctggccatgcccttcttctctcccttgcacctgtacctcttggtctttgaataaagcctgagtaggaaggctagcaaaaaaaaaaaaaaaaaaaaaaaaaaaaaaaaaaaaaaaaaaaaaaaaaaaaaaaaaaaaaaaaaaaaaaaaaaaaaaaa

SEQ ID NO: 12467 - RNA, 5785 nt, synthetic construct
  source 1..5785: mol_type = other RNA
aggaaataagagagaaaagaagagtaagaagaaatataagagccaccatggcccctaagaagaagcgtaaagtgagccggatggaacgcctcgtctacgaggtgcggcagaagtgcagaaacatcgaggacatctgcatctcctgcggatctctgaacgtgaccctggagcacccactgttcatcggcggcatgtgccagaactgtaaaaactgttttctggagtgtgcctatcaatacgacgatgacggctaccagagctactgcaccatctgttgcggcggaagagaggtgctgatgtgtggaaataacaactgctgccggtgcttctgcgtggaatgcgtggacctgctggtgggccccggcgccgcccaggccgctattaaggaagatccttggaactgctacatgtgcggccacaagggcacatacggcctgctgagacggagagaggactggcctagcagactgcagatgttcttcgccaataaccacgaccaggagttcgacccccctaaggtgtaccctcccgtccccgccgagaagagaaagcccatccgggtcctgagcctgttcgatggcatcgccaccggtctgctggtgctgaaggacctgggcatccaggtggataggtacattgcctccgaggtgtgcgaggactccatcaccgtgggaatggtgcgtcatcagggcaagatcatgtacgtgggcgacgtgcggagcgtgacacagaagcatatccaggagtggggccctttcgacctggtgatcggcggcagcccttgcaatgacctgagcatcgtgaacccagcccggaagggcctgtacgagggaaccggcagactgttcttcgagttttacagactgctgcacgacgcccggcctaaggaaggcgacgaccggcccttcttttggctgttcgagaatgtggtggccatgggagtcagcgacaagcgggatattagccggttcctggagagcaaccccgtgatgatcgatgccaaggaagtgagcgccgcccaccgggccagatacttctggggcaatctgcctggcatgaacagacccctggccagcaccgtgaacgacaagctggagctgcaggagtgcctggagcacggccggatcgccaagttcagcaaggtgagaaccatcaccacccgaagcaacagcatcaaacaaggcaaggaccagcactttcctgtgttcatgaacgagaaggaggacatcctgtggtgtaccgagatggagagagtgttcgggttcccagtccactacacagatgtcagcaacatgtctagactggccagacagagactgctgggaagaagctggtccgtccctgtgatcagacacctgttcgcccctctgaaggagtacttcgcctgcgtgagcagcggcaacagcaacgccaacagccggggccccagcttctctagcggcctggtgccactgtccctgagagggagccacatgggccccatggagatctacaaaaccgtgagcgcctggaagcggcagcctgtgcgcgtgctgagcctgtttcggaatatcgataaagtcctgaaaagcctgggattcctggagagcggctctggctccggcggtggcaccctgaagtacgtggaggatgtgacaaacgtggtcagacgggatgtggagaagtggggccccttcgatctggtgtacggcagcacccaacccctgggcagctcttgtgaccggtgccctggctggtacatgtttcagttccaccggatcctgcagtacgccctgccgagacaggagtcccagcggccattcttttggattttcatggacaacttgctgctgaccgaggatgaccaggaaactaccactcggttcctgcagaccgaagccgtgaccctgcaggacgtgagaggccgggactaccagaacgccatgcgggtgtggtccaacatccctggactgaaaagcaagcacgcacctctgacccctaaagaagaggagtacctgcaggcccaggtgcggagcagaagcaagctggacgcccctaaggtggatctgctggtgaagaattgcctcctgcccctgagagagtacttcaagtatttcagccagaatagtctgcccctgggaggcagcggcggcggccagatgcccgtgaagttcgaggacatcgccgtgagcttcagccaggaggagtgggagtacctgaacgaggagcagaaggagctgtacagggaggtgatggaggagaactaccagaccctgatcagcctgggcatcggcagccccagcgtgacccccgacatcatcagccacatcgagggcggcgaggagccctacatcagggaggagcccggcagcgaggagagggagcccggcaggagcagcggcggcccaagcagcggcgcccctcctcccagcggcggcagcccagccggctccccaacctctaccgaggagggcacctctgagtccgccacccccgagagcggccctggcacctccaccgagcccagcgagggcagcgcacccggcagccctgccggcagccccacctccacagaggagggaaccagcaccgagcccagcgaaggcagcgccccaggcaccagcaccgagcctagtgagcaggagattaaacggatcaacaagatcagaagaagacttgtgaaagacagcaacaccaagaaggccggcaagacaggccccatgaaaaccctgctggttagagtgatgacacccgatctgagagagcggctggaaaacctgagaaagaagcctgaaaatatcccccagcccatcagcaatacatctagagccaacctgaataagctgctgaccgattacaccgaaatgaagaaggcgatcctgcatgtgtactgggaagagttccagaaggaccctgtgggcctgatgagccgggtggcccagcctgccagcaagaagatcgatcagaacaagctgaaacctgagatggacgagaagggcaacctgaccaccgccggctttgcctgctctcagtgtggccagcccctgttcgtgtacaagctggagcaggtgtctgagaagggcaaggcttacaccaactacttcggacggtgcaatgtggccgagcacgaaaagctgatcctgctggcccagctgaagcccgagaaggatagcgacgaagccgtgacatatagcctgggaaagtttgggcagagggccctggatttctacagcattcatgtgaccaaggagtccacccaccccgtgaagcccctggcccagatcgccggaaacagatacgcctccggacctgtgggaaaggccctgagcgacgcatgtatgggcacaatcgcctccttcctgtctaagtaccaggacatcatcatcgaacaccagaaggtggtgaagggcaaccagaagagactggagagcctgcgggagctggccggcaaggaaaacctggaataccctagcgtgaccctgccacctcagcctcacaccaaggagggcgttgatgcctacaacgaagtgatcgcccgggtgcgaatgtgggtgaacctgaacctgtggcagaagctgaagctaagcagagatgatgccaagcctctgctgagactgaagggattcccttcctttcctctggtcgagagacaggccaacgaagtggactggtgggacatggtgtgtaacgtgaagaagctgatcaacgagaaaaaggaggatggcaaggtgttttggcagaatctggctggctacaagagacaggaagccctgagaccatacctgagcagcgaggaagatcggaagaagggaaagaaattcgctcggtaccagctgggcgacctgctgctgcacctggaaaagaagcacggcgaggactggggaaaggtgtacgacgaggcctgggagcggattgacaagaaagtggaaggcctgagcaagcacatcaagctggaagaggaacggagaagcgaggacgcccagagcaaggccgccctgaccgactggctgcgggctaaggccagcttcgtgatcgagggcctgaaggaggccgacaaggacgagttctgcagatgcgagctgaagctgcagaagtggtacggggacctgcggggaaagcccttcgccatcgaagccgagaacagcatcctggacatcagcggcttcagcaagcagtacaactgtgccttcatctggcagaaggacggcgtgaagaagctgaacctgtacctgatcatcaactacttcaagggcggcaagctgcggttcaagaagatcaaacctgaagccttcgaagccaacagattctacaccgtgatcaacaaaaagagcggcgagatcgtgcccatggaggtgaacttcaacttcgacgaccccaacctgatcatcctgcctctggcctttggcaagagacagggcagagaattcatctggaacgacctgctgtccctggaaaccggcagcctgaagctggccaacggaagagtgatcgagaagacactgtacaacagaagaacccggcaggatgagcctgccctgttcgtggccctgaccttcgagcggcgggaggtcctggactcctccaatatcaaaccaatgaacctgatcggcgtggcaagaggcgaaaacatccccgccgtgatcgccctgaccgaccccgagggctgcccactgagccggtttaaggatagcctgggaaacccaacccacatcctgagaatcggcgagagctataaggagaagcagcggaccatccaggccaagaaggaggtggagcagcggagagccggcggctacagccggaagtacgccagcaaagccaagaatctggcagacgatatggtgagaaacaccgctagagatctgctgtactacgccgtgacccaggatgccatgctgatcttcgccaacctgagccggggcttcggccggcagggcaagcggaccttcatggccgagagacagtacacacggatggaggactggctgaccgccaagctggcctacgagggcctgagcaagacctacctgtccaagacactggcccagtacacctccaagacatgcagcaactgtgggtttaccatcaccagcgccgactacgacagggtgctggagaagctgaagaagacagcaacaggctggatgaccacaattaacggcaaggagctgaaggtggagggccagattacctactacaacagatacaagagacagaacgtagtcaaggacctgtccgtcgagctggatagactgagcgaagaatctgtgaacaacgacatctcctcctggacaaagggcagaagcggagaagctctgagcctcctgaagaaaagattctcccatagacccgtgcaggagaagttcgtgtgcctgaactgcggcttcgagacacacgcagccgagcaagccgccctgaacatcgccagatcctggctgttcctgcggagccaggagtacaagaaataccagacaaacaagacaaccggcaacaccgataagagagccttcgtcgagacctggcagtccttttaccggaagaagcttaaggaggtgtggaaacctgccgtgcggtctggcggatctggcggaggctccaccagccccaagaaaaagagaaaagtctaagctgccttctgcggggcttgccttctggccatgcccttcttctctcccttgcacctgtacctcttggtctttgaataaagcctgagtaggaaggctagcaaaaaaaaaaaaaaaaaaaaaaaaaaaaaaaaaaaaaaaaaaaaaaaaaaaaaaaaaaaaaaaaaaaaaaaaaaaaaaaa

SEQ ID NO: 12468 - RNA, 5785 nt, synthetic construct
  source 1..5785: mol_type = other RNA
aggaaataagagagaaaagaagagtaagaagaaatataagagccaccatggcccctaagaagaagcgtaaagtgagccggatggaacgcctcgtctacgaggtgcggcagaagtgcagaaacatcgaggacatctgcatctcctgcggatctctgaacgtgaccctggagcacccactgttcatcggcggcatgtgccagaactgtaaaaactgttttctggagtgtgcctatcaatacgacgatgacggctaccagagctactgcaccatctgttgcggcggaagagaggtgctgatgtgtggaaataacaactgctgccggtgcttctgcgtggaatgcgtggacctgctggtgggccccggcgccgcccaggccgctattaaggaagatccttggaactgctacatgtgcggccacaagggcacatacggcctgctgagacggagagaggactggcctagcagactgcagatgttcttcgccaataaccacgaccaggagttcgacccccctaaggtgtaccctcccgtccccgccgagaagagaaagcccatccgggtcctgagcctgttcgatggcatcgccaccggtctgctggtgctgaaggacctgggcatccaggtggataggtacattgcctccgaggtgtgcgaggactccatcaccgtgggaatggtgcgtcatcagggcaagatcatgtacgtgggcgacgtgcggagcgtgacacagaagcatatccaggagtggggccctttcgacctggtgatcggcggcagcccttgcaatgacctgagcatcgtgaacccagcccggaagggcctgtacgagggaaccggcagactgttcttcgagttttacagactgctgcacgacgcccggcctaaggaaggcgacgaccggcccttcttttggctgttcgagaatgtggtggccatgggagtcagcgacaagcgggatattagccggttcctggagagcaaccccgtgatgatcgatgccaaggaagtgagcgccgcccaccgggccagatacttctggggcaatctgcctggcatgaacagacccctggccagcaccgtgaacgacaagctggagctgcaggagtgcctggagcacggccggatcgccaagttcagcaaggtgagaaccatcaccacccgaagcaacagcatcaaacaaggcaaggaccagcactttcctgtgttcatgaacgagaaggaggacatcctgtggtgtaccgagatggagagagtgttcgggttcccagtccactacacagatgtcagcaacatgtctagactggccagacagagactgctgggaagaagctggtccgtccctgtgatcagacacctgttcgcccctctgaaggagtacttcgcctgcgtgagcagcggcaacagcaacgccaacagccggggccccagcttctctagcggcctggtgccactgtccctgagagggagccacatgggccccatggagatctacaaaaccgtgagcgcctggaagcggcagcctgtgcgcgtgctgagcctgtttcggaatatcgataaagtcctgaaaagcctgggattcctggagagcggctctggctccggcggtggcaccctgaagtacgtggaggatgtgacaaacgtggtcagacgggatgtggagaagtggggccccttcgatctggtgtacggcagcacccaacccctgggcagctcttgtgaccggtgccctggctggtacatgtttcagttccaccggatcctgcagtacgccctgccgagacaggagtcccagcggccattcttttggattttcatggacaacttgctgctgaccgaggatgaccaggaaactaccactcggttcctgcagaccgaagccgtgaccctgcaggacgtgagaggccgggactaccagaacgccatgcgggtgtggtccaacatccctggactgaaaagcaagcacgcacctctgacccctaaagaagaggagtacctgcaggcccaggtgcggagcagaagcaagctggacgcccctaaggtggatctgctggtgaagaattgcctcctgcccctgagagagtacttcaagtatttcagccagaatagtctgcccctgggaggcagcggcggcggcatggacagcgtgaccatcgaggacgtggccgtggacttcaccctggaggagtgggccctgctgggccccagccagaggaagctgtacagggacgtgatgcaggagaccctgaggaacctggccgccgtgggcgccaagagggagtaccacgccatcgaggaccagtacaagaaccagggcaggaagctgaggaccttcatggtggagaggttctgcaagagcaaggacatcagcctgtgcggcggcggcccaagcagcggcgcccctcctcccagcggcggcagcccagccggctccccaacctctaccgaggagggcacctctgagtccgccacccccgagagcggccctggcacctccaccgagcccagcgagggcagcgcacccggcagccctgccggcagccccacctccacagaggagggaaccagcaccgagcccagcgaaggcagcgccccaggcaccagcaccgagcctagtgagcaggagattaaacggatcaacaagatcagaagaagacttgtgaaagacagcaacaccaagaaggccggcaagacaggccccatgaaaaccctgctggttagagtgatgacacccgatctgagagagcggctggaaaacctgagaaagaagcctgaaaatatcccccagcccatcagcaatacatctagagccaacctgaataagctgctgaccgattacaccgaaatgaagaaggcgatcctgcatgtgtactgggaagagttccagaaggaccctgtgggcctgatgagccgggtggcccagcctgccagcaagaagatcgatcagaacaagctgaaacctgagatggacgagaagggcaacctgaccaccgccggctttgcctgctctcagtgtggccagcccctgttcgtgtacaagctggagcaggtgtctgagaagggcaaggcttacaccaactacttcggacggtgcaatgtggccgagcacgaaaagctgatcctgctggcccagctgaagcccgagaaggatagcgacgaagccgtgacatatagcctgggaaagtttgggcagagggccctggatttctacagcattcatgtgaccaaggagtccacccaccccgtgaagcccctggcccagatcgccggaaacagatacgcctccggacctgtgggaaaggccctgagcgacgcatgtatgggcacaatcgcctccttcctgtctaagtaccaggacatcatcatcgaacaccagaaggtggtgaagggcaaccagaagagactggagagcctgcgggagctggccggcaaggaaaacctggaataccctagcgtgaccctgccacctcagcctcacaccaaggagggcgttgatgcctacaacgaagtgatcgcccgggtgcgaatgtgggtgaacctgaacctgtggcagaagctgaagctaagcagagatgatgccaagcctctgctgagactgaagggattcccttcctttcctctggtcgagagacaggccaacgaagtggactggtgggacatggtgtgtaacgtgaagaagctgatcaacgagaaaaaggaggatggcaaggtgttttggcagaatctggctggctacaagagacaggaagccctgagaccatacctgagcagcgaggaagatcggaagaagggaaagaaattcgctcggtaccagctgggcgacctgctgctgcacctggaaaagaagcacggcgaggactggggaaaggtgtacgacgaggcctgggagcggattgacaagaaagtggaaggcctgagcaagcacatcaagctggaagaggaacggagaagcgaggacgcccagagcaaggccgccctgaccgactggctgcgggctaaggccagcttcgtgatcgagggcctgaaggaggccgacaaggacgagttctgcagatgcgagctgaagctgcagaagtggtacggggacctgcggggaaagcccttcgccatcgaagccgagaacagcatcctggacatcagcggcttcagcaagcagtacaactgtgccttcatctggcagaaggacggcgtgaagaagctgaacctgtacctgatcatcaactacttcaagggcggcaagctgcggttcaagaagatcaaacctgaagccttcgaagccaacagattctacaccgtgatcaacaaaaagagcggcgagatcgtgcccatggaggtgaacttcaacttcgacgaccccaacctgatcatcctgcctctggcctttggcaagagacagggcagagaattcatctggaacgacctgctgtccctggaaaccggcagcctgaagctggccaacggaagagtgatcgagaagacactgtacaacagaagaacccggcaggatgagcctgccctgttcgtggccctgaccttcgagcggcgggaggtcctggactcctccaatatcaaaccaatgaacctgatcggcgtggcaagaggcgaaaacatccccgccgtgatcgccctgaccgaccccgagggctgcccactgagccggtttaaggatagcctgggaaacccaacccacatcctgagaatcggcgagagctataaggagaagcagcggaccatccaggccaagaaggaggtggagcagcggagagccggcggctacagccggaagtacgccagcaaagccaagaatctggcagacgatatggtgagaaacaccgctagagatctgctgtactacgccgtgacccaggatgccatgctgatcttcgccaacctgagccggggcttcggccggcagggcaagcggaccttcatggccgagagacagtacacacggatggaggactggctgaccgccaagctggcctacgagggcctgagcaagacctacctgtccaagacactggcccagtacacctccaagacatgcagcaactgtgggtttaccatcaccagcgccgactacgacagggtgctggagaagctgaagaagacagcaacaggctggatgaccacaattaacggcaaggagctgaaggtggagggccagattacctactacaacagatacaagagacagaacgtagtcaaggacctgtccgtcgagctggatagactgagcgaagaatctgtgaacaacgacatctcctcctggacaaagggcagaagcggagaagctctgagcctcctgaagaaaagattctcccatagacccgtgcaggagaagttcgtgtgcctgaactgcggcttcgagacacacgcagccgagcaagccgccctgaacatcgccagatcctggctgttcctgcggagccaggagtacaagaaataccagacaaacaagacaaccggcaacaccgataagagagccttcgtcgagacctggcagtccttttaccggaagaagcttaaggaggtgtggaaacctgccgtgcggtctggcggatctggcggaggctccaccagccccaagaaaaagagaaaagtctaagctgccttctgcggggcttgccttctggccatgcccttcttctctcccttgcacctgtacctcttggtctttgaataaagcctgagtaggaaggctagcaaaaaaaaaaaaaaaaaaaaaaaaaaaaaaaaaaaaaaaaaaaaaaaaaaaaaaaaaaaaaaaaaaaaaaaaaaaaaaaa

SEQ ID NO: 12469 - RNA, 5785 nt, synthetic construct
  source 1..5785: mol_type = other RNA
aggaaataagagagaaaagaagagtaagaagaaatataagagccaccatggcccctaagaagaagcgtaaagtgagccggatggaacgcctcgtctacgaggtgcggcagaagtgcagaaacatcgaggacatctgcatctcctgcggatctctgaacgtgaccctggagcacccactgttcatcggcggcatgtgccagaactgtaaaaactgttttctggagtgtgcctatcaatacgacgatgacggctaccagagctactgcaccatctgttgcggcggaagagaggtgctgatgtgtggaaataacaactgctgccggtgcttctgcgtggaatgcgtggacctgctggtgggccccggcgccgcccaggccgctattaaggaagatccttggaactgctacatgtgcggccacaagggcacatacggcctgctgagacggagagaggactggcctagcagactgcagatgttcttcgccaataaccacgaccaggagttcgacccccctaaggtgtaccctcccgtccccgccgagaagagaaagcccatccgggtcctgagcctgttcgatggcatcgccaccggtctgctggtgctgaaggacctgggcatccaggtggataggtacattgcctccgaggtgtgcgaggactccatcaccgtgggaatggtgcgtcatcagggcaagatcatgtacgtgggcgacgtgcggagcgtgacacagaagcatatccaggagtggggccctttcgacctggtgatcggcggcagcccttgcaatgacctgagcatcgtgaacccagcccggaagggcctgtacgagggaaccggcagactgttcttcgagttttacagactgctgcacgacgcccggcctaaggaaggcgacgaccggcccttcttttggctgttcgagaatgtggtggccatgggagtcagcgacaagcgggatattagccggttcctggagagcaaccccgtgatgatcgatgccaaggaagtgagcgccgcccaccgggccagatacttctggggcaatctgcctggcatgaacagacccctggccagcaccgtgaacgacaagctggagctgcaggagtgcctggagcacggccggatcgccaagttcagcaaggtgagaaccatcaccacccgaagcaacagcatcaaacaaggcaaggaccagcactttcctgtgttcatgaacgagaaggaggacatcctgtggtgtaccgagatggagagagtgttcgggttcccagtccactacacagatgtcagcaacatgtctagactggccagacagagactgctgggaagaagctggtccgtccctgtgatcagacacctgttcgcccctctgaaggagtacttcgcctgcgtgagcagcggcaacagcaacgccaacagccggggccccagcttctctagcggcctggtgccactgtccctgagagggagccacatgggccccatggagatctacaaaaccgtgagcgcctggaagcggcagcctgtgcgcgtgctgagcctgtttcggaatatcgataaagtcctgaaaagcctgggattcctggagagcggctctggctccggcggtggcaccctgaagtacgtggaggatgtgacaaacgtggtcagacgggatgtggagaagtggggccccttcgatctggtgtacggcagcacccaacccctgggcagctcttgtgaccggtgccctggctggtacatgtttcagttccaccggatcctgcagtacgccctgccgagacaggagtcccagcggccattcttttggattttcatggacaacttgctgctgaccgaggatgaccaggaaactaccactcggttcctgcagaccgaagccgtgaccctgcaggacgtgagaggccgggactaccagaacgccatgcgggtgtggtccaacatccctggactgaaaagcaagcacgcacctctgacccctaaagaagaggagtacctgcaggcccaggtgcggagcagaagcaagctggacgcccctaaggtggatctgctggtgaagaattgcctcctgcccctgagagagtacttcaagtatttcagccagaatagtctgcccctgggaggcagcggcggcggcttccaggagcccgtgaccttcgaggacgtggccgtgtacttcacccagaacgagtggaccagcctgcagcccagccagagggccctgttcagggaggtgatgctggagaactacgccaccgtgaccagcctgagcgccttccccttccccaagcccgacctgatcttcaggctggagcagggcgaggccgcctggggccccgacccctggaccctggccggcgaggaggccctgaggggcctgggcggcccaagcagcggcgcccctcctcccagcggcggcagcccagccggctccccaacctctaccgaggagggcacctctgagtccgccacccccgagagcggccctggcacctccaccgagcccagcgagggcagcgcacccggcagccctgccggcagccccacctccacagaggagggaaccagcaccgagcccagcgaaggcagcgccccaggcaccagcaccgagcctagtgagcaggagattaaacggatcaacaagatcagaagaagacttgtgaaagacagcaacaccaagaaggccggcaagacaggccccatgaaaaccctgctggttagagtgatgacacccgatctgagagagcggctggaaaacctgagaaagaagcctgaaaatatcccccagcccatcagcaatacatctagagccaacctgaataagctgctgaccgattacaccgaaatgaagaaggcgatcctgcatgtgtactgggaagagttccagaaggaccctgtgggcctgatgagccgggtggcccagcctgccagcaagaagatcgatcagaacaagctgaaacctgagatggacgagaagggcaacctgaccaccgccggctttgcctgctctcagtgtggccagcccctgttcgtgtacaagctggagcaggtgtctgagaagggcaaggcttacaccaactacttcggacggtgcaatgtggccgagcacgaaaagctgatcctgctggcccagctgaagcccgagaaggatagcgacgaagccgtgacatatagcctgggaaagtttgggcagagggccctggatttctacagcattcatgtgaccaaggagtccacccaccccgtgaagcccctggcccagatcgccggaaacagatacgcctccggacctgtgggaaaggccctgagcgacgcatgtatgggcacaatcgcctccttcctgtctaagtaccaggacatcatcatcgaacaccagaaggtggtgaagggcaaccagaagagactggagagcctgcgggagctggccggcaaggaaaacctggaataccctagcgtgaccctgccacctcagcctcacaccaaggagggcgttgatgcctacaacgaagtgatcgcccgggtgcgaatgtgggtgaacctgaacctgtggcagaagctgaagctaagcagagatgatgccaagcctctgctgagactgaagggattcccttcctttcctctggtcgagagacaggccaacgaagtggactggtgggacatggtgtgtaacgtgaagaagctgatcaacgagaaaaaggaggatggcaaggtgttttggcagaatctggctggctacaagagacaggaagccctgagaccatacctgagcagcgaggaagatcggaagaagggaaagaaattcgctcggtaccagctgggcgacctgctgctgcacctggaaaagaagcacggcgaggactggggaaaggtgtacgacgaggcctgggagcggattgacaagaaagtggaaggcctgagcaagcacatcaagctggaagaggaacggagaagcgaggacgcccagagcaaggccgccctgaccgactggctgcgggctaaggccagcttcgtgatcgagggcctgaaggaggccgacaaggacgagttctgcagatgcgagctgaagctgcagaagtggtacggggacctgcggggaaagcccttcgccatcgaagccgagaacagcatcctggacatcagcggcttcagcaagcagtacaactgtgccttcatctggcagaaggacggcgtgaagaagctgaacctgtacctgatcatcaactacttcaagggcggcaagctgcggttcaagaagatcaaacctgaagccttcgaagccaacagattctacaccgtgatcaacaaaaagagcggcgagatcgtgcccatggaggtgaacttcaacttcgacgaccccaacctgatcatcctgcctctggcctttggcaagagacagggcagagaattcatctggaacgacctgctgtccctggaaaccggcagcctgaagctggccaacggaagagtgatcgagaagacactgtacaacagaagaacccggcaggatgagcctgccctgttcgtggccctgaccttcgagcggcgggaggtcctggactcctccaatatcaaaccaatgaacctgatcggcgtggcaagaggcgaaaacatccccgccgtgatcgccctgaccgaccccgagggctgcccactgagccggtttaaggatagcctgggaaacccaacccacatcctgagaatcggcgagagctataaggagaagcagcggaccatccaggccaagaaggaggtggagcagcggagagccggcggctacagccggaagtacgccagcaaagccaagaatctggcagacgatatggtgagaaacaccgctagagatctgctgtactacgccgtgacccaggatgccatgctgatcttcgccaacctgagccggggcttcggccggcagggcaagcggaccttcatggccgagagacagtacacacggatggaggactggctgaccgccaagctggcctacgagggcctgagcaagacctacctgtccaagacactggcccagtacacctccaagacatgcagcaactgtgggtttaccatcaccagcgccgactacgacagggtgctggagaagctgaagaagacagcaacaggctggatgaccacaattaacggcaaggagctgaaggtggagggccagattacctactacaacagatacaagagacagaacgtagtcaaggacctgtccgtcgagctggatagactgagcgaagaatctgtgaacaacgacatctcctcctggacaaagggcagaagcggagaagctctgagcctcctgaagaaaagattctcccatagacccgtgcaggagaagttcgtgtgcctgaactgcggcttcgagacacacgcagccgagcaagccgccctgaacatcgccagatcctggctgttcctgcggagccaggagtacaagaaataccagacaaacaagacaaccggcaacaccgataagagagccttcgtcgagacctggcagtccttttaccggaagaagcttaaggaggtgtggaaacctgccgtgcggtctggcggatctggcggaggctccaccagccccaagaaaaagagaaaagtctaagctgccttctgcggggcttgccttctggccatgcccttcttctctcccttgcacctgtacctcttggtctttgaataaagcctgagtaggaaggctagcaaaaaaaaaaaaaaaaaaaaaaaaaaaaaaaaaaaaaaaaaaaaaaaaaaaaaaaaaaaaaaaaaaaaaaaaaaaaaaaa

SEQ ID NO: 12470 - RNA, 5785 nt, synthetic construct
  source 1..5785: mol_type = other RNA
aggaaataagagagaaaagaagagtaagaagaaatataagagccaccatggcccctaagaagaagcgtaaagtgagccggatggaacgcctcgtctacgaggtgcggcagaagtgcagaaacatcgaggacatctgcatctcctgcggatctctgaacgtgaccctggagcacccactgttcatcggcggcatgtgccagaactgtaaaaactgttttctggagtgtgcctatcaatacgacgatgacggctaccagagctactgcaccatctgttgcggcggaagagaggtgctgatgtgtggaaataacaactgctgccggtgcttctgcgtggaatgcgtggacctgctggtgggccccggcgccgcccaggccgctattaaggaagatccttggaactgctacatgtgcggccacaagggcacatacggcctgctgagacggagagaggactggcctagcagactgcagatgttcttcgccaataaccacgaccaggagttcgacccccctaaggtgtaccctcccgtccccgccgagaagagaaagcccatccgggtcctgagcctgttcgatggcatcgccaccggtctgctggtgctgaaggacctgggcatccaggtggataggtacattgcctccgaggtgtgcgaggactccatcaccgtgggaatggtgcgtcatcagggcaagatcatgtacgtgggcgacgtgcggagcgtgacacagaagcatatccaggagtggggccctttcgacctggtgatcggcggcagcccttgcaatgacctgagcatcgtgaacccagcccggaagggcctgtacgagggaaccggcagactgttcttcgagttttacagactgctgcacgacgcccggcctaaggaaggcgacgaccggcccttcttttggctgttcgagaatgtggtggccatgggagtcagcgacaagcgggatattagccggttcctggagagcaaccccgtgatgatcgatgccaaggaagtgagcgccgcccaccgggccagatacttctggggcaatctgcctggcatgaacagacccctggccagcaccgtgaacgacaagctggagctgcaggagtgcctggagcacggccggatcgccaagttcagcaaggtgagaaccatcaccacccgaagcaacagcatcaaacaaggcaaggaccagcactttcctgtgttcatgaacgagaaggaggacatcctgtggtgtaccgagatggagagagtgttcgggttcccagtccactacacagatgtcagcaacatgtctagactggccagacagagactgctgggaagaagctggtccgtccctgtgatcagacacctgttcgcccctctgaaggagtacttcgcctgcgtgagcagcggcaacagcaacgccaacagccggggccccagcttctctagcggcctggtgccactgtccctgagagggagccacatgggccccatggagatctacaaaaccgtgagcgcctggaagcggcagcctgtgcgcgtgctgagcctgtttcggaatatcgataaagtcctgaaaagcctgggattcctggagagcggctctggctccggcggtggcaccctgaagtacgtggaggatgtgacaaacgtggtcagacgggatgtggagaagtggggccccttcgatctggtgtacggcagcacccaacccctgggcagctcttgtgaccggtgccctggctggtacatgtttcagttccaccggatcctgcagtacgccctgccgagacaggagtcccagcggccattcttttggattttcatggacaacttgctgctgaccgaggatgaccaggaaactaccactcggttcctgcagaccgaagccgtgaccctgcaggacgtgagaggccgggactaccagaacgccatgcgggtgtggtccaacatccctggactgaaaagcaagcacgcacctctgacccctaaagaagaggagtacctgcaggcccaggtgcggagcagaagcaagctggacgcccctaaggtggatctgctggtgaagaattgcctcctgcccctgagagagtacttcaagtatttcagccagaatagtctgcccctgggaggcagcggcggcggcatgatcgagtaccagatccccgtgagcttcaaggacgtggtggtgggcttcacccaggaggagtggcaccagctgagccccgcccagagggccctgtacagggacgtgatgctggagacctacagcaacctggtgagcgtgggctacgagggcaccaagcccgacgtgatcctgaggctggagcaggaggaggccccctggatcggcgaggccgcctgccccggctgccactgctgggaggacggcggcccaagcagcggcgcccctcctcccagcggcggcagcccagccggctccccaacctctaccgaggagggcacctctgagtccgccacccccgagagcggccctggcacctccaccgagcccagcgagggcagcgcacccggcagccctgccggcagccccacctccacagaggagggaaccagcaccgagcccagcgaaggcagcgccccaggcaccagcaccgagcctagtgagcaggagattaaacggatcaacaagatcagaagaagacttgtgaaagacagcaacaccaagaaggccggcaagacaggccccatgaaaaccctgctggttagagtgatgacacccgatctgagagagcggctggaaaacctgagaaagaagcctgaaaatatcccccagcccatcagcaatacatctagagccaacctgaataagctgctgaccgattacaccgaaatgaagaaggcgatcctgcatgtgtactgggaagagttccagaaggaccctgtgggcctgatgagccgggtggcccagcctgccagcaagaagatcgatcagaacaagctgaaacctgagatggacgagaagggcaacctgaccaccgccggctttgcctgctctcagtgtggccagcccctgttcgtgtacaagctggagcaggtgtctgagaagggcaaggcttacaccaactacttcggacggtgcaatgtggccgagcacgaaaagctgatcctgctggcccagctgaagcccgagaaggatagcgacgaagccgtgacatatagcctgggaaagtttgggcagagggccctggatttctacagcattcatgtgaccaaggagtccacccaccccgtgaagcccctggcccagatcgccggaaacagatacgcctccggacctgtgggaaaggccctgagcgacgcatgtatgggcacaatcgcctccttcctgtctaagtaccaggacatcatcatcgaacaccagaaggtggtgaagggcaaccagaagagactggagagcctgcgggagctggccggcaaggaaaacctggaataccctagcgtgaccctgccacctcagcctcacaccaaggagggcgttgatgcctacaacgaagtgatcgcccgggtgcgaatgtgggtgaacctgaacctgtggcagaagctgaagctaagcagagatgatgccaagcctctgctgagactgaagggattcccttcctttcctctggtcgagagacaggccaacgaagtggactggtgggacatggtgtgtaacgtgaagaagctgatcaacgagaaaaaggaggatggcaaggtgttttggcagaatctggctggctacaagagacaggaagccctgagaccatacctgagcagcgaggaagatcggaagaagggaaagaaattcgctcggtaccagctgggcgacctgctgctgcacctggaaaagaagcacggcgaggactggggaaaggtgtacgacgaggcctgggagcggattgacaagaaagtggaaggcctgagcaagcacatcaagctggaagaggaacggagaagcgaggacgcccagagcaaggccgccctgaccgactggctgcgggctaaggccagcttcgtgatcgagggcctgaaggaggccgacaaggacgagttctgcagatgcgagctgaagctgcagaagtggtacggggacctgcggggaaagcccttcgccatcgaagccgagaacagcatcctggacatcagcggcttcagcaagcagtacaactgtgccttcatctggcagaaggacggcgtgaagaagctgaacctgtacctgatcatcaactacttcaagggcggcaagctgcggttcaagaagatcaaacctgaagccttcgaagccaacagattctacaccgtgatcaacaaaaagagcggcgagatcgtgcccatggaggtgaacttcaacttcgacgaccccaacctgatcatcctgcctctggcctttggcaagagacagggcagagaattcatctggaacgacctgctgtccctggaaaccggcagcctgaagctggccaacggaagagtgatcgagaagacactgtacaacagaagaacccggcaggatgagcctgccctgttcgtggccctgaccttcgagcggcgggaggtcctggactcctccaatatcaaaccaatgaacctgatcggcgtggcaagaggcgaaaacatccccgccgtgatcgccctgaccgaccccgagggctgcccactgagccggtttaaggatagcctgggaaacccaacccacatcctgagaatcggcgagagctataaggagaagcagcggaccatccaggccaagaaggaggtggagcagcggagagccggcggctacagccggaagtacgccagcaaagccaagaatctggcagacgatatggtgagaaacaccgctagagatctgctgtactacgccgtgacccaggatgccatgctgatcttcgccaacctgagccggggcttcggccggcagggcaagcggaccttcatggccgagagacagtacacacggatggaggactggctgaccgccaagctggcctacgagggcctgagcaagacctacctgtccaagacactggcccagtacacctccaagacatgcagcaactgtgggtttaccatcaccagcgccgactacgacagggtgctggagaagctgaagaagacagcaacaggctggatgaccacaattaacggcaaggagctgaaggtggagggccagattacctactacaacagatacaagagacagaacgtagtcaaggacctgtccgtcgagctggatagactgagcgaagaatctgtgaacaacgacatctcctcctggacaaagggcagaagcggagaagctctgagcctcctgaagaaaagattctcccatagacccgtgcaggagaagttcgtgtgcctgaactgcggcttcgagacacacgcagccgagcaagccgccctgaacatcgccagatcctggctgttcctgcggagccaggagtacaagaaataccagacaaacaagacaaccggcaacaccgataagagagccttcgtcgagacctggcagtccttttaccggaagaagcttaaggaggtgtggaaacctgccgtgcggtctggcggatctggcggaggctccaccagccccaagaaaaagagaaaagtctaagctgccttctgcggggcttgccttctggccatgcccttcttctctcccttgcacctgtacctcttggtctttgaataaagcctgagtaggaaggctagcaaaaaaaaaaaaaaaaaaaaaaaaaaaaaaaaaaaaaaaaaaaaaaaaaaaaaaaaaaaaaaaaaaaaaaaaaaaaaaaa

SEQ ID NO: 12471 - RNA, 5785 nt, synthetic construct
  source 1..5785: mol_type = other RNA
aggaaataagagagaaaagaagagtaagaagaaatataagagccaccatggcccctaagaagaagcgtaaagtgagccggatggaacgcctcgtctacgaggtgcggcagaagtgcagaaacatcgaggacatctgcatctcctgcggatctctgaacgtgaccctggagcacccactgttcatcggcggcatgtgccagaactgtaaaaactgttttctggagtgtgcctatcaatacgacgatgacggctaccagagctactgcaccatctgttgcggcggaagagaggtgctgatgtgtggaaataacaactgctgccggtgcttctgcgtggaatgcgtggacctgctggtgggccccggcgccgcccaggccgctattaaggaagatccttggaactgctacatgtgcggccacaagggcacatacggcctgctgagacggagagaggactggcctagcagactgcagatgttcttcgccaataaccacgaccaggagttcgacccccctaaggtgtaccctcccgtccccgccgagaagagaaagcccatccgggtcctgagcctgttcgatggcatcgccaccggtctgctggtgctgaaggacctgggcatccaggtggataggtacattgcctccgaggtgtgcgaggactccatcaccgtgggaatggtgcgtcatcagggcaagatcatgtacgtgggcgacgtgcggagcgtgacacagaagcatatccaggagtggggccctttcgacctggtgatcggcggcagcccttgcaatgacctgagcatcgtgaacccagcccggaagggcctgtacgagggaaccggcagactgttcttcgagttttacagactgctgcacgacgcccggcctaaggaaggcgacgaccggcccttcttttggctgttcgagaatgtggtggccatgggagtcagcgacaagcgggatattagccggttcctggagagcaaccccgtgatgatcgatgccaaggaagtgagcgccgcccaccgggccagatacttctggggcaatctgcctggcatgaacagacccctggccagcaccgtgaacgacaagctggagctgcaggagtgcctggagcacggccggatcgccaagttcagcaaggtgagaaccatcaccacccgaagcaacagcatcaaacaaggcaaggaccagcactttcctgtgttcatgaacgagaaggaggacatcctgtggtgtaccgagatggagagagtgttcgggttcccagtccactacacagatgtcagcaacatgtctagactggccagacagagactgctgggaagaagctggtccgtccctgtgatcagacacctgttcgcccctctgaaggagtacttcgcctgcgtgagcagcggcaacagcaacgccaacagccggggccccagcttctctagcggcctggtgccactgtccctgagagggagccacatgggccccatggagatctacaaaaccgtgagcgcctggaagcggcagcctgtgcgcgtgctgagcctgtttcggaatatcgataaagtcctgaaaagcctgggattcctggagagcggctctggctccggcggtggcaccctgaagtacgtggaggatgtgacaaacgtggtcagacgggatgtggagaagtggggccccttcgatctggtgtacggcagcacccaacccctgggcagctcttgtgaccggtgccctggctggtacatgtttcagttccaccggatcctgcagtacgccctgccgagacaggagtcccagcggccattcttttggattttcatggacaacttgctgctgaccgaggatgaccaggaaactaccactcggttcctgcagaccgaagccgtgaccctgcaggacgtgagaggccgggactaccagaacgccatgcgggtgtggtccaacatccctggactgaaaagcaagcacgcacctctgacccctaaagaagaggagtacctgcaggcccaggtgcggagcagaagcaagctggacgcccctaaggtggatctgctggtgaagaattgcctcctgcccctgagagagtacttcaagtatttcagccagaatagtctgcccctgggaggcagcggcggcggcccccaggagctggtgaccttcgaggacgtggccgtgtacctgagcaaggaggagtggggcctgctggaccccgcccagaggaggctgtacagggacgtgatgctggagaactacggcaacgtggccagcctgggcctgcccgtgagcaagcccgacctgatcagccagctggagaggaccgacctgcccctggtgcccaggctgccccagaccgagatcgaggacctgttcgacgagaagctgggcggcccaagcagcggcgcccctcctcccagcggcggcagcccagccggctccccaacctctaccgaggagggcacctctgagtccgccacccccgagagcggccctggcacctccaccgagcccagcgagggcagcgcacccggcagccctgccggcagccccacctccacagaggagggaaccagcaccgagcccagcgaaggcagcgccccaggcaccagcaccgagcctagtgagcaggagattaaacggatcaacaagatcagaagaagacttgtgaaagacagcaacaccaagaaggccggcaagacaggccccatgaaaaccctgctggttagagtgatgacacccgatctgagagagcggctggaaaacctgagaaagaagcctgaaaatatcccccagcccatcagcaatacatctagagccaacctgaataagctgctgaccgattacaccgaaatgaagaaggcgatcctgcatgtgtactgggaagagttccagaaggaccctgtgggcctgatgagccgggtggcccagcctgccagcaagaagatcgatcagaacaagctgaaacctgagatggacgagaagggcaacctgaccaccgccggctttgcctgctctcagtgtggccagcccctgttcgtgtacaagctggagcaggtgtctgagaagggcaaggcttacaccaactacttcggacggtgcaatgtggccgagcacgaaaagctgatcctgctggcccagctgaagcccgagaaggatagcgacgaagccgtgacatatagcctgggaaagtttgggcagagggccctggatttctacagcattcatgtgaccaaggagtccacccaccccgtgaagcccctggcccagatcgccggaaacagatacgcctccggacctgtgggaaaggccctgagcgacgcatgtatgggcacaatcgcctccttcctgtctaagtaccaggacatcatcatcgaacaccagaaggtggtgaagggcaaccagaagagactggagagcctgcgggagctggccggcaaggaaaacctggaataccctagcgtgaccctgccacctcagcctcacaccaaggagggcgttgatgcctacaacgaagtgatcgcccgggtgcgaatgtgggtgaacctgaacctgtggcagaagctgaagctaagcagagatgatgccaagcctctgctgagactgaagggattcccttcctttcctctggtcgagagacaggccaacgaagtggactggtgggacatggtgtgtaacgtgaagaagctgatcaacgagaaaaaggaggatggcaaggtgttttggcagaatctggctggctacaagagacaggaagccctgagaccatacctgagcagcgaggaagatcggaagaagggaaagaaattcgctcggtaccagctgggcgacctgctgctgcacctggaaaagaagcacggcgaggactggggaaaggtgtacgacgaggcctgggagcggattgacaagaaagtggaaggcctgagcaagcacatcaagctggaagaggaacggagaagcgaggacgcccagagcaaggccgccctgaccgactggctgcgggctaaggccagcttcgtgatcgagggcctgaaggaggccgacaaggacgagttctgcagatgcgagctgaagctgcagaagtggtacggggacctgcggggaaagcccttcgccatcgaagccgagaacagcatcctggacatcagcggcttcagcaagcagtacaactgtgccttcatctggcagaaggacggcgtgaagaagctgaacctgtacctgatcatcaactacttcaagggcggcaagctgcggttcaagaagatcaaacctgaagccttcgaagccaacagattctacaccgtgatcaacaaaaagagcggcgagatcgtgcccatggaggtgaacttcaacttcgacgaccccaacctgatcatcctgcctctggcctttggcaagagacagggcagagaattcatctggaacgacctgctgtccctggaaaccggcagcctgaagctggccaacggaagagtgatcgagaagacactgtacaacagaagaacccggcaggatgagcctgccctgttcgtggccctgaccttcgagcggcgggaggtcctggactcctccaatatcaaaccaatgaacctgatcggcgtggcaagaggcgaaaacatccccgccgtgatcgccctgaccgaccccgagggctgcccactgagccggtttaaggatagcctgggaaacccaacccacatcctgagaatcggcgagagctataaggagaagcagcggaccatccaggccaagaaggaggtggagcagcggagagccggcggctacagccggaagtacgccagcaaagccaagaatctggcagacgatatggtgagaaacaccgctagagatctgctgtactacgccgtgacccaggatgccatgctgatcttcgccaacctgagccggggcttcggccggcagggcaagcggaccttcatggccgagagacagtacacacggatggaggactggctgaccgccaagctggcctacgagggcctgagcaagacctacctgtccaagacactggcccagtacacctccaagacatgcagcaactgtgggtttaccatcaccagcgccgactacgacagggtgctggagaagctgaagaagacagcaacaggctggatgaccacaattaacggcaaggagctgaaggtggagggccagattacctactacaacagatacaagagacagaacgtagtcaaggacctgtccgtcgagctggatagactgagcgaagaatctgtgaacaacgacatctcctcctggacaaagggcagaagcggagaagctctgagcctcctgaagaaaagattctcccatagacccgtgcaggagaagttcgtgtgcctgaactgcggcttcgagacacacgcagccgagcaagccgccctgaacatcgccagatcctggctgttcctgcggagccaggagtacaagaaataccagacaaacaagacaaccggcaacaccgataagagagccttcgtcgagacctggcagtccttttaccggaagaagcttaaggaggtgtggaaacctgccgtgcggtctggcggatctggcggaggctccaccagccccaagaaaaagagaaaagtctaagctgccttctgcggggcttgccttctggccatgcccttcttctctcccttgcacctgtacctcttggtctttgaataaagcctgagtaggaaggctagcaaaaaaaaaaaaaaaaaaaaaaaaaaaaaaaaaaaaaaaaaaaaaaaaaaaaaaaaaaaaaaaaaaaaaaaaaaaaaaaa

SEQ ID NO: 12472 - RNA, 5785 nt, synthetic construct
  source 1..5785: mol_type = other RNA
aggaaataagagagaaaagaagagtaagaagaaatataagagccaccatggcccctaagaagaagcgtaaagtgagccggatggaacgcctcgtctacgaggtgcggcagaagtgcagaaacatcgaggacatctgcatctcctgcggatctctgaacgtgaccctggagcacccactgttcatcggcggcatgtgccagaactgtaaaaactgttttctggagtgtgcctatcaatacgacgatgacggctaccagagctactgcaccatctgttgcggcggaagagaggtgctgatgtgtggaaataacaactgctgccggtgcttctgcgtggaatgcgtggacctgctggtgggccccggcgccgcccaggccgctattaaggaagatccttggaactgctacatgtgcggccacaagggcacatacggcctgctgagacggagagaggactggcctagcagactgcagatgttcttcgccaataaccacgaccaggagttcgacccccctaaggtgtaccctcccgtccccgccgagaagagaaagcccatccgggtcctgagcctgttcgatggcatcgccaccggtctgctggtgctgaaggacctgggcatccaggtggataggtacattgcctccgaggtgtgcgaggactccatcaccgtgggaatggtgcgtcatcagggcaagatcatgtacgtgggcgacgtgcggagcgtgacacagaagcatatccaggagtggggccctttcgacctggtgatcggcggcagcccttgcaatgacctgagcatcgtgaacccagcccggaagggcctgtacgagggaaccggcagactgttcttcgagttttacagactgctgcacgacgcccggcctaaggaaggcgacgaccggcccttcttttggctgttcgagaatgtggtggccatgggagtcagcgacaagcgggatattagccggttcctggagagcaaccccgtgatgatcgatgccaaggaagtgagcgccgcccaccgggccagatacttctggggcaatctgcctggcatgaacagacccctggccagcaccgtgaacgacaagctggagctgcaggagtgcctggagcacggccggatcgccaagttcagcaaggtgagaaccatcaccacccgaagcaacagcatcaaacaaggcaaggaccagcactttcctgtgttcatgaacgagaaggaggacatcctgtggtgtaccgagatggagagagtgttcgggttcccagtccactacacagatgtcagcaacatgtctagactggccagacagagactgctgggaagaagctggtccgtccctgtgatcagacacctgttcgcccctctgaaggagtacttcgcctgcgtgagcagcggcaacagcaacgccaacagccggggccccagcttctctagcggcctggtgccactgtccctgagagggagccacatgggccccatggagatctacaaaaccgtgagcgcctggaagcggcagcctgtgcgcgtgctgagcctgtttcggaatatcgataaagtcctgaaaagcctgggattcctggagagcggctctggctccggcggtggcaccctgaagtacgtggaggatgtgacaaacgtggtcagacgggatgtggagaagtggggccccttcgatctggtgtacggcagcacccaacccctgggcagctcttgtgaccggtgccctggctggtacatgtttcagttccaccggatcctgcagtacgccctgccgagacaggagtcccagcggccattcttttggattttcatggacaacttgctgctgaccgaggatgaccaggaaactaccactcggttcctgcagaccgaagccgtgaccctgcaggacgtgagaggccgggactaccagaacgccatgcgggtgtggtccaacatccctggactgaaaagcaagcacgcacctctgacccctaaagaagaggagtacctgcaggcccaggtgcggagcagaagcaagctggacgcccctaaggtggatctgctggtgaagaattgcctcctgcccctgagagagtacttcaagtatttcagccagaatagtctgcccctgggaggcagcggcggcggcccccagggcctggtgaccttcggcgacgtggccgtggacttcagccaggaggagtgggagtggctgaaccccaaccagaggaacctgtacaggaaggtgatgctggagaactacaagaacctggccagcctgggcctgtgcgtgagcaagcccgacgtgatcagcagcctggagcagggcaaggagccctggaccgtgaagaggaagatgaccagggcctggtgccccgacctgaagatcgtgggcggcccaagcagcggcgcccctcctcccagcggcggcagcccagccggctccccaacctctaccgaggagggcacctctgagtccgccacccccgagagcggccctggcacctccaccgagcccagcgagggcagcgcacccggcagccctgccggcagccccacctccacagaggagggaaccagcaccgagcccagcgaaggcagcgccccaggcaccagcaccgagcctagtgagcaggagattaaacggatcaacaagatcagaagaagacttgtgaaagacagcaacaccaagaaggccggcaagacaggccccatgaaaaccctgctggttagagtgatgacacccgatctgagagagcggctggaaaacctgagaaagaagcctgaaaatatcccccagcccatcagcaatacatctagagccaacctgaataagctgctgaccgattacaccgaaatgaagaaggcgatcctgcatgtgtactgggaagagttccagaaggaccctgtgggcctgatgagccgggtggcccagcctgccagcaagaagatcgatcagaacaagctgaaacctgagatggacgagaagggcaacctgaccaccgccggctttgcctgctctcagtgtggccagcccctgttcgtgtacaagctggagcaggtgtctgagaagggcaaggcttacaccaactacttcggacggtgcaatgtggccgagcacgaaaagctgatcctgctggcccagctgaagcccgagaaggatagcgacgaagccgtgacatatagcctgggaaagtttgggcagagggccctggatttctacagcattcatgtgaccaaggagtccacccaccccgtgaagcccctggcccagatcgccggaaacagatacgcctccggacctgtgggaaaggccctgagcgacgcatgtatgggcacaatcgcctccttcctgtctaagtaccaggacatcatcatcgaacaccagaaggtggtgaagggcaaccagaagagactggagagcctgcgggagctggccggcaaggaaaacctggaataccctagcgtgaccctgccacctcagcctcacaccaaggagggcgttgatgcctacaacgaagtgatcgcccgggtgcgaatgtgggtgaacctgaacctgtggcagaagctgaagctaagcagagatgatgccaagcctctgctgagactgaagggattcccttcctttcctctggtcgagagacaggccaacgaagtggactggtgggacatggtgtgtaacgtgaagaagctgatcaacgagaaaaaggaggatggcaaggtgttttggcagaatctggctggctacaagagacaggaagccctgagaccatacctgagcagcgaggaagatcggaagaagggaaagaaattcgctcggtaccagctgggcgacctgctgctgcacctggaaaagaagcacggcgaggactggggaaaggtgtacgacgaggcctgggagcggattgacaagaaagtggaaggcctgagcaagcacatcaagctggaagaggaacggagaagcgaggacgcccagagcaaggccgccctgaccgactggctgcgggctaaggccagcttcgtgatcgagggcctgaaggaggccgacaaggacgagttctgcagatgcgagctgaagctgcagaagtggtacggggacctgcggggaaagcccttcgccatcgaagccgagaacagcatcctggacatcagcggcttcagcaagcagtacaactgtgccttcatctggcagaaggacggcgtgaagaagctgaacctgtacctgatcatcaactacttcaagggcggcaagctgcggttcaagaagatcaaacctgaagccttcgaagccaacagattctacaccgtgatcaacaaaaagagcggcgagatcgtgcccatggaggtgaacttcaacttcgacgaccccaacctgatcatcctgcctctggcctttggcaagagacagggcagagaattcatctggaacgacctgctgtccctggaaaccggcagcctgaagctggccaacggaagagtgatcgagaagacactgtacaacagaagaacccggcaggatgagcctgccctgttcgtggccctgaccttcgagcggcgggaggtcctggactcctccaatatcaaaccaatgaacctgatcggcgtggcaagaggcgaaaacatccccgccgtgatcgccctgaccgaccccgagggctgcccactgagccggtttaaggatagcctgggaaacccaacccacatcctgagaatcggcgagagctataaggagaagcagcggaccatccaggccaagaaggaggtggagcagcggagagccggcggctacagccggaagtacgccagcaaagccaagaatctggcagacgatatggtgagaaacaccgctagagatctgctgtactacgccgtgacccaggatgccatgctgatcttcgccaacctgagccggggcttcggccggcagggcaagcggaccttcatggccgagagacagtacacacggatggaggactggctgaccgccaagctggcctacgagggcctgagcaagacctacctgtccaagacactggcccagtacacctccaagacatgcagcaactgtgggtttaccatcaccagcgccgactacgacagggtgctggagaagctgaagaagacagcaacaggctggatgaccacaattaacggcaaggagctgaaggtggagggccagattacctactacaacagatacaagagacagaacgtagtcaaggacctgtccgtcgagctggatagactgagcgaagaatctgtgaacaacgacatctcctcctggacaaagggcagaagcggagaagctctgagcctcctgaagaaaagattctcccatagacccgtgcaggagaagttcgtgtgcctgaactgcggcttcgagacacacgcagccgagcaagccgccctgaacatcgccagatcctggctgttcctgcggagccaggagtacaagaaataccagacaaacaagacaaccggcaacaccgataagagagccttcgtcgagacctggcagtccttttaccggaagaagcttaaggaggtgtggaaacctgccgtgcggtctggcggatctggcggaggctccaccagccccaagaaaaagagaaaagtctaagctgccttctgcggggcttgccttctggccatgcccttcttctctcccttgcacctgtacctcttggtctttgaataaagcctgagtaggaaggctagcaaaaaaaaaaaaaaaaaaaaaaaaaaaaaaaaaaaaaaaaaaaaaaaaaaaaaaaaaaaaaaaaaaaaaaaaaaaaaaaa

SEQ ID NO: 12473 - RNA, 5785 nt, synthetic construct
  source 1..5785: mol_type = other RNA
aggaaataagagagaaaagaagagtaagaagaaatataagagccaccatggcccctaagaagaagcgtaaagtgagccggatggaacgcctcgtctacgaggtgcggcagaagtgcagaaacatcgaggacatctgcatctcctgcggatctctgaacgtgaccctggagcacccactgttcatcggcggcatgtgccagaactgtaaaaactgttttctggagtgtgcctatcaatacgacgatgacggctaccagagctactgcaccatctgttgcggcggaagagaggtgctgatgtgtggaaataacaactgctgccggtgcttctgcgtggaatgcgtggacctgctggtgggccccggcgccgcccaggccgctattaaggaagatccttggaactgctacatgtgcggccacaagggcacatacggcctgctgagacggagagaggactggcctagcagactgcagatgttcttcgccaataaccacgaccaggagttcgacccccctaaggtgtaccctcccgtccccgccgagaagagaaagcccatccgggtcctgagcctgttcgatggcatcgccaccggtctgctggtgctgaaggacctgggcatccaggtggataggtacattgcctccgaggtgtgcgaggactccatcaccgtgggaatggtgcgtcatcagggcaagatcatgtacgtgggcgacgtgcggagcgtgacacagaagcatatccaggagtggggccctttcgacctggtgatcggcggcagcccttgcaatgacctgagcatcgtgaacccagcccggaagggcctgtacgagggaaccggcagactgttcttcgagttttacagactgctgcacgacgcccggcctaaggaaggcgacgaccggcccttcttttggctgttcgagaatgtggtggccatgggagtcagcgacaagcgggatattagccggttcctggagagcaaccccgtgatgatcgatgccaaggaagtgagcgccgcccaccgggccagatacttctggggcaatctgcctggcatgaacagacccctggccagcaccgtgaacgacaagctggagctgcaggagtgcctggagcacggccggatcgccaagttcagcaaggtgagaaccatcaccacccgaagcaacagcatcaaacaaggcaaggaccagcactttcctgtgttcatgaacgagaaggaggacatcctgtggtgtaccgagatggagagagtgttcgggttcccagtccactacacagatgtcagcaacatgtctagactggccagacagagactgctgggaagaagctggtccgtccctgtgatcagacacctgttcgcccctctgaaggagtacttcgcctgcgtgagcagcggcaacagcaacgccaacagccggggccccagcttctctagcggcctggtgccactgtccctgagagggagccacatgggccccatggagatctacaaaaccgtgagcgcctggaagcggcagcctgtgcgcgtgctgagcctgtttcggaatatcgataaagtcctgaaaagcctgggattcctggagagcggctctggctccggcggtggcaccctgaagtacgtggaggatgtgacaaacgtggtcagacgggatgtggagaagtggggccccttcgatctggtgtacggcagcacccaacccctgggcagctcttgtgaccggtgccctggctggtacatgtttcagttccaccggatcctgcagtacgccctgccgagacaggagtcccagcggccattcttttggattttcatggacaacttgctgctgaccgaggatgaccaggaaactaccactcggttcctgcagaccgaagccgtgaccctgcaggacgtgagaggccgggactaccagaacgccatgcgggtgtggtccaacatccctggactgaaaagcaagcacgcacctctgacccctaaagaagaggagtacctgcaggcccaggtgcggagcagaagcaagctggacgcccctaaggtggatctgctggtgaagaattgcctcctgcccctgagagagtacttcaagtatttcagccagaatagtctgcccctgggaggcagcggcggcggcagcgtgaccttcagggacgtgatcgtggacttcacccaggaggagtgggagcagctgaagcccgtgcagaaggacctgtacagggacgtgatgatggagaactactggaacctggtgagcctggacctggagaccgagggcgacatgaacgaccccgaccccgagaaggacagctgggaggacaggcccagcgtgaccagcagcatgcccgccccccccaggctggagggccccaggggcgccggcggcccaagcagcggcgcccctcctcccagcggcggcagcccagccggctccccaacctctaccgaggagggcacctctgagtccgccacccccgagagcggccctggcacctccaccgagcccagcgagggcagcgcacccggcagccctgccggcagccccacctccacagaggagggaaccagcaccgagcccagcgaaggcagcgccccaggcaccagcaccgagcctagtgagcaggagattaaacggatcaacaagatcagaagaagacttgtgaaagacagcaacaccaagaaggccggcaagacaggccccatgaaaaccctgctggttagagtgatgacacccgatctgagagagcggctggaaaacctgagaaagaagcctgaaaatatcccccagcccatcagcaatacatctagagccaacctgaataagctgctgaccgattacaccgaaatgaagaaggcgatcctgcatgtgtactgggaagagttccagaaggaccctgtgggcctgatgagccgggtggcccagcctgccagcaagaagatcgatcagaacaagctgaaacctgagatggacgagaagggcaacctgaccaccgccggctttgcctgctctcagtgtggccagcccctgttcgtgtacaagctggagcaggtgtctgagaagggcaaggcttacaccaactacttcggacggtgcaatgtggccgagcacgaaaagctgatcctgctggcccagctgaagcccgagaaggatagcgacgaagccgtgacatatagcctgggaaagtttgggcagagggccctggatttctacagcattcatgtgaccaaggagtccacccaccccgtgaagcccctggcccagatcgccggaaacagatacgcctccggacctgtgggaaaggccctgagcgacgcatgtatgggcacaatcgcctccttcctgtctaagtaccaggacatcatcatcgaacaccagaaggtggtgaagggcaaccagaagagactggagagcctgcgggagctggccggcaaggaaaacctggaataccctagcgtgaccctgccacctcagcctcacaccaaggagggcgttgatgcctacaacgaagtgatcgcccgggtgcgaatgtgggtgaacctgaacctgtggcagaagctgaagctaagcagagatgatgccaagcctctgctgagactgaagggattcccttcctttcctctggtcgagagacaggccaacgaagtggactggtgggacatggtgtgtaacgtgaagaagctgatcaacgagaaaaaggaggatggcaaggtgttttggcagaatctggctggctacaagagacaggaagccctgagaccatacctgagcagcgaggaagatcggaagaagggaaagaaattcgctcggtaccagctgggcgacctgctgctgcacctggaaaagaagcacggcgaggactggggaaaggtgtacgacgaggcctgggagcggattgacaagaaagtggaaggcctgagcaagcacatcaagctggaagaggaacggagaagcgaggacgcccagagcaaggccgccctgaccgactggctgcgggctaaggccagcttcgtgatcgagggcctgaaggaggccgacaaggacgagttctgcagatgcgagctgaagctgcagaagtggtacggggacctgcggggaaagcccttcgccatcgaagccgagaacagcatcctggacatcagcggcttcagcaagcagtacaactgtgccttcatctggcagaaggacggcgtgaagaagctgaacctgtacctgatcatcaactacttcaagggcggcaagctgcggttcaagaagatcaaacctgaagccttcgaagccaacagattctacaccgtgatcaacaaaaagagcggcgagatcgtgcccatggaggtgaacttcaacttcgacgaccccaacctgatcatcctgcctctggcctttggcaagagacagggcagagaattcatctggaacgacctgctgtccctggaaaccggcagcctgaagctggccaacggaagagtgatcgagaagacactgtacaacagaagaacccggcaggatgagcctgccctgttcgtggccctgaccttcgagcggcgggaggtcctggactcctccaatatcaaaccaatgaacctgatcggcgtggcaagaggcgaaaacatccccgccgtgatcgccctgaccgaccccgagggctgcccactgagccggtttaaggatagcctgggaaacccaacccacatcctgagaatcggcgagagctataaggagaagcagcggaccatccaggccaagaaggaggtggagcagcggagagccggcggctacagccggaagtacgccagcaaagccaagaatctggcagacgatatggtgagaaacaccgctagagatctgctgtactacgccgtgacccaggatgccatgctgatcttcgccaacctgagccggggcttcggccggcagggcaagcggaccttcatggccgagagacagtacacacggatggaggactggctgaccgccaagctggcctacgagggcctgagcaagacctacctgtccaagacactggcccagtacacctccaagacatgcagcaactgtgggtttaccatcaccagcgccgactacgacagggtgctggagaagctgaagaagacagcaacaggctggatgaccacaattaacggcaaggagctgaaggtggagggccagattacctactacaacagatacaagagacagaacgtagtcaaggacctgtccgtcgagctggatagactgagcgaagaatctgtgaacaacgacatctcctcctggacaaagggcagaagcggagaagctctgagcctcctgaagaaaagattctcccatagacccgtgcaggagaagttcgtgtgcctgaactgcggcttcgagacacacgcagccgagcaagccgccctgaacatcgccagatcctggctgttcctgcggagccaggagtacaagaaataccagacaaacaagacaaccggcaacaccgataagagagccttcgtcgagacctggcagtccttttaccggaagaagcttaaggaggtgtggaaacctgccgtgcggtctggcggatctggcggaggctccaccagccccaagaaaaagagaaaagtctaagctgccttctgcggggcttgccttctggccatgcccttcttctctcccttgcacctgtacctcttggtctttgaataaagcctgagtaggaaggctagcaaaaaaaaaaaaaaaaaaaaaaaaaaaaaaaaaaaaaaaaaaaaaaaaaaaaaaaaaaaaaaaaaaaaaaaaaaaaaaaa

SEQ ID NO: 12474 - RNA, 5785 nt, synthetic construct
  source 1..5785: mol_type = other RNA
aggaaataagagagaaaagaagagtaagaagaaatataagagccaccatggcccctaagaagaagcgtaaagtgagccggatggaacgcctcgtctacgaggtgcggcagaagtgcagaaacatcgaggacatctgcatctcctgcggatctctgaacgtgaccctggagcacccactgttcatcggcggcatgtgccagaactgtaaaaactgttttctggagtgtgcctatcaatacgacgatgacggctaccagagctactgcaccatctgttgcggcggaagagaggtgctgatgtgtggaaataacaactgctgccggtgcttctgcgtggaatgcgtggacctgctggtgggccccggcgccgcccaggccgctattaaggaagatccttggaactgctacatgtgcggccacaagggcacatacggcctgctgagacggagagaggactggcctagcagactgcagatgttcttcgccaataaccacgaccaggagttcgacccccctaaggtgtaccctcccgtccccgccgagaagagaaagcccatccgggtcctgagcctgttcgatggcatcgccaccggtctgctggtgctgaaggacctgggcatccaggtggataggtacattgcctccgaggtgtgcgaggactccatcaccgtgggaatggtgcgtcatcagggcaagatcatgtacgtgggcgacgtgcggagcgtgacacagaagcatatccaggagtggggccctttcgacctggtgatcggcggcagcccttgcaatgacctgagcatcgtgaacccagcccggaagggcctgtacgagggaaccggcagactgttcttcgagttttacagactgctgcacgacgcccggcctaaggaaggcgacgaccggcccttcttttggctgttcgagaatgtggtggccatgggagtcagcgacaagcgggatattagccggttcctggagagcaaccccgtgatgatcgatgccaaggaagtgagcgccgcccaccgggccagatacttctggggcaatctgcctggcatgaacagacccctggccagcaccgtgaacgacaagctggagctgcaggagtgcctggagcacggccggatcgccaagttcagcaaggtgagaaccatcaccacccgaagcaacagcatcaaacaaggcaaggaccagcactttcctgtgttcatgaacgagaaggaggacatcctgtggtgtaccgagatggagagagtgttcgggttcccagtccactacacagatgtcagcaacatgtctagactggccagacagagactgctgggaagaagctggtccgtccctgtgatcagacacctgttcgcccctctgaaggagtacttcgcctgcgtgagcagcggcaacagcaacgccaacagccggggccccagcttctctagcggcctggtgccactgtccctgagagggagccacatgggccccatggagatctacaaaaccgtgagcgcctggaagcggcagcctgtgcgcgtgctgagcctgtttcggaatatcgataaagtcctgaaaagcctgggattcctggagagcggctctggctccggcggtggcaccctgaagtacgtggaggatgtgacaaacgtggtcagacgggatgtggagaagtggggccccttcgatctggtgtacggcagcacccaacccctgggcagctcttgtgaccggtgccctggctggtacatgtttcagttccaccggatcctgcagtacgccctgccgagacaggagtcccagcggccattcttttggattttcatggacaacttgctgctgaccgaggatgaccaggaaactaccactcggttcctgcagaccgaagccgtgaccctgcaggacgtgagaggccgggactaccagaacgccatgcgggtgtggtccaacatccctggactgaaaagcaagcacgcacctctgacccctaaagaagaggagtacctgcaggcccaggtgcggagcagaagcaagctggacgcccctaaggtggatctgctggtgaagaattgcctcctgcccctgagagagtacttcaagtatttcagccagaatagtctgcccctgggaggcagcggcggcggccccgcccaggtgctggtgaccttcaaggacgtggccgtggacttcacccaggaggagtggaggctgctggacccccaccagaaggagctgtacaaggaggtgaccctggagaacgcctggaacatgctgagcatgggcctgcccgtgcccagggacctggtgagccacttcaagcaggtggaggccccctggatgctggaggaggagggcagcagcaacagctgcctggacggcgagaggaggggcggcccaagcagcggcgcccctcctcccagcggcggcagcccagccggctccccaacctctaccgaggagggcacctctgagtccgccacccccgagagcggccctggcacctccaccgagcccagcgagggcagcgcacccggcagccctgccggcagccccacctccacagaggagggaaccagcaccgagcccagcgaaggcagcgccccaggcaccagcaccgagcctagtgagcaggagattaaacggatcaacaagatcagaagaagacttgtgaaagacagcaacaccaagaaggccggcaagacaggccccatgaaaaccctgctggttagagtgatgacacccgatctgagagagcggctggaaaacctgagaaagaagcctgaaaatatcccccagcccatcagcaatacatctagagccaacctgaataagctgctgaccgattacaccgaaatgaagaaggcgatcctgcatgtgtactgggaagagttccagaaggaccctgtgggcctgatgagccgggtggcccagcctgccagcaagaagatcgatcagaacaagctgaaacctgagatggacgagaagggcaacctgaccaccgccggctttgcctgctctcagtgtggccagcccctgttcgtgtacaagctggagcaggtgtctgagaagggcaaggcttacaccaactacttcggacggtgcaatgtggccgagcacgaaaagctgatcctgctggcccagctgaagcccgagaaggatagcgacgaagccgtgacatatagcctgggaaagtttgggcagagggccctggatttctacagcattcatgtgaccaaggagtccacccaccccgtgaagcccctggcccagatcgccggaaacagatacgcctccggacctgtgggaaaggccctgagcgacgcatgtatgggcacaatcgcctccttcctgtctaagtaccaggacatcatcatcgaacaccagaaggtggtgaagggcaaccagaagagactggagagcctgcgggagctggccggcaaggaaaacctggaataccctagcgtgaccctgccacctcagcctcacaccaaggagggcgttgatgcctacaacgaagtgatcgcccgggtgcgaatgtgggtgaacctgaacctgtggcagaagctgaagctaagcagagatgatgccaagcctctgctgagactgaagggattcccttcctttcctctggtcgagagacaggccaacgaagtggactggtgggacatggtgtgtaacgtgaagaagctgatcaacgagaaaaaggaggatggcaaggtgttttggcagaatctggctggctacaagagacaggaagccctgagaccatacctgagcagcgaggaagatcggaagaagggaaagaaattcgctcggtaccagctgggcgacctgctgctgcacctggaaaagaagcacggcgaggactggggaaaggtgtacgacgaggcctgggagcggattgacaagaaagtggaaggcctgagcaagcacatcaagctggaagaggaacggagaagcgaggacgcccagagcaaggccgccctgaccgactggctgcgggctaaggccagcttcgtgatcgagggcctgaaggaggccgacaaggacgagttctgcagatgcgagctgaagctgcagaagtggtacggggacctgcggggaaagcccttcgccatcgaagccgagaacagcatcctggacatcagcggcttcagcaagcagtacaactgtgccttcatctggcagaaggacggcgtgaagaagctgaacctgtacctgatcatcaactacttcaagggcggcaagctgcggttcaagaagatcaaacctgaagccttcgaagccaacagattctacaccgtgatcaacaaaaagagcggcgagatcgtgcccatggaggtgaacttcaacttcgacgaccccaacctgatcatcctgcctctggcctttggcaagagacagggcagagaattcatctggaacgacctgctgtccctggaaaccggcagcctgaagctggccaacggaagagtgatcgagaagacactgtacaacagaagaacccggcaggatgagcctgccctgttcgtggccctgaccttcgagcggcgggaggtcctggactcctccaatatcaaaccaatgaacctgatcggcgtggcaagaggcgaaaacatccccgccgtgatcgccctgaccgaccccgagggctgcccactgagccggtttaaggatagcctgggaaacccaacccacatcctgagaatcggcgagagctataaggagaagcagcggaccatccaggccaagaaggaggtggagcagcggagagccggcggctacagccggaagtacgccagcaaagccaagaatctggcagacgatatggtgagaaacaccgctagagatctgctgtactacgccgtgacccaggatgccatgctgatcttcgccaacctgagccggggcttcggccggcagggcaagcggaccttcatggccgagagacagtacacacggatggaggactggctgaccgccaagctggcctacgagggcctgagcaagacctacctgtccaagacactggcccagtacacctccaagacatgcagcaactgtgggtttaccatcaccagcgccgactacgacagggtgctggagaagctgaagaagacagcaacaggctggatgaccacaattaacggcaaggagctgaaggtggagggccagattacctactacaacagatacaagagacagaacgtagtcaaggacctgtccgtcgagctggatagactgagcgaagaatctgtgaacaacgacatctcctcctggacaaagggcagaagcggagaagctctgagcctcctgaagaaaagattctcccatagacccgtgcaggagaagttcgtgtgcctgaactgcggcttcgagacacacgcagccgagcaagccgccctgaacatcgccagatcctggctgttcctgcggagccaggagtacaagaaataccagacaaacaagacaaccggcaacaccgataagagagccttcgtcgagacctggcagtccttttaccggaagaagcttaaggaggtgtggaaacctgccgtgcggtctggcggatctggcggaggctccaccagccccaagaaaaagagaaaagtctaagctgccttctgcggggcttgccttctggccatgcccttcttctctcccttgcacctgtacctcttggtctttgaataaagcctgagtaggaaggctagcaaaaaaaaaaaaaaaaaaaaaaaaaaaaaaaaaaaaaaaaaaaaaaaaaaaaaaaaaaaaaaaaaaaaaaaaaaaaaaaa

SEQ ID NO: 12475 - RNA, 5785 nt, synthetic construct
  source 1..5785: mol_type = other RNA
aggaaataagagagaaaagaagagtaagaagaaatataagagccaccatggcccctaagaagaagcgtaaagtgagccggatggaacgcctcgtctacgaggtgcggcagaagtgcagaaacatcgaggacatctgcatctcctgcggatctctgaacgtgaccctggagcacccactgttcatcggcggcatgtgccagaactgtaaaaactgttttctggagtgtgcctatcaatacgacgatgacggctaccagagctactgcaccatctgttgcggcggaagagaggtgctgatgtgtggaaataacaactgctgccggtgcttctgcgtggaatgcgtggacctgctggtgggccccggcgccgcccaggccgctattaaggaagatccttggaactgctacatgtgcggccacaagggcacatacggcctgctgagacggagagaggactggcctagcagactgcagatgttcttcgccaataaccacgaccaggagttcgacccccctaaggtgtaccctcccgtccccgccgagaagagaaagcccatccgggtcctgagcctgttcgatggcatcgccaccggtctgctggtgctgaaggacctgggcatccaggtggataggtacattgcctccgaggtgtgcgaggactccatcaccgtgggaatggtgcgtcatcagggcaagatcatgtacgtgggcgacgtgcggagcgtgacacagaagcatatccaggagtggggccctttcgacctggtgatcggcggcagcccttgcaatgacctgagcatcgtgaacccagcccggaagggcctgtacgagggaaccggcagactgttcttcgagttttacagactgctgcacgacgcccggcctaaggaaggcgacgaccggcccttcttttggctgttcgagaatgtggtggccatgggagtcagcgacaagcgggatattagccggttcctggagagcaaccccgtgatgatcgatgccaaggaagtgagcgccgcccaccgggccagatacttctggggcaatctgcctggcatgaacagacccctggccagcaccgtgaacgacaagctggagctgcaggagtgcctggagcacggccggatcgccaagttcagcaaggtgagaaccatcaccacccgaagcaacagcatcaaacaaggcaaggaccagcactttcctgtgttcatgaacgagaaggaggacatcctgtggtgtaccgagatggagagagtgttcgggttcccagtccactacacagatgtcagcaacatgtctagactggccagacagagactgctgggaagaagctggtccgtccctgtgatcagacacctgttcgcccctctgaaggagtacttcgcctgcgtgagcagcggcaacagcaacgccaacagccggggccccagcttctctagcggcctggtgccactgtccctgagagggagccacatgggccccatggagatctacaaaaccgtgagcgcctggaagcggcagcctgtgcgcgtgctgagcctgtttcggaatatcgataaagtcctgaaaagcctgggattcctggagagcggctctggctccggcggtggcaccctgaagtacgtggaggatgtgacaaacgtggtcagacgggatgtggagaagtggggccccttcgatctggtgtacggcagcacccaacccctgggcagctcttgtgaccggtgccctggctggtacatgtttcagttccaccggatcctgcagtacgccctgccgagacaggagtcccagcggccattcttttggattttcatggacaacttgctgctgaccgaggatgaccaggaaactaccactcggttcctgcagaccgaagccgtgaccctgcaggacgtgagaggccgggactaccagaacgccatgcgggtgtggtccaacatccctggactgaaaagcaagcacgcacctctgacccctaaagaagaggagtacctgcaggcccaggtgcggagcagaagcaagctggacgcccctaaggtggatctgctggtgaagaattgcctcctgcccctgagagagtacttcaagtatttcagccagaatagtctgcccctgggaggcagcggcggcggcagcctggccctggtgaccttcaaggacgtgctggtgaacttcaccagggaggagtggaagctgctggacgccgcccagcaggtgatgtacagggacgtgatgctggagaactacaggaacctggtgagcctgggccacaggctgcccaagcccgacgtgatcctgcagctggagaagggcgaggagccctggctggtggagaggggcacccaccaggacgcccaccccgactgggacaccgccggcggcccaagcagcggcgcccctcctcccagcggcggcagcccagccggctccccaacctctaccgaggagggcacctctgagtccgccacccccgagagcggccctggcacctccaccgagcccagcgagggcagcgcacccggcagccctgccggcagccccacctccacagaggagggaaccagcaccgagcccagcgaaggcagcgccccaggcaccagcaccgagcctagtgagcaggagattaaacggatcaacaagatcagaagaagacttgtgaaagacagcaacaccaagaaggccggcaagacaggccccatgaaaaccctgctggttagagtgatgacacccgatctgagagagcggctggaaaacctgagaaagaagcctgaaaatatcccccagcccatcagcaatacatctagagccaacctgaataagctgctgaccgattacaccgaaatgaagaaggcgatcctgcatgtgtactgggaagagttccagaaggaccctgtgggcctgatgagccgggtggcccagcctgccagcaagaagatcgatcagaacaagctgaaacctgagatggacgagaagggcaacctgaccaccgccggctttgcctgctctcagtgtggccagcccctgttcgtgtacaagctggagcaggtgtctgagaagggcaaggcttacaccaactacttcggacggtgcaatgtggccgagcacgaaaagctgatcctgctggcccagctgaagcccgagaaggatagcgacgaagccgtgacatatagcctgggaaagtttgggcagagggccctggatttctacagcattcatgtgaccaaggagtccacccaccccgtgaagcccctggcccagatcgccggaaacagatacgcctccggacctgtgggaaaggccctgagcgacgcatgtatgggcacaatcgcctccttcctgtctaagtaccaggacatcatcatcgaacaccagaaggtggtgaagggcaaccagaagagactggagagcctgcgggagctggccggcaaggaaaacctggaataccctagcgtgaccctgccacctcagcctcacaccaaggagggcgttgatgcctacaacgaagtgatcgcccgggtgcgaatgtgggtgaacctgaacctgtggcagaagctgaagctaagcagagatgatgccaagcctctgctgagactgaagggattcccttcctttcctctggtcgagagacaggccaacgaagtggactggtgggacatggtgtgtaacgtgaagaagctgatcaacgagaaaaaggaggatggcaaggtgttttggcagaatctggctggctacaagagacaggaagccctgagaccatacctgagcagcgaggaagatcggaagaagggaaagaaattcgctcggtaccagctgggcgacctgctgctgcacctggaaaagaagcacggcgaggactggggaaaggtgtacgacgaggcctgggagcggattgacaagaaagtggaaggcctgagcaagcacatcaagctggaagaggaacggagaagcgaggacgcccagagcaaggccgccctgaccgactggctgcgggctaaggccagcttcgtgatcgagggcctgaaggaggccgacaaggacgagttctgcagatgcgagctgaagctgcagaagtggtacggggacctgcggggaaagcccttcgccatcgaagccgagaacagcatcctggacatcagcggcttcagcaagcagtacaactgtgccttcatctggcagaaggacggcgtgaagaagctgaacctgtacctgatcatcaactacttcaagggcggcaagctgcggttcaagaagatcaaacctgaagccttcgaagccaacagattctacaccgtgatcaacaaaaagagcggcgagatcgtgcccatggaggtgaacttcaacttcgacgaccccaacctgatcatcctgcctctggcctttggcaagagacagggcagagaattcatctggaacgacctgctgtccctggaaaccggcagcctgaagctggccaacggaagagtgatcgagaagacactgtacaacagaagaacccggcaggatgagcctgccctgttcgtggccctgaccttcgagcggcgggaggtcctggactcctccaatatcaaaccaatgaacctgatcggcgtggcaagaggcgaaaacatccccgccgtgatcgccctgaccgaccccgagggctgcccactgagccggtttaaggatagcctgggaaacccaacccacatcctgagaatcggcgagagctataaggagaagcagcggaccatccaggccaagaaggaggtggagcagcggagagccggcggctacagccggaagtacgccagcaaagccaagaatctggcagacgatatggtgagaaacaccgctagagatctgctgtactacgccgtgacccaggatgccatgctgatcttcgccaacctgagccggggcttcggccggcagggcaagcggaccttcatggccgagagacagtacacacggatggaggactggctgaccgccaagctggcctacgagggcctgagcaagacctacctgtccaagacactggcccagtacacctccaagacatgcagcaactgtgggtttaccatcaccagcgccgactacgacagggtgctggagaagctgaagaagacagcaacaggctggatgaccacaattaacggcaaggagctgaaggtggagggccagattacctactacaacagatacaagagacagaacgtagtcaaggacctgtccgtcgagctggatagactgagcgaagaatctgtgaacaacgacatctcctcctggacaaagggcagaagcggagaagctctgagcctcctgaagaaaagattctcccatagacccgtgcaggagaagttcgtgtgcctgaactgcggcttcgagacacacgcagccgagcaagccgccctgaacatcgccagatcctggctgttcctgcggagccaggagtacaagaaataccagacaaacaagacaaccggcaacaccgataagagagccttcgtcgagacctggcagtccttttaccggaagaagcttaaggaggtgtggaaacctgccgtgcggtctggcggatctggcggaggctccaccagccccaagaaaaagagaaaagtctaagctgccttctgcggggcttgccttctggccatgcccttcttctctcccttgcacctgtacctcttggtctttgaataaagcctgagtaggaaggctagcaaaaaaaaaaaaaaaaaaaaaaaaaaaaaaaaaaaaaaaaaaaaaaaaaaaaaaaaaaaaaaaaaaaaaaaaaaaaaaaa

SEQ ID NO: 12476 - RNA, 5785 nt, synthetic construct
  source 1..5785: mol_type = other RNA
aggaaataagagagaaaagaagagtaagaagaaatataagagccaccatggcccctaagaagaagcgtaaagtgagccggatggaacgcctcgtctacgaggtgcggcagaagtgcagaaacatcgaggacatctgcatctcctgcggatctctgaacgtgaccctggagcacccactgttcatcggcggcatgtgccagaactgtaaaaactgttttctggagtgtgcctatcaatacgacgatgacggctaccagagctactgcaccatctgttgcggcggaagagaggtgctgatgtgtggaaataacaactgctgccggtgcttctgcgtggaatgcgtggacctgctggtgggccccggcgccgcccaggccgctattaaggaagatccttggaactgctacatgtgcggccacaagggcacatacggcctgctgagacggagagaggactggcctagcagactgcagatgttcttcgccaataaccacgaccaggagttcgacccccctaaggtgtaccctcccgtccccgccgagaagagaaagcccatccgggtcctgagcctgttcgatggcatcgccaccggtctgctggtgctgaaggacctgggcatccaggtggataggtacattgcctccgaggtgtgcgaggactccatcaccgtgggaatggtgcgtcatcagggcaagatcatgtacgtgggcgacgtgcggagcgtgacacagaagcatatccaggagtggggccctttcgacctggtgatcggcggcagcccttgcaatgacctgagcatcgtgaacccagcccggaagggcctgtacgagggaaccggcagactgttcttcgagttttacagactgctgcacgacgcccggcctaaggaaggcgacgaccggcccttcttttggctgttcgagaatgtggtggccatgggagtcagcgacaagcgggatattagccggttcctggagagcaaccccgtgatgatcgatgccaaggaagtgagcgccgcccaccgggccagatacttctggggcaatctgcctggcatgaacagacccctggccagcaccgtgaacgacaagctggagctgcaggagtgcctggagcacggccggatcgccaagttcagcaaggtgagaaccatcaccacccgaagcaacagcatcaaacaaggcaaggaccagcactttcctgtgttcatgaacgagaaggaggacatcctgtggtgtaccgagatggagagagtgttcgggttcccagtccactacacagatgtcagcaacatgtctagactggccagacagagactgctgggaagaagctggtccgtccctgtgatcagacacctgttcgcccctctgaaggagtacttcgcctgcgtgagcagcggcaacagcaacgccaacagccggggccccagcttctctagcggcctggtgccactgtccctgagagggagccacatgggccccatggagatctacaaaaccgtgagcgcctggaagcggcagcctgtgcgcgtgctgagcctgtttcggaatatcgataaagtcctgaaaagcctgggattcctggagagcggctctggctccggcggtggcaccctgaagtacgtggaggatgtgacaaacgtggtcagacgggatgtggagaagtggggccccttcgatctggtgtacggcagcacccaacccctgggcagctcttgtgaccggtgccctggctggtacatgtttcagttccaccggatcctgcagtacgccctgccgagacaggagtcccagcggccattcttttggattttcatggacaacttgctgctgaccgaggatgaccaggaaactaccactcggttcctgcagaccgaagccgtgaccctgcaggacgtgagaggccgggactaccagaacgccatgcgggtgtggtccaacatccctggactgaaaagcaagcacgcacctctgacccctaaagaagaggagtacctgcaggcccaggtgcggagcagaagcaagctggacgcccctaaggtggatctgctggtgaagaattgcctcctgcccctgagagagtacttcaagtatttcagccagaatagtctgcccctgggaggcagcggcggcggcagccaggccagcgtgagcttcaaggacgtgaccgtggagttcacccaggacgagtggaggctgatgagcagcgcccagaggaccctgtacagggaggtgatgctggagaactacagccacctgatcagcatgggctactgcagcaccaagcccgagctgatcttcgccctggagcagaaggacttcagggagagcatcctggagagggagagcctgagcaccatcccccccgaggacttccagggcggcccaagcagcggcgcccctcctcccagcggcggcagcccagccggctccccaacctctaccgaggagggcacctctgagtccgccacccccgagagcggccctggcacctccaccgagcccagcgagggcagcgcacccggcagccctgccggcagccccacctccacagaggagggaaccagcaccgagcccagcgaaggcagcgccccaggcaccagcaccgagcctagtgagcaggagattaaacggatcaacaagatcagaagaagacttgtgaaagacagcaacaccaagaaggccggcaagacaggccccatgaaaaccctgctggttagagtgatgacacccgatctgagagagcggctggaaaacctgagaaagaagcctgaaaatatcccccagcccatcagcaatacatctagagccaacctgaataagctgctgaccgattacaccgaaatgaagaaggcgatcctgcatgtgtactgggaagagttccagaaggaccctgtgggcctgatgagccgggtggcccagcctgccagcaagaagatcgatcagaacaagctgaaacctgagatggacgagaagggcaacctgaccaccgccggctttgcctgctctcagtgtggccagcccctgttcgtgtacaagctggagcaggtgtctgagaagggcaaggcttacaccaactacttcggacggtgcaatgtggccgagcacgaaaagctgatcctgctggcccagctgaagcccgagaaggatagcgacgaagccgtgacatatagcctgggaaagtttgggcagagggccctggatttctacagcattcatgtgaccaaggagtccacccaccccgtgaagcccctggcccagatcgccggaaacagatacgcctccggacctgtgggaaaggccctgagcgacgcatgtatgggcacaatcgcctccttcctgtctaagtaccaggacatcatcatcgaacaccagaaggtggtgaagggcaaccagaagagactggagagcctgcgggagctggccggcaaggaaaacctggaataccctagcgtgaccctgccacctcagcctcacaccaaggagggcgttgatgcctacaacgaagtgatcgcccgggtgcgaatgtgggtgaacctgaacctgtggcagaagctgaagctaagcagagatgatgccaagcctctgctgagactgaagggattcccttcctttcctctggtcgagagacaggccaacgaagtggactggtgggacatggtgtgtaacgtgaagaagctgatcaacgagaaaaaggaggatggcaaggtgttttggcagaatctggctggctacaagagacaggaagccctgagaccatacctgagcagcgaggaagatcggaagaagggaaagaaattcgctcggtaccagctgggcgacctgctgctgcacctggaaaagaagcacggcgaggactggggaaaggtgtacgacgaggcctgggagcggattgacaagaaagtggaaggcctgagcaagcacatcaagctggaagaggaacggagaagcgaggacgcccagagcaaggccgccctgaccgactggctgcgggctaaggccagcttcgtgatcgagggcctgaaggaggccgacaaggacgagttctgcagatgcgagctgaagctgcagaagtggtacggggacctgcggggaaagcccttcgccatcgaagccgagaacagcatcctggacatcagcggcttcagcaagcagtacaactgtgccttcatctggcagaaggacggcgtgaagaagctgaacctgtacctgatcatcaactacttcaagggcggcaagctgcggttcaagaagatcaaacctgaagccttcgaagccaacagattctacaccgtgatcaacaaaaagagcggcgagatcgtgcccatggaggtgaacttcaacttcgacgaccccaacctgatcatcctgcctctggcctttggcaagagacagggcagagaattcatctggaacgacctgctgtccctggaaaccggcagcctgaagctggccaacggaagagtgatcgagaagacactgtacaacagaagaacccggcaggatgagcctgccctgttcgtggccctgaccttcgagcggcgggaggtcctggactcctccaatatcaaaccaatgaacctgatcggcgtggcaagaggcgaaaacatccccgccgtgatcgccctgaccgaccccgagggctgcccactgagccggtttaaggatagcctgggaaacccaacccacatcctgagaatcggcgagagctataaggagaagcagcggaccatccaggccaagaaggaggtggagcagcggagagccggcggctacagccggaagtacgccagcaaagccaagaatctggcagacgatatggtgagaaacaccgctagagatctgctgtactacgccgtgacccaggatgccatgctgatcttcgccaacctgagccggggcttcggccggcagggcaagcggaccttcatggccgagagacagtacacacggatggaggactggctgaccgccaagctggcctacgagggcctgagcaagacctacctgtccaagacactggcccagtacacctccaagacatgcagcaactgtgggtttaccatcaccagcgccgactacgacagggtgctggagaagctgaagaagacagcaacaggctggatgaccacaattaacggcaaggagctgaaggtggagggccagattacctactacaacagatacaagagacagaacgtagtcaaggacctgtccgtcgagctggatagactgagcgaagaatctgtgaacaacgacatctcctcctggacaaagggcagaagcggagaagctctgagcctcctgaagaaaagattctcccatagacccgtgcaggagaagttcgtgtgcctgaactgcggcttcgagacacacgcagccgagcaagccgccctgaacatcgccagatcctggctgttcctgcggagccaggagtacaagaaataccagacaaacaagacaaccggcaacaccgataagagagccttcgtcgagacctggcagtccttttaccggaagaagcttaaggaggtgtggaaacctgccgtgcggtctggcggatctggcggaggctccaccagccccaagaaaaagagaaaagtctaagctgccttctgcggggcttgccttctggccatgcccttcttctctcccttgcacctgtacctcttggtctttgaataaagcctgagtaggaaggctagcaaaaaaaaaaaaaaaaaaaaaaaaaaaaaaaaaaaaaaaaaaaaaaaaaaaaaaaaaaaaaaaaaaaaaaaaaaaaaaaa

SEQ ID NO: 12477 - RNA, 5785 nt, synthetic construct
  source 1..5785: mol_type = other RNA
aggaaataagagagaaaagaagagtaagaagaaatataagagccaccatggcccctaagaagaagcgtaaagtgagccggatggaacgcctcgtctacgaggtgcggcagaagtgcagaaacatcgaggacatctgcatctcctgcggatctctgaacgtgaccctggagcacccactgttcatcggcggcatgtgccagaactgtaaaaactgttttctggagtgtgcctatcaatacgacgatgacggctaccagagctactgcaccatctgttgcggcggaagagaggtgctgatgtgtggaaataacaactgctgccggtgcttctgcgtggaatgcgtggacctgctggtgggccccggcgccgcccaggccgctattaaggaagatccttggaactgctacatgtgcggccacaagggcacatacggcctgctgagacggagagaggactggcctagcagactgcagatgttcttcgccaataaccacgaccaggagttcgacccccctaaggtgtaccctcccgtccccgccgagaagagaaagcccatccgggtcctgagcctgttcgatggcatcgccaccggtctgctggtgctgaaggacctgggcatccaggtggataggtacattgcctccgaggtgtgcgaggactccatcaccgtgggaatggtgcgtcatcagggcaagatcatgtacgtgggcgacgtgcggagcgtgacacagaagcatatccaggagtggggccctttcgacctggtgatcggcggcagcccttgcaatgacctgagcatcgtgaacccagcccggaagggcctgtacgagggaaccggcagactgttcttcgagttttacagactgctgcacgacgcccggcctaaggaaggcgacgaccggcccttcttttggctgttcgagaatgtggtggccatgggagtcagcgacaagcgggatattagccggttcctggagagcaaccccgtgatgatcgatgccaaggaagtgagcgccgcccaccgggccagatacttctggggcaatctgcctggcatgaacagacccctggccagcaccgtgaacgacaagctggagctgcaggagtgcctggagcacggccggatcgccaagttcagcaaggtgagaaccatcaccacccgaagcaacagcatcaaacaaggcaaggaccagcactttcctgtgttcatgaacgagaaggaggacatcctgtggtgtaccgagatggagagagtgttcgggttcccagtccactacacagatgtcagcaacatgtctagactggccagacagagactgctgggaagaagctggtccgtccctgtgatcagacacctgttcgcccctctgaaggagtacttcgcctgcgtgagcagcggcaacagcaacgccaacagccggggccccagcttctctagcggcctggtgccactgtccctgagagggagccacatgggccccatggagatctacaaaaccgtgagcgcctggaagcggcagcctgtgcgcgtgctgagcctgtttcggaatatcgataaagtcctgaaaagcctgggattcctggagagcggctctggctccggcggtggcaccctgaagtacgtggaggatgtgacaaacgtggtcagacgggatgtggagaagtggggccccttcgatctggtgtacggcagcacccaacccctgggcagctcttgtgaccggtgccctggctggtacatgtttcagttccaccggatcctgcagtacgccctgccgagacaggagtcccagcggccattcttttggattttcatggacaacttgctgctgaccgaggatgaccaggaaactaccactcggttcctgcagaccgaagccgtgaccctgcaggacgtgagaggccgggactaccagaacgccatgcgggtgtggtccaacatccctggactgaaaagcaagcacgcacctctgacccctaaagaagaggagtacctgcaggcccaggtgcggagcagaagcaagctggacgcccctaaggtggatctgctggtgaagaattgcctcctgcccctgagagagtacttcaagtatttcagccagaatagtctgcccctgggaggcagcggcggcggcagcctgggcagcgagctgttcagggacgtggccatcgtgttcagccaggaggagtggcagtggctggcccccgcccagagggacctgtacagggacgtgatgctggagacctacagcaacctggtgagcctgggcctggccatcagcaagcccgacgtgatcagcttcctggagcagggcagggagccctggatggtggagagggtggtggccggcggcctgtgccccgtgctggagagcaggggcggcccaagcagcggcgcccctcctcccagcggcggcagcccagccggctccccaacctctaccgaggagggcacctctgagtccgccacccccgagagcggccctggcacctccaccgagcccagcgagggcagcgcacccggcagccctgccggcagccccacctccacagaggagggaaccagcaccgagcccagcgaaggcagcgccccaggcaccagcaccgagcctagtgagcaggagattaaacggatcaacaagatcagaagaagacttgtgaaagacagcaacaccaagaaggccggcaagacaggccccatgaaaaccctgctggttagagtgatgacacccgatctgagagagcggctggaaaacctgagaaagaagcctgaaaatatcccccagcccatcagcaatacatctagagccaacctgaataagctgctgaccgattacaccgaaatgaagaaggcgatcctgcatgtgtactgggaagagttccagaaggaccctgtgggcctgatgagccgggtggcccagcctgccagcaagaagatcgatcagaacaagctgaaacctgagatggacgagaagggcaacctgaccaccgccggctttgcctgctctcagtgtggccagcccctgttcgtgtacaagctggagcaggtgtctgagaagggcaaggcttacaccaactacttcggacggtgcaatgtggccgagcacgaaaagctgatcctgctggcccagctgaagcccgagaaggatagcgacgaagccgtgacatatagcctgggaaagtttgggcagagggccctggatttctacagcattcatgtgaccaaggagtccacccaccccgtgaagcccctggcccagatcgccggaaacagatacgcctccggacctgtgggaaaggccctgagcgacgcatgtatgggcacaatcgcctccttcctgtctaagtaccaggacatcatcatcgaacaccagaaggtggtgaagggcaaccagaagagactggagagcctgcgggagctggccggcaaggaaaacctggaataccctagcgtgaccctgccacctcagcctcacaccaaggagggcgttgatgcctacaacgaagtgatcgcccgggtgcgaatgtgggtgaacctgaacctgtggcagaagctgaagctaagcagagatgatgccaagcctctgctgagactgaagggattcccttcctttcctctggtcgagagacaggccaacgaagtggactggtgggacatggtgtgtaacgtgaagaagctgatcaacgagaaaaaggaggatggcaaggtgttttggcagaatctggctggctacaagagacaggaagccctgagaccatacctgagcagcgaggaagatcggaagaagggaaagaaattcgctcggtaccagctgggcgacctgctgctgcacctggaaaagaagcacggcgaggactggggaaaggtgtacgacgaggcctgggagcggattgacaagaaagtggaaggcctgagcaagcacatcaagctggaagaggaacggagaagcgaggacgcccagagcaaggccgccctgaccgactggctgcgggctaaggccagcttcgtgatcgagggcctgaaggaggccgacaaggacgagttctgcagatgcgagctgaagctgcagaagtggtacggggacctgcggggaaagcccttcgccatcgaagccgagaacagcatcctggacatcagcggcttcagcaagcagtacaactgtgccttcatctggcagaaggacggcgtgaagaagctgaacctgtacctgatcatcaactacttcaagggcggcaagctgcggttcaagaagatcaaacctgaagccttcgaagccaacagattctacaccgtgatcaacaaaaagagcggcgagatcgtgcccatggaggtgaacttcaacttcgacgaccccaacctgatcatcctgcctctggcctttggcaagagacagggcagagaattcatctggaacgacctgctgtccctggaaaccggcagcctgaagctggccaacggaagagtgatcgagaagacactgtacaacagaagaacccggcaggatgagcctgccctgttcgtggccctgaccttcgagcggcgggaggtcctggactcctccaatatcaaaccaatgaacctgatcggcgtggcaagaggcgaaaacatccccgccgtgatcgccctgaccgaccccgagggctgcccactgagccggtttaaggatagcctgggaaacccaacccacatcctgagaatcggcgagagctataaggagaagcagcggaccatccaggccaagaaggaggtggagcagcggagagccggcggctacagccggaagtacgccagcaaagccaagaatctggcagacgatatggtgagaaacaccgctagagatctgctgtactacgccgtgacccaggatgccatgctgatcttcgccaacctgagccggggcttcggccggcagggcaagcggaccttcatggccgagagacagtacacacggatggaggactggctgaccgccaagctggcctacgagggcctgagcaagacctacctgtccaagacactggcccagtacacctccaagacatgcagcaactgtgggtttaccatcaccagcgccgactacgacagggtgctggagaagctgaagaagacagcaacaggctggatgaccacaattaacggcaaggagctgaaggtggagggccagattacctactacaacagatacaagagacagaacgtagtcaaggacctgtccgtcgagctggatagactgagcgaagaatctgtgaacaacgacatctcctcctggacaaagggcagaagcggagaagctctgagcctcctgaagaaaagattctcccatagacccgtgcaggagaagttcgtgtgcctgaactgcggcttcgagacacacgcagccgagcaagccgccctgaacatcgccagatcctggctgttcctgcggagccaggagtacaagaaataccagacaaacaagacaaccggcaacaccgataagagagccttcgtcgagacctggcagtccttttaccggaagaagcttaaggaggtgtggaaacctgccgtgcggtctggcggatctggcggaggctccaccagccccaagaaaaagagaaaagtctaagctgccttctgcggggcttgccttctggccatgcccttcttctctcccttgcacctgtacctcttggtctttgaataaagcctgagtaggaaggctagcaaaaaaaaaaaaaaaaaaaaaaaaaaaaaaaaaaaaaaaaaaaaaaaaaaaaaaaaaaaaaaaaaaaaaaaaaaaaaaaa

SEQ ID NO: 12478 - RNA, 5785 nt, synthetic construct
  source 1..5785: mol_type = other RNA
aggaaataagagagaaaagaagagtaagaagaaatataagagccaccatggcccctaagaagaagcgtaaagtgagccggatggaacgcctcgtctacgaggtgcggcagaagtgcagaaacatcgaggacatctgcatctcctgcggatctctgaacgtgaccctggagcacccactgttcatcggcggcatgtgccagaactgtaaaaactgttttctggagtgtgcctatcaatacgacgatgacggctaccagagctactgcaccatctgttgcggcggaagagaggtgctgatgtgtggaaataacaactgctgccggtgcttctgcgtggaatgcgtggacctgctggtgggccccggcgccgcccaggccgctattaaggaagatccttggaactgctacatgtgcggccacaagggcacatacggcctgctgagacggagagaggactggcctagcagactgcagatgttcttcgccaataaccacgaccaggagttcgacccccctaaggtgtaccctcccgtccccgccgagaagagaaagcccatccgggtcctgagcctgttcgatggcatcgccaccggtctgctggtgctgaaggacctgggcatccaggtggataggtacattgcctccgaggtgtgcgaggactccatcaccgtgggaatggtgcgtcatcagggcaagatcatgtacgtgggcgacgtgcggagcgtgacacagaagcatatccaggagtggggccctttcgacctggtgatcggcggcagcccttgcaatgacctgagcatcgtgaacccagcccggaagggcctgtacgagggaaccggcagactgttcttcgagttttacagactgctgcacgacgcccggcctaaggaaggcgacgaccggcccttcttttggctgttcgagaatgtggtggccatgggagtcagcgacaagcgggatattagccggttcctggagagcaaccccgtgatgatcgatgccaaggaagtgagcgccgcccaccgggccagatacttctggggcaatctgcctggcatgaacagacccctggccagcaccgtgaacgacaagctggagctgcaggagtgcctggagcacggccggatcgccaagttcagcaaggtgagaaccatcaccacccgaagcaacagcatcaaacaaggcaaggaccagcactttcctgtgttcatgaacgagaaggaggacatcctgtggtgtaccgagatggagagagtgttcgggttcccagtccactacacagatgtcagcaacatgtctagactggccagacagagactgctgggaagaagctggtccgtccctgtgatcagacacctgttcgcccctctgaaggagtacttcgcctgcgtgagcagcggcaacagcaacgccaacagccggggccccagcttctctagcggcctggtgccactgtccctgagagggagccacatgggccccatggagatctacaaaaccgtgagcgcctggaagcggcagcctgtgcgcgtgctgagcctgtttcggaatatcgataaagtcctgaaaagcctgggattcctggagagcggctctggctccggcggtggcaccctgaagtacgtggaggatgtgacaaacgtggtcagacgggatgtggagaagtggggccccttcgatctggtgtacggcagcacccaacccctgggcagctcttgtgaccggtgccctggctggtacatgtttcagttccaccggatcctgcagtacgccctgccgagacaggagtcccagcggccattcttttggattttcatggacaacttgctgctgaccgaggatgaccaggaaactaccactcggttcctgcagaccgaagccgtgaccctgcaggacgtgagaggccgggactaccagaacgccatgcgggtgtggtccaacatccctggactgaaaagcaagcacgcacctctgacccctaaagaagaggagtacctgcaggcccaggtgcggagcagaagcaagctggacgcccctaaggtggatctgctggtgaagaattgcctcctgcccctgagagagtacttcaagtatttcagccagaatagtctgcccctgggaggcagcggcggcggcttccaggagagcgtgaccttcagggacgtggccgtggacttcacccaggaggagtggaggcacctggagcccgcccagagggccctgtacagggacgtgatgctggagaactacgagaacctggtgagcgtgggcatccccgtgagcaggctggacgtgaccagcctgctggagaggcaggaggccgtgtggaaggacggcggcctgagggacagctgcctggacagcctgagcaacaagatcggcggcccaagcagcggcgcccctcctcccagcggcggcagcccagccggctccccaacctctaccgaggagggcacctctgagtccgccacccccgagagcggccctggcacctccaccgagcccagcgagggcagcgcacccggcagccctgccggcagccccacctccacagaggagggaaccagcaccgagcccagcgaaggcagcgccccaggcaccagcaccgagcctagtgagcaggagattaaacggatcaacaagatcagaagaagacttgtgaaagacagcaacaccaagaaggccggcaagacaggccccatgaaaaccctgctggttagagtgatgacacccgatctgagagagcggctggaaaacctgagaaagaagcctgaaaatatcccccagcccatcagcaatacatctagagccaacctgaataagctgctgaccgattacaccgaaatgaagaaggcgatcctgcatgtgtactgggaagagttccagaaggaccctgtgggcctgatgagccgggtggcccagcctgccagcaagaagatcgatcagaacaagctgaaacctgagatggacgagaagggcaacctgaccaccgccggctttgcctgctctcagtgtggccagcccctgttcgtgtacaagctggagcaggtgtctgagaagggcaaggcttacaccaactacttcggacggtgcaatgtggccgagcacgaaaagctgatcctgctggcccagctgaagcccgagaaggatagcgacgaagccgtgacatatagcctgggaaagtttgggcagagggccctggatttctacagcattcatgtgaccaaggagtccacccaccccgtgaagcccctggcccagatcgccggaaacagatacgcctccggacctgtgggaaaggccctgagcgacgcatgtatgggcacaatcgcctccttcctgtctaagtaccaggacatcatcatcgaacaccagaaggtggtgaagggcaaccagaagagactggagagcctgcgggagctggccggcaaggaaaacctggaataccctagcgtgaccctgccacctcagcctcacaccaaggagggcgttgatgcctacaacgaagtgatcgcccgggtgcgaatgtgggtgaacctgaacctgtggcagaagctgaagctaagcagagatgatgccaagcctctgctgagactgaagggattcccttcctttcctctggtcgagagacaggccaacgaagtggactggtgggacatggtgtgtaacgtgaagaagctgatcaacgagaaaaaggaggatggcaaggtgttttggcagaatctggctggctacaagagacaggaagccctgagaccatacctgagcagcgaggaagatcggaagaagggaaagaaattcgctcggtaccagctgggcgacctgctgctgcacctggaaaagaagcacggcgaggactggggaaaggtgtacgacgaggcctgggagcggattgacaagaaagtggaaggcctgagcaagcacatcaagctggaagaggaacggagaagcgaggacgcccagagcaaggccgccctgaccgactggctgcgggctaaggccagcttcgtgatcgagggcctgaaggaggccgacaaggacgagttctgcagatgcgagctgaagctgcagaagtggtacggggacctgcggggaaagcccttcgccatcgaagccgagaacagcatcctggacatcagcggcttcagcaagcagtacaactgtgccttcatctggcagaaggacggcgtgaagaagctgaacctgtacctgatcatcaactacttcaagggcggcaagctgcggttcaagaagatcaaacctgaagccttcgaagccaacagattctacaccgtgatcaacaaaaagagcggcgagatcgtgcccatggaggtgaacttcaacttcgacgaccccaacctgatcatcctgcctctggcctttggcaagagacagggcagagaattcatctggaacgacctgctgtccctggaaaccggcagcctgaagctggccaacggaagagtgatcgagaagacactgtacaacagaagaacccggcaggatgagcctgccctgttcgtggccctgaccttcgagcggcgggaggtcctggactcctccaatatcaaaccaatgaacctgatcggcgtggcaagaggcgaaaacatccccgccgtgatcgccctgaccgaccccgagggctgcccactgagccggtttaaggatagcctgggaaacccaacccacatcctgagaatcggcgagagctataaggagaagcagcggaccatccaggccaagaaggaggtggagcagcggagagccggcggctacagccggaagtacgccagcaaagccaagaatctggcagacgatatggtgagaaacaccgctagagatctgctgtactacgccgtgacccaggatgccatgctgatcttcgccaacctgagccggggcttcggccggcagggcaagcggaccttcatggccgagagacagtacacacggatggaggactggctgaccgccaagctggcctacgagggcctgagcaagacctacctgtccaagacactggcccagtacacctccaagacatgcagcaactgtgggtttaccatcaccagcgccgactacgacagggtgctggagaagctgaagaagacagcaacaggctggatgaccacaattaacggcaaggagctgaaggtggagggccagattacctactacaacagatacaagagacagaacgtagtcaaggacctgtccgtcgagctggatagactgagcgaagaatctgtgaacaacgacatctcctcctggacaaagggcagaagcggagaagctctgagcctcctgaagaaaagattctcccatagacccgtgcaggagaagttcgtgtgcctgaactgcggcttcgagacacacgcagccgagcaagccgccctgaacatcgccagatcctggctgttcctgcggagccaggagtacaagaaataccagacaaacaagacaaccggcaacaccgataagagagccttcgtcgagacctggcagtccttttaccggaagaagcttaaggaggtgtggaaacctgccgtgcggtctggcggatctggcggaggctccaccagccccaagaaaaagagaaaagtctaagctgccttctgcggggcttgccttctggccatgcccttcttctctcccttgcacctgtacctcttggtctttgaataaagcctgagtaggaaggctagcaaaaaaaaaaaaaaaaaaaaaaaaaaaaaaaaaaaaaaaaaaaaaaaaaaaaaaaaaaaaaaaaaaaaaaaaaaaaaaaa

SEQ ID NO: 12479 - RNA, 5785 nt, synthetic construct
  source 1..5785: mol_type = other RNA
aggaaataagagagaaaagaagagtaagaagaaatataagagccaccatggcccctaagaagaagcgtaaagtgagccggatggaacgcctcgtctacgaggtgcggcagaagtgcagaaacatcgaggacatctgcatctcctgcggatctctgaacgtgaccctggagcacccactgttcatcggcggcatgtgccagaactgtaaaaactgttttctggagtgtgcctatcaatacgacgatgacggctaccagagctactgcaccatctgttgcggcggaagagaggtgctgatgtgtggaaataacaactgctgccggtgcttctgcgtggaatgcgtggacctgctggtgggccccggcgccgcccaggccgctattaaggaagatccttggaactgctacatgtgcggccacaagggcacatacggcctgctgagacggagagaggactggcctagcagactgcagatgttcttcgccaataaccacgaccaggagttcgacccccctaaggtgtaccctcccgtccccgccgagaagagaaagcccatccgggtcctgagcctgttcgatggcatcgccaccggtctgctggtgctgaaggacctgggcatccaggtggataggtacattgcctccgaggtgtgcgaggactccatcaccgtgggaatggtgcgtcatcagggcaagatcatgtacgtgggcgacgtgcggagcgtgacacagaagcatatccaggagtggggccctttcgacctggtgatcggcggcagcccttgcaatgacctgagcatcgtgaacccagcccggaagggcctgtacgagggaaccggcagactgttcttcgagttttacagactgctgcacgacgcccggcctaaggaaggcgacgaccggcccttcttttggctgttcgagaatgtggtggccatgggagtcagcgacaagcgggatattagccggttcctggagagcaaccccgtgatgatcgatgccaaggaagtgagcgccgcccaccgggccagatacttctggggcaatctgcctggcatgaacagacccctggccagcaccgtgaacgacaagctggagctgcaggagtgcctggagcacggccggatcgccaagttcagcaaggtgagaaccatcaccacccgaagcaacagcatcaaacaaggcaaggaccagcactttcctgtgttcatgaacgagaaggaggacatcctgtggtgtaccgagatggagagagtgttcgggttcccagtccactacacagatgtcagcaacatgtctagactggccagacagagactgctgggaagaagctggtccgtccctgtgatcagacacctgttcgcccctctgaaggagtacttcgcctgcgtgagcagcggcaacagcaacgccaacagccggggccccagcttctctagcggcctggtgccactgtccctgagagggagccacatgggccccatggagatctacaaaaccgtgagcgcctggaagcggcagcctgtgcgcgtgctgagcctgtttcggaatatcgataaagtcctgaaaagcctgggattcctggagagcggctctggctccggcggtggcaccctgaagtacgtggaggatgtgacaaacgtggtcagacgggatgtggagaagtggggccccttcgatctggtgtacggcagcacccaacccctgggcagctcttgtgaccggtgccctggctggtacatgtttcagttccaccggatcctgcagtacgccctgccgagacaggagtcccagcggccattcttttggattttcatggacaacttgctgctgaccgaggatgaccaggaaactaccactcggttcctgcagaccgaagccgtgaccctgcaggacgtgagaggccgggactaccagaacgccatgcgggtgtggtccaacatccctggactgaaaagcaagcacgcacctctgacccctaaagaagaggagtacctgcaggcccaggtgcggagcagaagcaagctggacgcccctaaggtggatctgctggtgaagaattgcctcctgcccctgagagagtacttcaagtatttcagccagaatagtctgcccctgggaggcagcggcggcggcgaggccgtgaccttcaaggacgtggccgtgttcttcaccgaggaggagctgggcctgctggacctggcccagaggaagctgtacagagacgtgatgctggagaacttcaggaacctgctgagcgtgggccaccagcccttccaccaggacgtgttccacttcctgagggaggagaagttctggatgatggagaccgccacccagagggagggcaacagcggcgagaacgccagcgtgcaccccggcggcccaagcagcggcgcccctcctcccagcggcggcagcccagccggctccccaacctctaccgaggagggcacctctgagtccgccacccccgagagcggccctggcacctccaccgagcccagcgagggcagcgcacccggcagccctgccggcagccccacctccacagaggagggaaccagcaccgagcccagcgaaggcagcgccccaggcaccagcaccgagcctagtgagcaggagattaaacggatcaacaagatcagaagaagacttgtgaaagacagcaacaccaagaaggccggcaagacaggccccatgaaaaccctgctggttagagtgatgacacccgatctgagagagcggctggaaaacctgagaaagaagcctgaaaatatcccccagcccatcagcaatacatctagagccaacctgaataagctgctgaccgattacaccgaaatgaagaaggcgatcctgcatgtgtactgggaagagttccagaaggaccctgtgggcctgatgagccgggtggcccagcctgccagcaagaagatcgatcagaacaagctgaaacctgagatggacgagaagggcaacctgaccaccgccggctttgcctgctctcagtgtggccagcccctgttcgtgtacaagctggagcaggtgtctgagaagggcaaggcttacaccaactacttcggacggtgcaatgtggccgagcacgaaaagctgatcctgctggcccagctgaagcccgagaaggatagcgacgaagccgtgacatatagcctgggaaagtttgggcagagggccctggatttctacagcattcatgtgaccaaggagtccacccaccccgtgaagcccctggcccagatcgccggaaacagatacgcctccggacctgtgggaaaggccctgagcgacgcatgtatgggcacaatcgcctccttcctgtctaagtaccaggacatcatcatcgaacaccagaaggtggtgaagggcaaccagaagagactggagagcctgcgggagctggccggcaaggaaaacctggaataccctagcgtgaccctgccacctcagcctcacaccaaggagggcgttgatgcctacaacgaagtgatcgcccgggtgcgaatgtgggtgaacctgaacctgtggcagaagctgaagctaagcagagatgatgccaagcctctgctgagactgaagggattcccttcctttcctctggtcgagagacaggccaacgaagtggactggtgggacatggtgtgtaacgtgaagaagctgatcaacgagaaaaaggaggatggcaaggtgttttggcagaatctggctggctacaagagacaggaagccctgagaccatacctgagcagcgaggaagatcggaagaagggaaagaaattcgctcggtaccagctgggcgacctgctgctgcacctggaaaagaagcacggcgaggactggggaaaggtgtacgacgaggcctgggagcggattgacaagaaagtggaaggcctgagcaagcacatcaagctggaagaggaacggagaagcgaggacgcccagagcaaggccgccctgaccgactggctgcgggctaaggccagcttcgtgatcgagggcctgaaggaggccgacaaggacgagttctgcagatgcgagctgaagctgcagaagtggtacggggacctgcggggaaagcccttcgccatcgaagccgagaacagcatcctggacatcagcggcttcagcaagcagtacaactgtgccttcatctggcagaaggacggcgtgaagaagctgaacctgtacctgatcatcaactacttcaagggcggcaagctgcggttcaagaagatcaaacctgaagccttcgaagccaacagattctacaccgtgatcaacaaaaagagcggcgagatcgtgcccatggaggtgaacttcaacttcgacgaccccaacctgatcatcctgcctctggcctttggcaagagacagggcagagaattcatctggaacgacctgctgtccctggaaaccggcagcctgaagctggccaacggaagagtgatcgagaagacactgtacaacagaagaacccggcaggatgagcctgccctgttcgtggccctgaccttcgagcggcgggaggtcctggactcctccaatatcaaaccaatgaacctgatcggcgtggcaagaggcgaaaacatccccgccgtgatcgccctgaccgaccccgagggctgcccactgagccggtttaaggatagcctgggaaacccaacccacatcctgagaatcggcgagagctataaggagaagcagcggaccatccaggccaagaaggaggtggagcagcggagagccggcggctacagccggaagtacgccagcaaagccaagaatctggcagacgatatggtgagaaacaccgctagagatctgctgtactacgccgtgacccaggatgccatgctgatcttcgccaacctgagccggggcttcggccggcagggcaagcggaccttcatggccgagagacagtacacacggatggaggactggctgaccgccaagctggcctacgagggcctgagcaagacctacctgtccaagacactggcccagtacacctccaagacatgcagcaactgtgggtttaccatcaccagcgccgactacgacagggtgctggagaagctgaagaagacagcaacaggctggatgaccacaattaacggcaaggagctgaaggtggagggccagattacctactacaacagatacaagagacagaacgtagtcaaggacctgtccgtcgagctggatagactgagcgaagaatctgtgaacaacgacatctcctcctggacaaagggcagaagcggagaagctctgagcctcctgaagaaaagattctcccatagacccgtgcaggagaagttcgtgtgcctgaactgcggcttcgagacacacgcagccgagcaagccgccctgaacatcgccagatcctggctgttcctgcggagccaggagtacaagaaataccagacaaacaagacaaccggcaacaccgataagagagccttcgtcgagacctggcagtccttttaccggaagaagcttaaggaggtgtggaaacctgccgtgcggtctggcggatctggcggaggctccaccagccccaagaaaaagagaaaagtctaagctgccttctgcggggcttgccttctggccatgcccttcttctctcccttgcacctgtacctcttggtctttgaataaagcctgagtaggaaggctagcaaaaaaaaaaaaaaaaaaaaaaaaaaaaaaaaaaaaaaaaaaaaaaaaaaaaaaaaaaaaaaaaaaaaaaaaaaaaaaaa

SEQ ID NO: 12480 - RNA, 5785 nt, synthetic construct
  source 1..5785: mol_type = other RNA
aggaaataagagagaaaagaagagtaagaagaaatataagagccaccatggcccctaagaagaagcgtaaagtgagccggatggaacgcctcgtctacgaggtgcggcagaagtgcagaaacatcgaggacatctgcatctcctgcggatctctgaacgtgaccctggagcacccactgttcatcggcggcatgtgccagaactgtaaaaactgttttctggagtgtgcctatcaatacgacgatgacggctaccagagctactgcaccatctgttgcggcggaagagaggtgctgatgtgtggaaataacaactgctgccggtgcttctgcgtggaatgcgtggacctgctggtgggccccggcgccgcccaggccgctattaaggaagatccttggaactgctacatgtgcggccacaagggcacatacggcctgctgagacggagagaggactggcctagcagactgcagatgttcttcgccaataaccacgaccaggagttcgacccccctaaggtgtaccctcccgtccccgccgagaagagaaagcccatccgggtcctgagcctgttcgatggcatcgccaccggtctgctggtgctgaaggacctgggcatccaggtggataggtacattgcctccgaggtgtgcgaggactccatcaccgtgggaatggtgcgtcatcagggcaagatcatgtacgtgggcgacgtgcggagcgtgacacagaagcatatccaggagtggggccctttcgacctggtgatcggcggcagcccttgcaatgacctgagcatcgtgaacccagcccggaagggcctgtacgagggaaccggcagactgttcttcgagttttacagactgctgcacgacgcccggcctaaggaaggcgacgaccggcccttcttttggctgttcgagaatgtggtggccatgggagtcagcgacaagcgggatattagccggttcctggagagcaaccccgtgatgatcgatgccaaggaagtgagcgccgcccaccgggccagatacttctggggcaatctgcctggcatgaacagacccctggccagcaccgtgaacgacaagctggagctgcaggagtgcctggagcacggccggatcgccaagttcagcaaggtgagaaccatcaccacccgaagcaacagcatcaaacaaggcaaggaccagcactttcctgtgttcatgaacgagaaggaggacatcctgtggtgtaccgagatggagagagtgttcgggttcccagtccactacacagatgtcagcaacatgtctagactggccagacagagactgctgggaagaagctggtccgtccctgtgatcagacacctgttcgcccctctgaaggagtacttcgcctgcgtgagcagcggcaacagcaacgccaacagccggggccccagcttctctagcggcctggtgccactgtccctgagagggagccacatgggccccatggagatctacaaaaccgtgagcgcctggaagcggcagcctgtgcgcgtgctgagcctgtttcggaatatcgataaagtcctgaaaagcctgggattcctggagagcggctctggctccggcggtggcaccctgaagtacgtggaggatgtgacaaacgtggtcagacgggatgtggagaagtggggccccttcgatctggtgtacggcagcacccaacccctgggcagctcttgtgaccggtgccctggctggtacatgtttcagttccaccggatcctgcagtacgccctgccgagacaggagtcccagcggccattcttttggattttcatggacaacttgctgctgaccgaggatgaccaggaaactaccactcggttcctgcagaccgaagccgtgaccctgcaggacgtgagaggccgggactaccagaacgccatgcgggtgtggtccaacatccctggactgaaaagcaagcacgcacctctgacccctaaagaagaggagtacctgcaggcccaggtgcggagcagaagcaagctggacgcccctaaggtggatctgctggtgaagaattgcctcctgcccctgagagagtacttcaagtatttcagccagaatagtctgcccctgggaggcagcggcggcggcacccagctgaccgtggaggacgtggacatcaagttcacccccgaggagtgggagtgcctggaccccgcccagagggccctgtactgggacgtgatggaggagacctacaggaacctgctgagcgtggacgtgagccacatccacatgaccaagaagctgcaggccaaggccaacagcggcaagggcgagatcctgcagaccgtgatgttcggcagggccgagacccacgagatcaaggacttcggcggcccaagcagcggcgcccctcctcccagcggcggcagcccagccggctccccaacctctaccgaggagggcacctctgagtccgccacccccgagagcggccctggcacctccaccgagcccagcgagggcagcgcacccggcagccctgccggcagccccacctccacagaggagggaaccagcaccgagcccagcgaaggcagcgccccaggcaccagcaccgagcctagtgagcaggagattaaacggatcaacaagatcagaagaagacttgtgaaagacagcaacaccaagaaggccggcaagacaggccccatgaaaaccctgctggttagagtgatgacacccgatctgagagagcggctggaaaacctgagaaagaagcctgaaaatatcccccagcccatcagcaatacatctagagccaacctgaataagctgctgaccgattacaccgaaatgaagaaggcgatcctgcatgtgtactgggaagagttccagaaggaccctgtgggcctgatgagccgggtggcccagcctgccagcaagaagatcgatcagaacaagctgaaacctgagatggacgagaagggcaacctgaccaccgccggctttgcctgctctcagtgtggccagcccctgttcgtgtacaagctggagcaggtgtctgagaagggcaaggcttacaccaactacttcggacggtgcaatgtggccgagcacgaaaagctgatcctgctggcccagctgaagcccgagaaggatagcgacgaagccgtgacatatagcctgggaaagtttgggcagagggccctggatttctacagcattcatgtgaccaaggagtccacccaccccgtgaagcccctggcccagatcgccggaaacagatacgcctccggacctgtgggaaaggccctgagcgacgcatgtatgggcacaatcgcctccttcctgtctaagtaccaggacatcatcatcgaacaccagaaggtggtgaagggcaaccagaagagactggagagcctgcgggagctggccggcaaggaaaacctggaataccctagcgtgaccctgccacctcagcctcacaccaaggagggcgttgatgcctacaacgaagtgatcgcccgggtgcgaatgtgggtgaacctgaacctgtggcagaagctgaagctaagcagagatgatgccaagcctctgctgagactgaagggattcccttcctttcctctggtcgagagacaggccaacgaagtggactggtgggacatggtgtgtaacgtgaagaagctgatcaacgagaaaaaggaggatggcaaggtgttttggcagaatctggctggctacaagagacaggaagccctgagaccatacctgagcagcgaggaagatcggaagaagggaaagaaattcgctcggtaccagctgggcgacctgctgctgcacctggaaaagaagcacggcgaggactggggaaaggtgtacgacgaggcctgggagcggattgacaagaaagtggaaggcctgagcaagcacatcaagctggaagaggaacggagaagcgaggacgcccagagcaaggccgccctgaccgactggctgcgggctaaggccagcttcgtgatcgagggcctgaaggaggccgacaaggacgagttctgcagatgcgagctgaagctgcagaagtggtacggggacctgcggggaaagcccttcgccatcgaagccgagaacagcatcctggacatcagcggcttcagcaagcagtacaactgtgccttcatctggcagaaggacggcgtgaagaagctgaacctgtacctgatcatcaactacttcaagggcggcaagctgcggttcaagaagatcaaacctgaagccttcgaagccaacagattctacaccgtgatcaacaaaaagagcggcgagatcgtgcccatggaggtgaacttcaacttcgacgaccccaacctgatcatcctgcctctggcctttggcaagagacagggcagagaattcatctggaacgacctgctgtccctggaaaccggcagcctgaagctggccaacggaagagtgatcgagaagacactgtacaacagaagaacccggcaggatgagcctgccctgttcgtggccctgaccttcgagcggcgggaggtcctggactcctccaatatcaaaccaatgaacctgatcggcgtggcaagaggcgaaaacatccccgccgtgatcgccctgaccgaccccgagggctgcccactgagccggtttaaggatagcctgggaaacccaacccacatcctgagaatcggcgagagctataaggagaagcagcggaccatccaggccaagaaggaggtggagcagcggagagccggcggctacagccggaagtacgccagcaaagccaagaatctggcagacgatatggtgagaaacaccgctagagatctgctgtactacgccgtgacccaggatgccatgctgatcttcgccaacctgagccggggcttcggccggcagggcaagcggaccttcatggccgagagacagtacacacggatggaggactggctgaccgccaagctggcctacgagggcctgagcaagacctacctgtccaagacactggcccagtacacctccaagacatgcagcaactgtgggtttaccatcaccagcgccgactacgacagggtgctggagaagctgaagaagacagcaacaggctggatgaccacaattaacggcaaggagctgaaggtggagggccagattacctactacaacagatacaagagacagaacgtagtcaaggacctgtccgtcgagctggatagactgagcgaagaatctgtgaacaacgacatctcctcctggacaaagggcagaagcggagaagctctgagcctcctgaagaaaagattctcccatagacccgtgcaggagaagttcgtgtgcctgaactgcggcttcgagacacacgcagccgagcaagccgccctgaacatcgccagatcctggctgttcctgcggagccaggagtacaagaaataccagacaaacaagacaaccggcaacaccgataagagagccttcgtcgagacctggcagtccttttaccggaagaagcttaaggaggtgtggaaacctgccgtgcggtctggcggatctggcggaggctccaccagccccaagaaaaagagaaaagtctaagctgccttctgcggggcttgccttctggccatgcccttcttctctcccttgcacctgtacctcttggtctttgaataaagcctgagtaggaaggctagcaaaaaaaaaaaaaaaaaaaaaaaaaaaaaaaaaaaaaaaaaaaaaaaaaaaaaaaaaaaaaaaaaaaaaaaaaaaaaaaa

SEQ ID NO: 12481 - RNA, 5785 nt, synthetic construct
  source 1..5785: mol_type = other RNA
aggaaataagagagaaaagaagagtaagaagaaatataagagccaccatggcccctaagaagaagcgtaaagtgagccggatggaacgcctcgtctacgaggtgcggcagaagtgcagaaacatcgaggacatctgcatctcctgcggatctctgaacgtgaccctggagcacccactgttcatcggcggcatgtgccagaactgtaaaaactgttttctggagtgtgcctatcaatacgacgatgacggctaccagagctactgcaccatctgttgcggcggaagagaggtgctgatgtgtggaaataacaactgctgccggtgcttctgcgtggaatgcgtggacctgctggtgggccccggcgccgcccaggccgctattaaggaagatccttggaactgctacatgtgcggccacaagggcacatacggcctgctgagacggagagaggactggcctagcagactgcagatgttcttcgccaataaccacgaccaggagttcgacccccctaaggtgtaccctcccgtccccgccgagaagagaaagcccatccgggtcctgagcctgttcgatggcatcgccaccggtctgctggtgctgaaggacctgggcatccaggtggataggtacattgcctccgaggtgtgcgaggactccatcaccgtgggaatggtgcgtcatcagggcaagatcatgtacgtgggcgacgtgcggagcgtgacacagaagcatatccaggagtggggccctttcgacctggtgatcggcggcagcccttgcaatgacctgagcatcgtgaacccagcccggaagggcctgtacgagggaaccggcagactgttcttcgagttttacagactgctgcacgacgcccggcctaaggaaggcgacgaccggcccttcttttggctgttcgagaatgtggtggccatgggagtcagcgacaagcgggatattagccggttcctggagagcaaccccgtgatgatcgatgccaaggaagtgagcgccgcccaccgggccagatacttctggggcaatctgcctggcatgaacagacccctggccagcaccgtgaacgacaagctggagctgcaggagtgcctggagcacggccggatcgccaagttcagcaaggtgagaaccatcaccacccgaagcaacagcatcaaacaaggcaaggaccagcactttcctgtgttcatgaacgagaaggaggacatcctgtggtgtaccgagatggagagagtgttcgggttcccagtccactacacagatgtcagcaacatgtctagactggccagacagagactgctgggaagaagctggtccgtccctgtgatcagacacctgttcgcccctctgaaggagtacttcgcctgcgtgagcagcggcaacagcaacgccaacagccggggccccagcttctctagcggcctggtgccactgtccctgagagggagccacatgggccccatggagatctacaaaaccgtgagcgcctggaagcggcagcctgtgcgcgtgctgagcctgtttcggaatatcgataaagtcctgaaaagcctgggattcctggagagcggctctggctccggcggtggcaccctgaagtacgtggaggatgtgacaaacgtggtcagacgggatgtggagaagtggggccccttcgatctggtgtacggcagcacccaacccctgggcagctcttgtgaccggtgccctggctggtacatgtttcagttccaccggatcctgcagtacgccctgccgagacaggagtcccagcggccattcttttggattttcatggacaacttgctgctgaccgaggatgaccaggaaactaccactcggttcctgcagaccgaagccgtgaccctgcaggacgtgagaggccgggactaccagaacgccatgcgggtgtggtccaacatccctggactgaaaagcaagcacgcacctctgacccctaaagaagaggagtacctgcaggcccaggtgcggagcagaagcaagctggacgcccctaaggtggatctgctggtgaagaattgcctcctgcccctgagagagtacttcaagtatttcagccagaatagtctgcccctgggaggcagcggcggcggcacctgcatggtgcacaggcagaccatgagctgcagcggcgccggcggcatcaccgccttcgtggccttcagggacgtggccgtggacttcacccaggaggagtggaggctgctgagccccgcccagaggaccctgcacagggaggtgatgctggagacctacaaccacctggtgagcctggagatccccagcagcaagcccaagctgatcgcccagctggagaggggcgaggagccctggaggggcggcccaagcagcggcgcccctcctcccagcggcggcagcccagccggctccccaacctctaccgaggagggcacctctgagtccgccacccccgagagcggccctggcacctccaccgagcccagcgagggcagcgcacccggcagccctgccggcagccccacctccacagaggagggaaccagcaccgagcccagcgaaggcagcgccccaggcaccagcaccgagcctagtgagcaggagattaaacggatcaacaagatcagaagaagacttgtgaaagacagcaacaccaagaaggccggcaagacaggccccatgaaaaccctgctggttagagtgatgacacccgatctgagagagcggctggaaaacctgagaaagaagcctgaaaatatcccccagcccatcagcaatacatctagagccaacctgaataagctgctgaccgattacaccgaaatgaagaaggcgatcctgcatgtgtactgggaagagttccagaaggaccctgtgggcctgatgagccgggtggcccagcctgccagcaagaagatcgatcagaacaagctgaaacctgagatggacgagaagggcaacctgaccaccgccggctttgcctgctctcagtgtggccagcccctgttcgtgtacaagctggagcaggtgtctgagaagggcaaggcttacaccaactacttcggacggtgcaatgtggccgagcacgaaaagctgatcctgctggcccagctgaagcccgagaaggatagcgacgaagccgtgacatatagcctgggaaagtttgggcagagggccctggatttctacagcattcatgtgaccaaggagtccacccaccccgtgaagcccctggcccagatcgccggaaacagatacgcctccggacctgtgggaaaggccctgagcgacgcatgtatgggcacaatcgcctccttcctgtctaagtaccaggacatcatcatcgaacaccagaaggtggtgaagggcaaccagaagagactggagagcctgcgggagctggccggcaaggaaaacctggaataccctagcgtgaccctgccacctcagcctcacaccaaggagggcgttgatgcctacaacgaagtgatcgcccgggtgcgaatgtgggtgaacctgaacctgtggcagaagctgaagctaagcagagatgatgccaagcctctgctgagactgaagggattcccttcctttcctctggtcgagagacaggccaacgaagtggactggtgggacatggtgtgtaacgtgaagaagctgatcaacgagaaaaaggaggatggcaaggtgttttggcagaatctggctggctacaagagacaggaagccctgagaccatacctgagcagcgaggaagatcggaagaagggaaagaaattcgctcggtaccagctgggcgacctgctgctgcacctggaaaagaagcacggcgaggactggggaaaggtgtacgacgaggcctgggagcggattgacaagaaagtggaaggcctgagcaagcacatcaagctggaagaggaacggagaagcgaggacgcccagagcaaggccgccctgaccgactggctgcgggctaaggccagcttcgtgatcgagggcctgaaggaggccgacaaggacgagttctgcagatgcgagctgaagctgcagaagtggtacggggacctgcggggaaagcccttcgccatcgaagccgagaacagcatcctggacatcagcggcttcagcaagcagtacaactgtgccttcatctggcagaaggacggcgtgaagaagctgaacctgtacctgatcatcaactacttcaagggcggcaagctgcggttcaagaagatcaaacctgaagccttcgaagccaacagattctacaccgtgatcaacaaaaagagcggcgagatcgtgcccatggaggtgaacttcaacttcgacgaccccaacctgatcatcctgcctctggcctttggcaagagacagggcagagaattcatctggaacgacctgctgtccctggaaaccggcagcctgaagctggccaacggaagagtgatcgagaagacactgtacaacagaagaacccggcaggatgagcctgccctgttcgtggccctgaccttcgagcggcgggaggtcctggactcctccaatatcaaaccaatgaacctgatcggcgtggcaagaggcgaaaacatccccgccgtgatcgccctgaccgaccccgagggctgcccactgagccggtttaaggatagcctgggaaacccaacccacatcctgagaatcggcgagagctataaggagaagcagcggaccatccaggccaagaaggaggtggagcagcggagagccggcggctacagccggaagtacgccagcaaagccaagaatctggcagacgatatggtgagaaacaccgctagagatctgctgtactacgccgtgacccaggatgccatgctgatcttcgccaacctgagccggggcttcggccggcagggcaagcggaccttcatggccgagagacagtacacacggatggaggactggctgaccgccaagctggcctacgagggcctgagcaagacctacctgtccaagacactggcccagtacacctccaagacatgcagcaactgtgggtttaccatcaccagcgccgactacgacagggtgctggagaagctgaagaagacagcaacaggctggatgaccacaattaacggcaaggagctgaaggtggagggccagattacctactacaacagatacaagagacagaacgtagtcaaggacctgtccgtcgagctggatagactgagcgaagaatctgtgaacaacgacatctcctcctggacaaagggcagaagcggagaagctctgagcctcctgaagaaaagattctcccatagacccgtgcaggagaagttcgtgtgcctgaactgcggcttcgagacacacgcagccgagcaagccgccctgaacatcgccagatcctggctgttcctgcggagccaggagtacaagaaataccagacaaacaagacaaccggcaacaccgataagagagccttcgtcgagacctggcagtccttttaccggaagaagcttaaggaggtgtggaaacctgccgtgcggtctggcggatctggcggaggctccaccagccccaagaaaaagagaaaagtctaagctgccttctgcggggcttgccttctggccatgcccttcttctctcccttgcacctgtacctcttggtctttgaataaagcctgagtaggaaggctagcaaaaaaaaaaaaaaaaaaaaaaaaaaaaaaaaaaaaaaaaaaaaaaaaaaaaaaaaaaaaaaaaaaaaaaaaaaaaaaaa

SEQ ID NO: 12482 - RNA, 5785 nt, synthetic construct
  source 1..5785: mol_type = other RNA
aggaaataagagagaaaagaagagtaagaagaaatataagagccaccatggcccctaagaagaagcgtaaagtgagccggatggaacgcctcgtctacgaggtgcggcagaagtgcagaaacatcgaggacatctgcatctcctgcggatctctgaacgtgaccctggagcacccactgttcatcggcggcatgtgccagaactgtaaaaactgttttctggagtgtgcctatcaatacgacgatgacggctaccagagctactgcaccatctgttgcggcggaagagaggtgctgatgtgtggaaataacaactgctgccggtgcttctgcgtggaatgcgtggacctgctggtgggccccggcgccgcccaggccgctattaaggaagatccttggaactgctacatgtgcggccacaagggcacatacggcctgctgagacggagagaggactggcctagcagactgcagatgttcttcgccaataaccacgaccaggagttcgacccccctaaggtgtaccctcccgtccccgccgagaagagaaagcccatccgggtcctgagcctgttcgatggcatcgccaccggtctgctggtgctgaaggacctgggcatccaggtggataggtacattgcctccgaggtgtgcgaggactccatcaccgtgggaatggtgcgtcatcagggcaagatcatgtacgtgggcgacgtgcggagcgtgacacagaagcatatccaggagtggggccctttcgacctggtgatcggcggcagcccttgcaatgacctgagcatcgtgaacccagcccggaagggcctgtacgagggaaccggcagactgttcttcgagttttacagactgctgcacgacgcccggcctaaggaaggcgacgaccggcccttcttttggctgttcgagaatgtggtggccatgggagtcagcgacaagcgggatattagccggttcctggagagcaaccccgtgatgatcgatgccaaggaagtgagcgccgcccaccgggccagatacttctggggcaatctgcctggcatgaacagacccctggccagcaccgtgaacgacaagctggagctgcaggagtgcctggagcacggccggatcgccaagttcagcaaggtgagaaccatcaccacccgaagcaacagcatcaaacaaggcaaggaccagcactttcctgtgttcatgaacgagaaggaggacatcctgtggtgtaccgagatggagagagtgttcgggttcccagtccactacacagatgtcagcaacatgtctagactggccagacagagactgctgggaagaagctggtccgtccctgtgatcagacacctgttcgcccctctgaaggagtacttcgcctgcgtgagcagcggcaacagcaacgccaacagccggggccccagcttctctagcggcctggtgccactgtccctgagagggagccacatgggccccatggagatctacaaaaccgtgagcgcctggaagcggcagcctgtgcgcgtgctgagcctgtttcggaatatcgataaagtcctgaaaagcctgggattcctggagagcggctctggctccggcggtggcaccctgaagtacgtggaggatgtgacaaacgtggtcagacgggatgtggagaagtggggccccttcgatctggtgtacggcagcacccaacccctgggcagctcttgtgaccggtgccctggctggtacatgtttcagttccaccggatcctgcagtacgccctgccgagacaggagtcccagcggccattcttttggattttcatggacaacttgctgctgaccgaggatgaccaggaaactaccactcggttcctgcagaccgaagccgtgaccctgcaggacgtgagaggccgggactaccagaacgccatgcgggtgtggtccaacatccctggactgaaaagcaagcacgcacctctgacccctaaagaagaggagtacctgcaggcccaggtgcggagcagaagcaagctggacgcccctaaggtggatctgctggtgaagaattgcctcctgcccctgagagagtacttcaagtatttcagccagaatagtctgcccctgggaggcagcggcggcggcagccagagcctggtgaccttcggcgacgtggccgtggacttcagccaggaggagtgggagtggctgaacagcgcccagaggaacctgtacaggagcgtgatgctggagaactacaggaacctggtgagcctgggcctgtgcgtgagcaagcccgacatgatcagcagcctggagcagaggaaggagccctggatggtgaagaggaagctgaccaggggcaggtgccccgacctgaagaccgtgggcggcccaagcagcggcgcccctcctcccagcggcggcagcccagccggctccccaacctctaccgaggagggcacctctgagtccgccacccccgagagcggccctggcacctccaccgagcccagcgagggcagcgcacccggcagccctgccggcagccccacctccacagaggagggaaccagcaccgagcccagcgaaggcagcgccccaggcaccagcaccgagcctagtgagcaggagattaaacggatcaacaagatcagaagaagacttgtgaaagacagcaacaccaagaaggccggcaagacaggccccatgaaaaccctgctggttagagtgatgacacccgatctgagagagcggctggaaaacctgagaaagaagcctgaaaatatcccccagcccatcagcaatacatctagagccaacctgaataagctgctgaccgattacaccgaaatgaagaaggcgatcctgcatgtgtactgggaagagttccagaaggaccctgtgggcctgatgagccgggtggcccagcctgccagcaagaagatcgatcagaacaagctgaaacctgagatggacgagaagggcaacctgaccaccgccggctttgcctgctctcagtgtggccagcccctgttcgtgtacaagctggagcaggtgtctgagaagggcaaggcttacaccaactacttcggacggtgcaatgtggccgagcacgaaaagctgatcctgctggcccagctgaagcccgagaaggatagcgacgaagccgtgacatatagcctgggaaagtttgggcagagggccctggatttctacagcattcatgtgaccaaggagtccacccaccccgtgaagcccctggcccagatcgccggaaacagatacgcctccggacctgtgggaaaggccctgagcgacgcatgtatgggcacaatcgcctccttcctgtctaagtaccaggacatcatcatcgaacaccagaaggtggtgaagggcaaccagaagagactggagagcctgcgggagctggccggcaaggaaaacctggaataccctagcgtgaccctgccacctcagcctcacaccaaggagggcgttgatgcctacaacgaagtgatcgcccgggtgcgaatgtgggtgaacctgaacctgtggcagaagctgaagctaagcagagatgatgccaagcctctgctgagactgaagggattcccttcctttcctctggtcgagagacaggccaacgaagtggactggtgggacatggtgtgtaacgtgaagaagctgatcaacgagaaaaaggaggatggcaaggtgttttggcagaatctggctggctacaagagacaggaagccctgagaccatacctgagcagcgaggaagatcggaagaagggaaagaaattcgctcggtaccagctgggcgacctgctgctgcacctggaaaagaagcacggcgaggactggggaaaggtgtacgacgaggcctgggagcggattgacaagaaagtggaaggcctgagcaagcacatcaagctggaagaggaacggagaagcgaggacgcccagagcaaggccgccctgaccgactggctgcgggctaaggccagcttcgtgatcgagggcctgaaggaggccgacaaggacgagttctgcagatgcgagctgaagctgcagaagtggtacggggacctgcggggaaagcccttcgccatcgaagccgagaacagcatcctggacatcagcggcttcagcaagcagtacaactgtgccttcatctggcagaaggacggcgtgaagaagctgaacctgtacctgatcatcaactacttcaagggcggcaagctgcggttcaagaagatcaaacctgaagccttcgaagccaacagattctacaccgtgatcaacaaaaagagcggcgagatcgtgcccatggaggtgaacttcaacttcgacgaccccaacctgatcatcctgcctctggcctttggcaagagacagggcagagaattcatctggaacgacctgctgtccctggaaaccggcagcctgaagctggccaacggaagagtgatcgagaagacactgtacaacagaagaacccggcaggatgagcctgccctgttcgtggccctgaccttcgagcggcgggaggtcctggactcctccaatatcaaaccaatgaacctgatcggcgtggcaagaggcgaaaacatccccgccgtgatcgccctgaccgaccccgagggctgcccactgagccggtttaaggatagcctgggaaacccaacccacatcctgagaatcggcgagagctataaggagaagcagcggaccatccaggccaagaaggaggtggagcagcggagagccggcggctacagccggaagtacgccagcaaagccaagaatctggcagacgatatggtgagaaacaccgctagagatctgctgtactacgccgtgacccaggatgccatgctgatcttcgccaacctgagccggggcttcggccggcagggcaagcggaccttcatggccgagagacagtacacacggatggaggactggctgaccgccaagctggcctacgagggcctgagcaagacctacctgtccaagacactggcccagtacacctccaagacatgcagcaactgtgggtttaccatcaccagcgccgactacgacagggtgctggagaagctgaagaagacagcaacaggctggatgaccacaattaacggcaaggagctgaaggtggagggccagattacctactacaacagatacaagagacagaacgtagtcaaggacctgtccgtcgagctggatagactgagcgaagaatctgtgaacaacgacatctcctcctggacaaagggcagaagcggagaagctctgagcctcctgaagaaaagattctcccatagacccgtgcaggagaagttcgtgtgcctgaactgcggcttcgagacacacgcagccgagcaagccgccctgaacatcgccagatcctggctgttcctgcggagccaggagtacaagaaataccagacaaacaagacaaccggcaacaccgataagagagccttcgtcgagacctggcagtccttttaccggaagaagcttaaggaggtgtggaaacctgccgtgcggtctggcggatctggcggaggctccaccagccccaagaaaaagagaaaagtctaagctgccttctgcggggcttgccttctggccatgcccttcttctctcccttgcacctgtacctcttggtctttgaataaagcctgagtaggaaggctagcaaaaaaaaaaaaaaaaaaaaaaaaaaaaaaaaaaaaaaaaaaaaaaaaaaaaaaaaaaaaaaaaaaaaaaaaaaaaaaaa

SEQ ID NO: 12483 - RNA, 5785 nt, synthetic construct
  source 1..5785: mol_type = other RNA
aggaaataagagagaaaagaagagtaagaagaaatataagagccaccatggcccctaagaagaagcgtaaagtgagccggatggaacgcctcgtctacgaggtgcggcagaagtgcagaaacatcgaggacatctgcatctcctgcggatctctgaacgtgaccctggagcacccactgttcatcggcggcatgtgccagaactgtaaaaactgttttctggagtgtgcctatcaatacgacgatgacggctaccagagctactgcaccatctgttgcggcggaagagaggtgctgatgtgtggaaataacaactgctgccggtgcttctgcgtggaatgcgtggacctgctggtgggccccggcgccgcccaggccgctattaaggaagatccttggaactgctacatgtgcggccacaagggcacatacggcctgctgagacggagagaggactggcctagcagactgcagatgttcttcgccaataaccacgaccaggagttcgacccccctaaggtgtaccctcccgtccccgccgagaagagaaagcccatccgggtcctgagcctgttcgatggcatcgccaccggtctgctggtgctgaaggacctgggcatccaggtggataggtacattgcctccgaggtgtgcgaggactccatcaccgtgggaatggtgcgtcatcagggcaagatcatgtacgtgggcgacgtgcggagcgtgacacagaagcatatccaggagtggggccctttcgacctggtgatcggcggcagcccttgcaatgacctgagcatcgtgaacccagcccggaagggcctgtacgagggaaccggcagactgttcttcgagttttacagactgctgcacgacgcccggcctaaggaaggcgacgaccggcccttcttttggctgttcgagaatgtggtggccatgggagtcagcgacaagcgggatattagccggttcctggagagcaaccccgtgatgatcgatgccaaggaagtgagcgccgcccaccgggccagatacttctggggcaatctgcctggcatgaacagacccctggccagcaccgtgaacgacaagctggagctgcaggagtgcctggagcacggccggatcgccaagttcagcaaggtgagaaccatcaccacccgaagcaacagcatcaaacaaggcaaggaccagcactttcctgtgttcatgaacgagaaggaggacatcctgtggtgtaccgagatggagagagtgttcgggttcccagtccactacacagatgtcagcaacatgtctagactggccagacagagactgctgggaagaagctggtccgtccctgtgatcagacacctgttcgcccctctgaaggagtacttcgcctgcgtgagcagcggcaacagcaacgccaacagccggggccccagcttctctagcggcctggtgccactgtccctgagagggagccacatgggccccatggagatctacaaaaccgtgagcgcctggaagcggcagcctgtgcgcgtgctgagcctgtttcggaatatcgataaagtcctgaaaagcctgggattcctggagagcggctctggctccggcggtggcaccctgaagtacgtggaggatgtgacaaacgtggtcagacgggatgtggagaagtggggccccttcgatctggtgtacggcagcacccaacccctgggcagctcttgtgaccggtgccctggctggtacatgtttcagttccaccggatcctgcagtacgccctgccgagacaggagtcccagcggccattcttttggattttcatggacaacttgctgctgaccgaggatgaccaggaaactaccactcggttcctgcagaccgaagccgtgaccctgcaggacgtgagaggccgggactaccagaacgccatgcgggtgtggtccaacatccctggactgaaaagcaagcacgcacctctgacccctaaagaagaggagtacctgcaggcccaggtgcggagcagaagcaagctggacgcccctaaggtggatctgctggtgaagaattgcctcctgcccctgagagagtacttcaagtatttcagccagaatagtctgcccctgggaggcagcggcggcggcagccaggagcccgtgagcttcgccgacgtggccgtgtacttcagcagggaggagtgggccctgctggaccccgcccagagggtgctgtacagggacgtgatgctggagacctacgagtgcatcgccagcctggcctgccccgcccccaagcccgccgtgatcagcatgctggagggcgaggaggacccctggatccccgaggacatggccggcgacctgggccccggcgagcccgtgagggagggcggcccaagcagcggcgcccctcctcccagcggcggcagcccagccggctccccaacctctaccgaggagggcacctctgagtccgccacccccgagagcggccctggcacctccaccgagcccagcgagggcagcgcacccggcagccctgccggcagccccacctccacagaggagggaaccagcaccgagcccagcgaaggcagcgccccaggcaccagcaccgagcctagtgagcaggagattaaacggatcaacaagatcagaagaagacttgtgaaagacagcaacaccaagaaggccggcaagacaggccccatgaaaaccctgctggttagagtgatgacacccgatctgagagagcggctggaaaacctgagaaagaagcctgaaaatatcccccagcccatcagcaatacatctagagccaacctgaataagctgctgaccgattacaccgaaatgaagaaggcgatcctgcatgtgtactgggaagagttccagaaggaccctgtgggcctgatgagccgggtggcccagcctgccagcaagaagatcgatcagaacaagctgaaacctgagatggacgagaagggcaacctgaccaccgccggctttgcctgctctcagtgtggccagcccctgttcgtgtacaagctggagcaggtgtctgagaagggcaaggcttacaccaactacttcggacggtgcaatgtggccgagcacgaaaagctgatcctgctggcccagctgaagcccgagaaggatagcgacgaagccgtgacatatagcctgggaaagtttgggcagagggccctggatttctacagcattcatgtgaccaaggagtccacccaccccgtgaagcccctggcccagatcgccggaaacagatacgcctccggacctgtgggaaaggccctgagcgacgcatgtatgggcacaatcgcctccttcctgtctaagtaccaggacatcatcatcgaacaccagaaggtggtgaagggcaaccagaagagactggagagcctgcgggagctggccggcaaggaaaacctggaataccctagcgtgaccctgccacctcagcctcacaccaaggagggcgttgatgcctacaacgaagtgatcgcccgggtgcgaatgtgggtgaacctgaacctgtggcagaagctgaagctaagcagagatgatgccaagcctctgctgagactgaagggattcccttcctttcctctggtcgagagacaggccaacgaagtggactggtgggacatggtgtgtaacgtgaagaagctgatcaacgagaaaaaggaggatggcaaggtgttttggcagaatctggctggctacaagagacaggaagccctgagaccatacctgagcagcgaggaagatcggaagaagggaaagaaattcgctcggtaccagctgggcgacctgctgctgcacctggaaaagaagcacggcgaggactggggaaaggtgtacgacgaggcctgggagcggattgacaagaaagtggaaggcctgagcaagcacatcaagctggaagaggaacggagaagcgaggacgcccagagcaaggccgccctgaccgactggctgcgggctaaggccagcttcgtgatcgagggcctgaaggaggccgacaaggacgagttctgcagatgcgagctgaagctgcagaagtggtacggggacctgcggggaaagcccttcgccatcgaagccgagaacagcatcctggacatcagcggcttcagcaagcagtacaactgtgccttcatctggcagaaggacggcgtgaagaagctgaacctgtacctgatcatcaactacttcaagggcggcaagctgcggttcaagaagatcaaacctgaagccttcgaagccaacagattctacaccgtgatcaacaaaaagagcggcgagatcgtgcccatggaggtgaacttcaacttcgacgaccccaacctgatcatcctgcctctggcctttggcaagagacagggcagagaattcatctggaacgacctgctgtccctggaaaccggcagcctgaagctggccaacggaagagtgatcgagaagacactgtacaacagaagaacccggcaggatgagcctgccctgttcgtggccctgaccttcgagcggcgggaggtcctggactcctccaatatcaaaccaatgaacctgatcggcgtggcaagaggcgaaaacatccccgccgtgatcgccctgaccgaccccgagggctgcccactgagccggtttaaggatagcctgggaaacccaacccacatcctgagaatcggcgagagctataaggagaagcagcggaccatccaggccaagaaggaggtggagcagcggagagccggcggctacagccggaagtacgccagcaaagccaagaatctggcagacgatatggtgagaaacaccgctagagatctgctgtactacgccgtgacccaggatgccatgctgatcttcgccaacctgagccggggcttcggccggcagggcaagcggaccttcatggccgagagacagtacacacggatggaggactggctgaccgccaagctggcctacgagggcctgagcaagacctacctgtccaagacactggcccagtacacctccaagacatgcagcaactgtgggtttaccatcaccagcgccgactacgacagggtgctggagaagctgaagaagacagcaacaggctggatgaccacaattaacggcaaggagctgaaggtggagggccagattacctactacaacagatacaagagacagaacgtagtcaaggacctgtccgtcgagctggatagactgagcgaagaatctgtgaacaacgacatctcctcctggacaaagggcagaagcggagaagctctgagcctcctgaagaaaagattctcccatagacccgtgcaggagaagttcgtgtgcctgaactgcggcttcgagacacacgcagccgagcaagccgccctgaacatcgccagatcctggctgttcctgcggagccaggagtacaagaaataccagacaaacaagacaaccggcaacaccgataagagagccttcgtcgagacctggcagtccttttaccggaagaagcttaaggaggtgtggaaacctgccgtgcggtctggcggatctggcggaggctccaccagccccaagaaaaagagaaaagtctaagctgccttctgcggggcttgccttctggccatgcccttcttctctcccttgcacctgtacctcttggtctttgaataaagcctgagtaggaaggctagcaaaaaaaaaaaaaaaaaaaaaaaaaaaaaaaaaaaaaaaaaaaaaaaaaaaaaaaaaaaaaaaaaaaaaaaaaaaaaaaa

SEQ ID NO: 12484 - RNA, 5785 nt, synthetic construct
  source 1..5785: mol_type = other RNA
aggaaataagagagaaaagaagagtaagaagaaatataagagccaccatggcccctaagaagaagcgtaaagtgagccggatggaacgcctcgtctacgaggtgcggcagaagtgcagaaacatcgaggacatctgcatctcctgcggatctctgaacgtgaccctggagcacccactgttcatcggcggcatgtgccagaactgtaaaaactgttttctggagtgtgcctatcaatacgacgatgacggctaccagagctactgcaccatctgttgcggcggaagagaggtgctgatgtgtggaaataacaactgctgccggtgcttctgcgtggaatgcgtggacctgctggtgggccccggcgccgcccaggccgctattaaggaagatccttggaactgctacatgtgcggccacaagggcacatacggcctgctgagacggagagaggactggcctagcagactgcagatgttcttcgccaataaccacgaccaggagttcgacccccctaaggtgtaccctcccgtccccgccgagaagagaaagcccatccgggtcctgagcctgttcgatggcatcgccaccggtctgctggtgctgaaggacctgggcatccaggtggataggtacattgcctccgaggtgtgcgaggactccatcaccgtgggaatggtgcgtcatcagggcaagatcatgtacgtgggcgacgtgcggagcgtgacacagaagcatatccaggagtggggccctttcgacctggtgatcggcggcagcccttgcaatgacctgagcatcgtgaacccagcccggaagggcctgtacgagggaaccggcagactgttcttcgagttttacagactgctgcacgacgcccggcctaaggaaggcgacgaccggcccttcttttggctgttcgagaatgtggtggccatgggagtcagcgacaagcgggatattagccggttcctggagagcaaccccgtgatgatcgatgccaaggaagtgagcgccgcccaccgggccagatacttctggggcaatctgcctggcatgaacagacccctggccagcaccgtgaacgacaagctggagctgcaggagtgcctggagcacggccggatcgccaagttcagcaaggtgagaaccatcaccacccgaagcaacagcatcaaacaaggcaaggaccagcactttcctgtgttcatgaacgagaaggaggacatcctgtggtgtaccgagatggagagagtgttcgggttcccagtccactacacagatgtcagcaacatgtctagactggccagacagagactgctgggaagaagctggtccgtccctgtgatcagacacctgttcgcccctctgaaggagtacttcgcctgcgtgagcagcggcaacagcaacgccaacagccggggccccagcttctctagcggcctggtgccactgtccctgagagggagccacatgggccccatggagatctacaaaaccgtgagcgcctggaagcggcagcctgtgcgcgtgctgagcctgtttcggaatatcgataaagtcctgaaaagcctgggattcctggagagcggctctggctccggcggtggcaccctgaagtacgtggaggatgtgacaaacgtggtcagacgggatgtggagaagtggggccccttcgatctggtgtacggcagcacccaacccctgggcagctcttgtgaccggtgccctggctggtacatgtttcagttccaccggatcctgcagtacgccctgccgagacaggagtcccagcggccattcttttggattttcatggacaacttgctgctgaccgaggatgaccaggaaactaccactcggttcctgcagaccgaagccgtgaccctgcaggacgtgagaggccgggactaccagaacgccatgcgggtgtggtccaacatccctggactgaaaagcaagcacgcacctctgacccctaaagaagaggagtacctgcaggcccaggtgcggagcagaagcaagctggacgcccctaaggtggatctgctggtgaagaattgcctcctgcccctgagagagtacttcaagtatttcagccagaatagtctgcccctgggaggcagcggcggcggcttccagggcagcgtgaccttcagggacgtggccatcgacttcagccaggaggagtgggagtggctgcagcccgcccagagggacctgtacaggcacgtgatgctggagaactacggccacctggtgagcctgggcctggacatcagcaagccctacgtggtgagcctgctggagcagggcagggagccctggctggtgaagggcgacgtgaggagggaccccttcagcgtgagcgagagcaacggcggcccaagcagcggcgcccctcctcccagcggcggcagcccagccggctccccaacctctaccgaggagggcacctctgagtccgccacccccgagagcggccctggcacctccaccgagcccagcgagggcagcgcacccggcagccctgccggcagccccacctccacagaggagggaaccagcaccgagcccagcgaaggcagcgccccaggcaccagcaccgagcctagtgagcaggagattaaacggatcaacaagatcagaagaagacttgtgaaagacagcaacaccaagaaggccggcaagacaggccccatgaaaaccctgctggttagagtgatgacacccgatctgagagagcggctggaaaacctgagaaagaagcctgaaaatatcccccagcccatcagcaatacatctagagccaacctgaataagctgctgaccgattacaccgaaatgaagaaggcgatcctgcatgtgtactgggaagagttccagaaggaccctgtgggcctgatgagccgggtggcccagcctgccagcaagaagatcgatcagaacaagctgaaacctgagatggacgagaagggcaacctgaccaccgccggctttgcctgctctcagtgtggccagcccctgttcgtgtacaagctggagcaggtgtctgagaagggcaaggcttacaccaactacttcggacggtgcaatgtggccgagcacgaaaagctgatcctgctggcccagctgaagcccgagaaggatagcgacgaagccgtgacatatagcctgggaaagtttgggcagagggccctggatttctacagcattcatgtgaccaaggagtccacccaccccgtgaagcccctggcccagatcgccggaaacagatacgcctccggacctgtgggaaaggccctgagcgacgcatgtatgggcacaatcgcctccttcctgtctaagtaccaggacatcatcatcgaacaccagaaggtggtgaagggcaaccagaagagactggagagcctgcgggagctggccggcaaggaaaacctggaataccctagcgtgaccctgccacctcagcctcacaccaaggagggcgttgatgcctacaacgaagtgatcgcccgggtgcgaatgtgggtgaacctgaacctgtggcagaagctgaagctaagcagagatgatgccaagcctctgctgagactgaagggattcccttcctttcctctggtcgagagacaggccaacgaagtggactggtgggacatggtgtgtaacgtgaagaagctgatcaacgagaaaaaggaggatggcaaggtgttttggcagaatctggctggctacaagagacaggaagccctgagaccatacctgagcagcgaggaagatcggaagaagggaaagaaattcgctcggtaccagctgggcgacctgctgctgcacctggaaaagaagcacggcgaggactggggaaaggtgtacgacgaggcctgggagcggattgacaagaaagtggaaggcctgagcaagcacatcaagctggaagaggaacggagaagcgaggacgcccagagcaaggccgccctgaccgactggctgcgggctaaggccagcttcgtgatcgagggcctgaaggaggccgacaaggacgagttctgcagatgcgagctgaagctgcagaagtggtacggggacctgcggggaaagcccttcgccatcgaagccgagaacagcatcctggacatcagcggcttcagcaagcagtacaactgtgccttcatctggcagaaggacggcgtgaagaagctgaacctgtacctgatcatcaactacttcaagggcggcaagctgcggttcaagaagatcaaacctgaagccttcgaagccaacagattctacaccgtgatcaacaaaaagagcggcgagatcgtgcccatggaggtgaacttcaacttcgacgaccccaacctgatcatcctgcctctggcctttggcaagagacagggcagagaattcatctggaacgacctgctgtccctggaaaccggcagcctgaagctggccaacggaagagtgatcgagaagacactgtacaacagaagaacccggcaggatgagcctgccctgttcgtggccctgaccttcgagcggcgggaggtcctggactcctccaatatcaaaccaatgaacctgatcggcgtggcaagaggcgaaaacatccccgccgtgatcgccctgaccgaccccgagggctgcccactgagccggtttaaggatagcctgggaaacccaacccacatcctgagaatcggcgagagctataaggagaagcagcggaccatccaggccaagaaggaggtggagcagcggagagccggcggctacagccggaagtacgccagcaaagccaagaatctggcagacgatatggtgagaaacaccgctagagatctgctgtactacgccgtgacccaggatgccatgctgatcttcgccaacctgagccggggcttcggccggcagggcaagcggaccttcatggccgagagacagtacacacggatggaggactggctgaccgccaagctggcctacgagggcctgagcaagacctacctgtccaagacactggcccagtacacctccaagacatgcagcaactgtgggtttaccatcaccagcgccgactacgacagggtgctggagaagctgaagaagacagcaacaggctggatgaccacaattaacggcaaggagctgaaggtggagggccagattacctactacaacagatacaagagacagaacgtagtcaaggacctgtccgtcgagctggatagactgagcgaagaatctgtgaacaacgacatctcctcctggacaaagggcagaagcggagaagctctgagcctcctgaagaaaagattctcccatagacccgtgcaggagaagttcgtgtgcctgaactgcggcttcgagacacacgcagccgagcaagccgccctgaacatcgccagatcctggctgttcctgcggagccaggagtacaagaaataccagacaaacaagacaaccggcaacaccgataagagagccttcgtcgagacctggcagtccttttaccggaagaagcttaaggaggtgtggaaacctgccgtgcggtctggcggatctggcggaggctccaccagccccaagaaaaagagaaaagtctaagctgccttctgcggggcttgccttctggccatgcccttcttctctcccttgcacctgtacctcttggtctttgaataaagcctgagtaggaaggctagcaaaaaaaaaaaaaaaaaaaaaaaaaaaaaaaaaaaaaaaaaaaaaaaaaaaaaaaaaaaaaaaaaaaaaaaaaaaaaaaa

SEQ ID NO: 12485 - RNA, 5785 nt, synthetic construct
  source 1..5785: mol_type = other RNA
aggaaataagagagaaaagaagagtaagaagaaatataagagccaccatggcccctaagaagaagcgtaaagtgagccggatggaacgcctcgtctacgaggtgcggcagaagtgcagaaacatcgaggacatctgcatctcctgcggatctctgaacgtgaccctggagcacccactgttcatcggcggcatgtgccagaactgtaaaaactgttttctggagtgtgcctatcaatacgacgatgacggctaccagagctactgcaccatctgttgcggcggaagagaggtgctgatgtgtggaaataacaactgctgccggtgcttctgcgtggaatgcgtggacctgctggtgggccccggcgccgcccaggccgctattaaggaagatccttggaactgctacatgtgcggccacaagggcacatacggcctgctgagacggagagaggactggcctagcagactgcagatgttcttcgccaataaccacgaccaggagttcgacccccctaaggtgtaccctcccgtccccgccgagaagagaaagcccatccgggtcctgagcctgttcgatggcatcgccaccggtctgctggtgctgaaggacctgggcatccaggtggataggtacattgcctccgaggtgtgcgaggactccatcaccgtgggaatggtgcgtcatcagggcaagatcatgtacgtgggcgacgtgcggagcgtgacacagaagcatatccaggagtggggccctttcgacctggtgatcggcggcagcccttgcaatgacctgagcatcgtgaacccagcccggaagggcctgtacgagggaaccggcagactgttcttcgagttttacagactgctgcacgacgcccggcctaaggaaggcgacgaccggcccttcttttggctgttcgagaatgtggtggccatgggagtcagcgacaagcgggatattagccggttcctggagagcaaccccgtgatgatcgatgccaaggaagtgagcgccgcccaccgggccagatacttctggggcaatctgcctggcatgaacagacccctggccagcaccgtgaacgacaagctggagctgcaggagtgcctggagcacggccggatcgccaagttcagcaaggtgagaaccatcaccacccgaagcaacagcatcaaacaaggcaaggaccagcactttcctgtgttcatgaacgagaaggaggacatcctgtggtgtaccgagatggagagagtgttcgggttcccagtccactacacagatgtcagcaacatgtctagactggccagacagagactgctgggaagaagctggtccgtccctgtgatcagacacctgttcgcccctctgaaggagtacttcgcctgcgtgagcagcggcaacagcaacgccaacagccggggccccagcttctctagcggcctggtgccactgtccctgagagggagccacatgggccccatggagatctacaaaaccgtgagcgcctggaagcggcagcctgtgcgcgtgctgagcctgtttcggaatatcgataaagtcctgaaaagcctgggattcctggagagcggctctggctccggcggtggcaccctgaagtacgtggaggatgtgacaaacgtggtcagacgggatgtggagaagtggggccccttcgatctggtgtacggcagcacccaacccctgggcagctcttgtgaccggtgccctggctggtacatgtttcagttccaccggatcctgcagtacgccctgccgagacaggagtcccagcggccattcttttggattttcatggacaacttgctgctgaccgaggatgaccaggaaactaccactcggttcctgcagaccgaagccgtgaccctgcaggacgtgagaggccgggactaccagaacgccatgcgggtgtggtccaacatccctggactgaaaagcaagcacgcacctctgacccctaaagaagaggagtacctgcaggcccaggtgcggagcagaagcaagctggacgcccctaaggtggatctgctggtgaagaattgcctcctgcccctgagagagtacttcaagtatttcagccagaatagtctgcccctgggaggcagcggcggcggcagccagggcctggtgaccttcggcgacgtggccgtggtgttcagccaggaggagtgggagtggctgagcagcgagcagaggagcctgtactggagggtgatgctggacaactacaggaacctggccagcctgggcctgtgcgccagcaagcccgacatgatcgccctgctggagcagggcaaggacccctgcgtgctgaagaggaagaccgccaggggcctgaggcccgacctggaggccgtgggcggcccaagcagcggcgcccctcctcccagcggcggcagcccagccggctccccaacctctaccgaggagggcacctctgagtccgccacccccgagagcggccctggcacctccaccgagcccagcgagggcagcgcacccggcagccctgccggcagccccacctccacagaggagggaaccagcaccgagcccagcgaaggcagcgccccaggcaccagcaccgagcctagtgagcaggagattaaacggatcaacaagatcagaagaagacttgtgaaagacagcaacaccaagaaggccggcaagacaggccccatgaaaaccctgctggttagagtgatgacacccgatctgagagagcggctggaaaacctgagaaagaagcctgaaaatatcccccagcccatcagcaatacatctagagccaacctgaataagctgctgaccgattacaccgaaatgaagaaggcgatcctgcatgtgtactgggaagagttccagaaggaccctgtgggcctgatgagccgggtggcccagcctgccagcaagaagatcgatcagaacaagctgaaacctgagatggacgagaagggcaacctgaccaccgccggctttgcctgctctcagtgtggccagcccctgttcgtgtacaagctggagcaggtgtctgagaagggcaaggcttacaccaactacttcggacggtgcaatgtggccgagcacgaaaagctgatcctgctggcccagctgaagcccgagaaggatagcgacgaagccgtgacatatagcctgggaaagtttgggcagagggccctggatttctacagcattcatgtgaccaaggagtccacccaccccgtgaagcccctggcccagatcgccggaaacagatacgcctccggacctgtgggaaaggccctgagcgacgcatgtatgggcacaatcgcctccttcctgtctaagtaccaggacatcatcatcgaacaccagaaggtggtgaagggcaaccagaagagactggagagcctgcgggagctggccggcaaggaaaacctggaataccctagcgtgaccctgccacctcagcctcacaccaaggagggcgttgatgcctacaacgaagtgatcgcccgggtgcgaatgtgggtgaacctgaacctgtggcagaagctgaagctaagcagagatgatgccaagcctctgctgagactgaagggattcccttcctttcctctggtcgagagacaggccaacgaagtggactggtgggacatggtgtgtaacgtgaagaagctgatcaacgagaaaaaggaggatggcaaggtgttttggcagaatctggctggctacaagagacaggaagccctgagaccatacctgagcagcgaggaagatcggaagaagggaaagaaattcgctcggtaccagctgggcgacctgctgctgcacctggaaaagaagcacggcgaggactggggaaaggtgtacgacgaggcctgggagcggattgacaagaaagtggaaggcctgagcaagcacatcaagctggaagaggaacggagaagcgaggacgcccagagcaaggccgccctgaccgactggctgcgggctaaggccagcttcgtgatcgagggcctgaaggaggccgacaaggacgagttctgcagatgcgagctgaagctgcagaagtggtacggggacctgcggggaaagcccttcgccatcgaagccgagaacagcatcctggacatcagcggcttcagcaagcagtacaactgtgccttcatctggcagaaggacggcgtgaagaagctgaacctgtacctgatcatcaactacttcaagggcggcaagctgcggttcaagaagatcaaacctgaagccttcgaagccaacagattctacaccgtgatcaacaaaaagagcggcgagatcgtgcccatggaggtgaacttcaacttcgacgaccccaacctgatcatcctgcctctggcctttggcaagagacagggcagagaattcatctggaacgacctgctgtccctggaaaccggcagcctgaagctggccaacggaagagtgatcgagaagacactgtacaacagaagaacccggcaggatgagcctgccctgttcgtggccctgaccttcgagcggcgggaggtcctggactcctccaatatcaaaccaatgaacctgatcggcgtggcaagaggcgaaaacatccccgccgtgatcgccctgaccgaccccgagggctgcccactgagccggtttaaggatagcctgggaaacccaacccacatcctgagaatcggcgagagctataaggagaagcagcggaccatccaggccaagaaggaggtggagcagcggagagccggcggctacagccggaagtacgccagcaaagccaagaatctggcagacgatatggtgagaaacaccgctagagatctgctgtactacgccgtgacccaggatgccatgctgatcttcgccaacctgagccggggcttcggccggcagggcaagcggaccttcatggccgagagacagtacacacggatggaggactggctgaccgccaagctggcctacgagggcctgagcaagacctacctgtccaagacactggcccagtacacctccaagacatgcagcaactgtgggtttaccatcaccagcgccgactacgacagggtgctggagaagctgaagaagacagcaacaggctggatgaccacaattaacggcaaggagctgaaggtggagggccagattacctactacaacagatacaagagacagaacgtagtcaaggacctgtccgtcgagctggatagactgagcgaagaatctgtgaacaacgacatctcctcctggacaaagggcagaagcggagaagctctgagcctcctgaagaaaagattctcccatagacccgtgcaggagaagttcgtgtgcctgaactgcggcttcgagacacacgcagccgagcaagccgccctgaacatcgccagatcctggctgttcctgcggagccaggagtacaagaaataccagacaaacaagacaaccggcaacaccgataagagagccttcgtcgagacctggcagtccttttaccggaagaagcttaaggaggtgtggaaacctgccgtgcggtctggcggatctggcggaggctccaccagccccaagaaaaagagaaaagtctaagctgccttctgcggggcttgccttctggccatgcccttcttctctcccttgcacctgtacctcttggtctttgaataaagcctgagtaggaaggctagcaaaaaaaaaaaaaaaaaaaaaaaaaaaaaaaaaaaaaaaaaaaaaaaaaaaaaaaaaaaaaaaaaaaaaaaaaaaaaaaa

SEQ ID NO: 12486 - RNA, 5785 nt, synthetic construct
  source 1..5785: mol_type = other RNA
aggaaataagagagaaaagaagagtaagaagaaatataagagccaccatggcccctaagaagaagcgtaaagtgagccggatggaacgcctcgtctacgaggtgcggcagaagtgcagaaacatcgaggacatctgcatctcctgcggatctctgaacgtgaccctggagcacccactgttcatcggcggcatgtgccagaactgtaaaaactgttttctggagtgtgcctatcaatacgacgatgacggctaccagagctactgcaccatctgttgcggcggaagagaggtgctgatgtgtggaaataacaactgctgccggtgcttctgcgtggaatgcgtggacctgctggtgggccccggcgccgcccaggccgctattaaggaagatccttggaactgctacatgtgcggccacaagggcacatacggcctgctgagacggagagaggactggcctagcagactgcagatgttcttcgccaataaccacgaccaggagttcgacccccctaaggtgtaccctcccgtccccgccgagaagagaaagcccatccgggtcctgagcctgttcgatggcatcgccaccggtctgctggtgctgaaggacctgggcatccaggtggataggtacattgcctccgaggtgtgcgaggactccatcaccgtgggaatggtgcgtcatcagggcaagatcatgtacgtgggcgacgtgcggagcgtgacacagaagcatatccaggagtggggccctttcgacctggtgatcggcggcagcccttgcaatgacctgagcatcgtgaacccagcccggaagggcctgtacgagggaaccggcagactgttcttcgagttttacagactgctgcacgacgcccggcctaaggaaggcgacgaccggcccttcttttggctgttcgagaatgtggtggccatgggagtcagcgacaagcgggatattagccggttcctggagagcaaccccgtgatgatcgatgccaaggaagtgagcgccgcccaccgggccagatacttctggggcaatctgcctggcatgaacagacccctggccagcaccgtgaacgacaagctggagctgcaggagtgcctggagcacggccggatcgccaagttcagcaaggtgagaaccatcaccacccgaagcaacagcatcaaacaaggcaaggaccagcactttcctgtgttcatgaacgagaaggaggacatcctgtggtgtaccgagatggagagagtgttcgggttcccagtccactacacagatgtcagcaacatgtctagactggccagacagagactgctgggaagaagctggtccgtccctgtgatcagacacctgttcgcccctctgaaggagtacttcgcctgcgtgagcagcggcaacagcaacgccaacagccggggccccagcttctctagcggcctggtgccactgtccctgagagggagccacatgggccccatggagatctacaaaaccgtgagcgcctggaagcggcagcctgtgcgcgtgctgagcctgtttcggaatatcgataaagtcctgaaaagcctgggattcctggagagcggctctggctccggcggtggcaccctgaagtacgtggaggatgtgacaaacgtggtcagacgggatgtggagaagtggggccccttcgatctggtgtacggcagcacccaacccctgggcagctcttgtgaccggtgccctggctggtacatgtttcagttccaccggatcctgcagtacgccctgccgagacaggagtcccagcggccattcttttggattttcatggacaacttgctgctgaccgaggatgaccaggaaactaccactcggttcctgcagaccgaagccgtgaccctgcaggacgtgagaggccgggactaccagaacgccatgcgggtgtggtccaacatccctggactgaaaagcaagcacgcacctctgacccctaaagaagaggagtacctgcaggcccaggtgcggagcagaagcaagctggacgcccctaaggtggatctgctggtgaagaattgcctcctgcccctgagagagtacttcaagtatttcagccagaatagtctgcccctgggaggcagcggcggcggcatgctgcagaccgcctggaggcaggagcccgtgaccttcgaggacgtggccgtgtacttcacccagaacgagtgggccagcctggacagcgtgcagagggccctgtacagggaggtgatgctggagaactacgccaacgtggccagcctggccttccccttcaccacccccgtgctggtgagccagctggagcagggcgagctgccctggggcctggacccctgggagcccatgggcagggagggcggcccaagcagcggcgcccctcctcccagcggcggcagcccagccggctccccaacctctaccgaggagggcacctctgagtccgccacccccgagagcggccctggcacctccaccgagcccagcgagggcagcgcacccggcagccctgccggcagccccacctccacagaggagggaaccagcaccgagcccagcgaaggcagcgccccaggcaccagcaccgagcctagtgagcaggagattaaacggatcaacaagatcagaagaagacttgtgaaagacagcaacaccaagaaggccggcaagacaggccccatgaaaaccctgctggttagagtgatgacacccgatctgagagagcggctggaaaacctgagaaagaagcctgaaaatatcccccagcccatcagcaatacatctagagccaacctgaataagctgctgaccgattacaccgaaatgaagaaggcgatcctgcatgtgtactgggaagagttccagaaggaccctgtgggcctgatgagccgggtggcccagcctgccagcaagaagatcgatcagaacaagctgaaacctgagatggacgagaagggcaacctgaccaccgccggctttgcctgctctcagtgtggccagcccctgttcgtgtacaagctggagcaggtgtctgagaagggcaaggcttacaccaactacttcggacggtgcaatgtggccgagcacgaaaagctgatcctgctggcccagctgaagcccgagaaggatagcgacgaagccgtgacatatagcctgggaaagtttgggcagagggccctggatttctacagcattcatgtgaccaaggagtccacccaccccgtgaagcccctggcccagatcgccggaaacagatacgcctccggacctgtgggaaaggccctgagcgacgcatgtatgggcacaatcgcctccttcctgtctaagtaccaggacatcatcatcgaacaccagaaggtggtgaagggcaaccagaagagactggagagcctgcgggagctggccggcaaggaaaacctggaataccctagcgtgaccctgccacctcagcctcacaccaaggagggcgttgatgcctacaacgaagtgatcgcccgggtgcgaatgtgggtgaacctgaacctgtggcagaagctgaagctaagcagagatgatgccaagcctctgctgagactgaagggattcccttcctttcctctggtcgagagacaggccaacgaagtggactggtgggacatggtgtgtaacgtgaagaagctgatcaacgagaaaaaggaggatggcaaggtgttttggcagaatctggctggctacaagagacaggaagccctgagaccatacctgagcagcgaggaagatcggaagaagggaaagaaattcgctcggtaccagctgggcgacctgctgctgcacctggaaaagaagcacggcgaggactggggaaaggtgtacgacgaggcctgggagcggattgacaagaaagtggaaggcctgagcaagcacatcaagctggaagaggaacggagaagcgaggacgcccagagcaaggccgccctgaccgactggctgcgggctaaggccagcttcgtgatcgagggcctgaaggaggccgacaaggacgagttctgcagatgcgagctgaagctgcagaagtggtacggggacctgcggggaaagcccttcgccatcgaagccgagaacagcatcctggacatcagcggcttcagcaagcagtacaactgtgccttcatctggcagaaggacggcgtgaagaagctgaacctgtacctgatcatcaactacttcaagggcggcaagctgcggttcaagaagatcaaacctgaagccttcgaagccaacagattctacaccgtgatcaacaaaaagagcggcgagatcgtgcccatggaggtgaacttcaacttcgacgaccccaacctgatcatcctgcctctggcctttggcaagagacagggcagagaattcatctggaacgacctgctgtccctggaaaccggcagcctgaagctggccaacggaagagtgatcgagaagacactgtacaacagaagaacccggcaggatgagcctgccctgttcgtggccctgaccttcgagcggcgggaggtcctggactcctccaatatcaaaccaatgaacctgatcggcgtggcaagaggcgaaaacatccccgccgtgatcgccctgaccgaccccgagggctgcccactgagccggtttaaggatagcctgggaaacccaacccacatcctgagaatcggcgagagctataaggagaagcagcggaccatccaggccaagaaggaggtggagcagcggagagccggcggctacagccggaagtacgccagcaaagccaagaatctggcagacgatatggtgagaaacaccgctagagatctgctgtactacgccgtgacccaggatgccatgctgatcttcgccaacctgagccggggcttcggccggcagggcaagcggaccttcatggccgagagacagtacacacggatggaggactggctgaccgccaagctggcctacgagggcctgagcaagacctacctgtccaagacactggcccagtacacctccaagacatgcagcaactgtgggtttaccatcaccagcgccgactacgacagggtgctggagaagctgaagaagacagcaacaggctggatgaccacaattaacggcaaggagctgaaggtggagggccagattacctactacaacagatacaagagacagaacgtagtcaaggacctgtccgtcgagctggatagactgagcgaagaatctgtgaacaacgacatctcctcctggacaaagggcagaagcggagaagctctgagcctcctgaagaaaagattctcccatagacccgtgcaggagaagttcgtgtgcctgaactgcggcttcgagacacacgcagccgagcaagccgccctgaacatcgccagatcctggctgttcctgcggagccaggagtacaagaaataccagacaaacaagacaaccggcaacaccgataagagagccttcgtcgagacctggcagtccttttaccggaagaagcttaaggaggtgtggaaacctgccgtgcggtctggcggatctggcggaggctccaccagccccaagaaaaagagaaaagtctaagctgccttctgcggggcttgccttctggccatgcccttcttctctcccttgcacctgtacctcttggtctttgaataaagcctgagtaggaaggctagcaaaaaaaaaaaaaaaaaaaaaaaaaaaaaaaaaaaaaaaaaaaaaaaaaaaaaaaaaaaaaaaaaaaaaaaaaaaaaaaa

SEQ ID NO: 12487 - RNA, 5785 nt, synthetic construct
  source 1..5785: mol_type = other RNA
aggaaataagagagaaaagaagagtaagaagaaatataagagccaccatggcccctaagaagaagcgtaaagtgagccggatggaacgcctcgtctacgaggtgcggcagaagtgcagaaacatcgaggacatctgcatctcctgcggatctctgaacgtgaccctggagcacccactgttcatcggcggcatgtgccagaactgtaaaaactgttttctggagtgtgcctatcaatacgacgatgacggctaccagagctactgcaccatctgttgcggcggaagagaggtgctgatgtgtggaaataacaactgctgccggtgcttctgcgtggaatgcgtggacctgctggtgggccccggcgccgcccaggccgctattaaggaagatccttggaactgctacatgtgcggccacaagggcacatacggcctgctgagacggagagaggactggcctagcagactgcagatgttcttcgccaataaccacgaccaggagttcgacccccctaaggtgtaccctcccgtccccgccgagaagagaaagcccatccgggtcctgagcctgttcgatggcatcgccaccggtctgctggtgctgaaggacctgggcatccaggtggataggtacattgcctccgaggtgtgcgaggactccatcaccgtgggaatggtgcgtcatcagggcaagatcatgtacgtgggcgacgtgcggagcgtgacacagaagcatatccaggagtggggccctttcgacctggtgatcggcggcagcccttgcaatgacctgagcatcgtgaacccagcccggaagggcctgtacgagggaaccggcagactgttcttcgagttttacagactgctgcacgacgcccggcctaaggaaggcgacgaccggcccttcttttggctgttcgagaatgtggtggccatgggagtcagcgacaagcgggatattagccggttcctggagagcaaccccgtgatgatcgatgccaaggaagtgagcgccgcccaccgggccagatacttctggggcaatctgcctggcatgaacagacccctggccagcaccgtgaacgacaagctggagctgcaggagtgcctggagcacggccggatcgccaagttcagcaaggtgagaaccatcaccacccgaagcaacagcatcaaacaaggcaaggaccagcactttcctgtgttcatgaacgagaaggaggacatcctgtggtgtaccgagatggagagagtgttcgggttcccagtccactacacagatgtcagcaacatgtctagactggccagacagagactgctgggaagaagctggtccgtccctgtgatcagacacctgttcgcccctctgaaggagtacttcgcctgcgtgagcagcggcaacagcaacgccaacagccggggccccagcttctctagcggcctggtgccactgtccctgagagggagccacatgggccccatggagatctacaaaaccgtgagcgcctggaagcggcagcctgtgcgcgtgctgagcctgtttcggaatatcgataaagtcctgaaaagcctgggattcctggagagcggctctggctccggcggtggcaccctgaagtacgtggaggatgtgacaaacgtggtcagacgggatgtggagaagtggggccccttcgatctggtgtacggcagcacccaacccctgggcagctcttgtgaccggtgccctggctggtacatgtttcagttccaccggatcctgcagtacgccctgccgagacaggagtcccagcggccattcttttggattttcatggacaacttgctgctgaccgaggatgaccaggaaactaccactcggttcctgcagaccgaagccgtgaccctgcaggacgtgagaggccgggactaccagaacgccatgcgggtgtggtccaacatccctggactgaaaagcaagcacgcacctctgacccctaaagaagaggagtacctgcaggcccaggtgcggagcagaagcaagctggacgcccctaaggtggatctgctggtgaagaattgcctcctgcccctgagagagtacttcaagtatttcagccagaatagtctgcccctgggaggcagcggcggcggcaggcccagggccgtgaagttcgccgacgtggccgtgtacttcagcaccgaggagtggggctgcctgaggcccgcccagagggccctgtacagggacgtgatgagggagacctacggccacctgggcgccctgggctgcgccggccccaagcccgccctgatcagctggctggagaggaacaccgacgactgggagcccgccgccctggacccccaggagtgccccaagagggtgaccgtgcagggcggcccaagcagcggcgcccctcctcccagcggcggcagcccagccggctccccaacctctaccgaggagggcacctctgagtccgccacccccgagagcggccctggcacctccaccgagcccagcgagggcagcgcacccggcagccctgccggcagccccacctccacagaggagggaaccagcaccgagcccagcgaaggcagcgccccaggcaccagcaccgagcctagtgagcaggagattaaacggatcaacaagatcagaagaagacttgtgaaagacagcaacaccaagaaggccggcaagacaggccccatgaaaaccctgctggttagagtgatgacacccgatctgagagagcggctggaaaacctgagaaagaagcctgaaaatatcccccagcccatcagcaatacatctagagccaacctgaataagctgctgaccgattacaccgaaatgaagaaggcgatcctgcatgtgtactgggaagagttccagaaggaccctgtgggcctgatgagccgggtggcccagcctgccagcaagaagatcgatcagaacaagctgaaacctgagatggacgagaagggcaacctgaccaccgccggctttgcctgctctcagtgtggccagcccctgttcgtgtacaagctggagcaggtgtctgagaagggcaaggcttacaccaactacttcggacggtgcaatgtggccgagcacgaaaagctgatcctgctggcccagctgaagcccgagaaggatagcgacgaagccgtgacatatagcctgggaaagtttgggcagagggccctggatttctacagcattcatgtgaccaaggagtccacccaccccgtgaagcccctggcccagatcgccggaaacagatacgcctccggacctgtgggaaaggccctgagcgacgcatgtatgggcacaatcgcctccttcctgtctaagtaccaggacatcatcatcgaacaccagaaggtggtgaagggcaaccagaagagactggagagcctgcgggagctggccggcaaggaaaacctggaataccctagcgtgaccctgccacctcagcctcacaccaaggagggcgttgatgcctacaacgaagtgatcgcccgggtgcgaatgtgggtgaacctgaacctgtggcagaagctgaagctaagcagagatgatgccaagcctctgctgagactgaagggattcccttcctttcctctggtcgagagacaggccaacgaagtggactggtgggacatggtgtgtaacgtgaagaagctgatcaacgagaaaaaggaggatggcaaggtgttttggcagaatctggctggctacaagagacaggaagccctgagaccatacctgagcagcgaggaagatcggaagaagggaaagaaattcgctcggtaccagctgggcgacctgctgctgcacctggaaaagaagcacggcgaggactggggaaaggtgtacgacgaggcctgggagcggattgacaagaaagtggaaggcctgagcaagcacatcaagctggaagaggaacggagaagcgaggacgcccagagcaaggccgccctgaccgactggctgcgggctaaggccagcttcgtgatcgagggcctgaaggaggccgacaaggacgagttctgcagatgcgagctgaagctgcagaagtggtacggggacctgcggggaaagcccttcgccatcgaagccgagaacagcatcctggacatcagcggcttcagcaagcagtacaactgtgccttcatctggcagaaggacggcgtgaagaagctgaacctgtacctgatcatcaactacttcaagggcggcaagctgcggttcaagaagatcaaacctgaagccttcgaagccaacagattctacaccgtgatcaacaaaaagagcggcgagatcgtgcccatggaggtgaacttcaacttcgacgaccccaacctgatcatcctgcctctggcctttggcaagagacagggcagagaattcatctggaacgacctgctgtccctggaaaccggcagcctgaagctggccaacggaagagtgatcgagaagacactgtacaacagaagaacccggcaggatgagcctgccctgttcgtggccctgaccttcgagcggcgggaggtcctggactcctccaatatcaaaccaatgaacctgatcggcgtggcaagaggcgaaaacatccccgccgtgatcgccctgaccgaccccgagggctgcccactgagccggtttaaggatagcctgggaaacccaacccacatcctgagaatcggcgagagctataaggagaagcagcggaccatccaggccaagaaggaggtggagcagcggagagccggcggctacagccggaagtacgccagcaaagccaagaatctggcagacgatatggtgagaaacaccgctagagatctgctgtactacgccgtgacccaggatgccatgctgatcttcgccaacctgagccggggcttcggccggcagggcaagcggaccttcatggccgagagacagtacacacggatggaggactggctgaccgccaagctggcctacgagggcctgagcaagacctacctgtccaagacactggcccagtacacctccaagacatgcagcaactgtgggtttaccatcaccagcgccgactacgacagggtgctggagaagctgaagaagacagcaacaggctggatgaccacaattaacggcaaggagctgaaggtggagggccagattacctactacaacagatacaagagacagaacgtagtcaaggacctgtccgtcgagctggatagactgagcgaagaatctgtgaacaacgacatctcctcctggacaaagggcagaagcggagaagctctgagcctcctgaagaaaagattctcccatagacccgtgcaggagaagttcgtgtgcctgaactgcggcttcgagacacacgcagccgagcaagccgccctgaacatcgccagatcctggctgttcctgcggagccaggagtacaagaaataccagacaaacaagacaaccggcaacaccgataagagagccttcgtcgagacctggcagtccttttaccggaagaagcttaaggaggtgtggaaacctgccgtgcggtctggcggatctggcggaggctccaccagccccaagaaaaagagaaaagtctaagctgccttctgcggggcttgccttctggccatgcccttcttctctcccttgcacctgtacctcttggtctttgaataaagcctgagtaggaaggctagcaaaaaaaaaaaaaaaaaaaaaaaaaaaaaaaaaaaaaaaaaaaaaaaaaaaaaaaaaaaaaaaaaaaaaaaaaaaaaaaa

SEQ ID NO: 12488 - RNA, 5785 nt, synthetic construct
  source 1..5785: mol_type = other RNA
aggaaataagagagaaaagaagagtaagaagaaatataagagccaccatggcccctaagaagaagcgtaaagtgagccggatggaacgcctcgtctacgaggtgcggcagaagtgcagaaacatcgaggacatctgcatctcctgcggatctctgaacgtgaccctggagcacccactgttcatcggcggcatgtgccagaactgtaaaaactgttttctggagtgtgcctatcaatacgacgatgacggctaccagagctactgcaccatctgttgcggcggaagagaggtgctgatgtgtggaaataacaactgctgccggtgcttctgcgtggaatgcgtggacctgctggtgggccccggcgccgcccaggccgctattaaggaagatccttggaactgctacatgtgcggccacaagggcacatacggcctgctgagacggagagaggactggcctagcagactgcagatgttcttcgccaataaccacgaccaggagttcgacccccctaaggtgtaccctcccgtccccgccgagaagagaaagcccatccgggtcctgagcctgttcgatggcatcgccaccggtctgctggtgctgaaggacctgggcatccaggtggataggtacattgcctccgaggtgtgcgaggactccatcaccgtgggaatggtgcgtcatcagggcaagatcatgtacgtgggcgacgtgcggagcgtgacacagaagcatatccaggagtggggccctttcgacctggtgatcggcggcagcccttgcaatgacctgagcatcgtgaacccagcccggaagggcctgtacgagggaaccggcagactgttcttcgagttttacagactgctgcacgacgcccggcctaaggaaggcgacgaccggcccttcttttggctgttcgagaatgtggtggccatgggagtcagcgacaagcgggatattagccggttcctggagagcaaccccgtgatgatcgatgccaaggaagtgagcgccgcccaccgggccagatacttctggggcaatctgcctggcatgaacagacccctggccagcaccgtgaacgacaagctggagctgcaggagtgcctggagcacggccggatcgccaagttcagcaaggtgagaaccatcaccacccgaagcaacagcatcaaacaaggcaaggaccagcactttcctgtgttcatgaacgagaaggaggacatcctgtggtgtaccgagatggagagagtgttcgggttcccagtccactacacagatgtcagcaacatgtctagactggccagacagagactgctgggaagaagctggtccgtccctgtgatcagacacctgttcgcccctctgaaggagtacttcgcctgcgtgagcagcggcaacagcaacgccaacagccggggccccagcttctctagcggcctggtgccactgtccctgagagggagccacatgggccccatggagatctacaaaaccgtgagcgcctggaagcggcagcctgtgcgcgtgctgagcctgtttcggaatatcgataaagtcctgaaaagcctgggattcctggagagcggctctggctccggcggtggcaccctgaagtacgtggaggatgtgacaaacgtggtcagacgggatgtggagaagtggggccccttcgatctggtgtacggcagcacccaacccctgggcagctcttgtgaccggtgccctggctggtacatgtttcagttccaccggatcctgcagtacgccctgccgagacaggagtcccagcggccattcttttggattttcatggacaacttgctgctgaccgaggatgaccaggaaactaccactcggttcctgcagaccgaagccgtgaccctgcaggacgtgagaggccgggactaccagaacgccatgcgggtgtggtccaacatccctggactgaaaagcaagcacgcacctctgacccctaaagaagaggagtacctgcaggcccaggtgcggagcagaagcaagctggacgcccctaaggtggatctgctggtgaagaattgcctcctgcccctgagagagtacttcaagtatttcagccagaatagtctgcccctgggaggcagcggcggcggcttccaggaggccgtgaccttcaacgacgtggccgtggtgttcagcgaggaggagctgggcctgctggacagcacccagaggaagctgtacagggacgtgatgctggagaacttcaggaacctggtgagcctgggccacagcagcagcaagcccgacatgatcagccagctggagagggaggaggagaagctgtgcatgaaggagatcaggaccgagaggggcggcaggaaccccaacgaggccggcggcccaagcagcggcgcccctcctcccagcggcggcagcccagccggctccccaacctctaccgaggagggcacctctgagtccgccacccccgagagcggccctggcacctccaccgagcccagcgagggcagcgcacccggcagccctgccggcagccccacctccacagaggagggaaccagcaccgagcccagcgaaggcagcgccccaggcaccagcaccgagcctagtgagcaggagattaaacggatcaacaagatcagaagaagacttgtgaaagacagcaacaccaagaaggccggcaagacaggccccatgaaaaccctgctggttagagtgatgacacccgatctgagagagcggctggaaaacctgagaaagaagcctgaaaatatcccccagcccatcagcaatacatctagagccaacctgaataagctgctgaccgattacaccgaaatgaagaaggcgatcctgcatgtgtactgggaagagttccagaaggaccctgtgggcctgatgagccgggtggcccagcctgccagcaagaagatcgatcagaacaagctgaaacctgagatggacgagaagggcaacctgaccaccgccggctttgcctgctctcagtgtggccagcccctgttcgtgtacaagctggagcaggtgtctgagaagggcaaggcttacaccaactacttcggacggtgcaatgtggccgagcacgaaaagctgatcctgctggcccagctgaagcccgagaaggatagcgacgaagccgtgacatatagcctgggaaagtttgggcagagggccctggatttctacagcattcatgtgaccaaggagtccacccaccccgtgaagcccctggcccagatcgccggaaacagatacgcctccggacctgtgggaaaggccctgagcgacgcatgtatgggcacaatcgcctccttcctgtctaagtaccaggacatcatcatcgaacaccagaaggtggtgaagggcaaccagaagagactggagagcctgcgggagctggccggcaaggaaaacctggaataccctagcgtgaccctgccacctcagcctcacaccaaggagggcgttgatgcctacaacgaagtgatcgcccgggtgcgaatgtgggtgaacctgaacctgtggcagaagctgaagctaagcagagatgatgccaagcctctgctgagactgaagggattcccttcctttcctctggtcgagagacaggccaacgaagtggactggtgggacatggtgtgtaacgtgaagaagctgatcaacgagaaaaaggaggatggcaaggtgttttggcagaatctggctggctacaagagacaggaagccctgagaccatacctgagcagcgaggaagatcggaagaagggaaagaaattcgctcggtaccagctgggcgacctgctgctgcacctggaaaagaagcacggcgaggactggggaaaggtgtacgacgaggcctgggagcggattgacaagaaagtggaaggcctgagcaagcacatcaagctggaagaggaacggagaagcgaggacgcccagagcaaggccgccctgaccgactggctgcgggctaaggccagcttcgtgatcgagggcctgaaggaggccgacaaggacgagttctgcagatgcgagctgaagctgcagaagtggtacggggacctgcggggaaagcccttcgccatcgaagccgagaacagcatcctggacatcagcggcttcagcaagcagtacaactgtgccttcatctggcagaaggacggcgtgaagaagctgaacctgtacctgatcatcaactacttcaagggcggcaagctgcggttcaagaagatcaaacctgaagccttcgaagccaacagattctacaccgtgatcaacaaaaagagcggcgagatcgtgcccatggaggtgaacttcaacttcgacgaccccaacctgatcatcctgcctctggcctttggcaagagacagggcagagaattcatctggaacgacctgctgtccctggaaaccggcagcctgaagctggccaacggaagagtgatcgagaagacactgtacaacagaagaacccggcaggatgagcctgccctgttcgtggccctgaccttcgagcggcgggaggtcctggactcctccaatatcaaaccaatgaacctgatcggcgtggcaagaggcgaaaacatccccgccgtgatcgccctgaccgaccccgagggctgcccactgagccggtttaaggatagcctgggaaacccaacccacatcctgagaatcggcgagagctataaggagaagcagcggaccatccaggccaagaaggaggtggagcagcggagagccggcggctacagccggaagtacgccagcaaagccaagaatctggcagacgatatggtgagaaacaccgctagagatctgctgtactacgccgtgacccaggatgccatgctgatcttcgccaacctgagccggggcttcggccggcagggcaagcggaccttcatggccgagagacagtacacacggatggaggactggctgaccgccaagctggcctacgagggcctgagcaagacctacctgtccaagacactggcccagtacacctccaagacatgcagcaactgtgggtttaccatcaccagcgccgactacgacagggtgctggagaagctgaagaagacagcaacaggctggatgaccacaattaacggcaaggagctgaaggtggagggccagattacctactacaacagatacaagagacagaacgtagtcaaggacctgtccgtcgagctggatagactgagcgaagaatctgtgaacaacgacatctcctcctggacaaagggcagaagcggagaagctctgagcctcctgaagaaaagattctcccatagacccgtgcaggagaagttcgtgtgcctgaactgcggcttcgagacacacgcagccgagcaagccgccctgaacatcgccagatcctggctgttcctgcggagccaggagtacaagaaataccagacaaacaagacaaccggcaacaccgataagagagccttcgtcgagacctggcagtccttttaccggaagaagcttaaggaggtgtggaaacctgccgtgcggtctggcggatctggcggaggctccaccagccccaagaaaaagagaaaagtctaagctgccttctgcggggcttgccttctggccatgcccttcttctctcccttgcacctgtacctcttggtctttgaataaagcctgagtaggaaggctagcaaaaaaaaaaaaaaaaaaaaaaaaaaaaaaaaaaaaaaaaaaaaaaaaaaaaaaaaaaaaaaaaaaaaaaaaaaaaaaaa

SEQ ID NO: 12489 - RNA, 5785 nt, synthetic construct
  source 1..5785: mol_type = other RNA
aggaaataagagagaaaagaagagtaagaagaaatataagagccaccatggcccctaagaagaagcgtaaagtgagccggatggaacgcctcgtctacgaggtgcggcagaagtgcagaaacatcgaggacatctgcatctcctgcggatctctgaacgtgaccctggagcacccactgttcatcggcggcatgtgccagaactgtaaaaactgttttctggagtgtgcctatcaatacgacgatgacggctaccagagctactgcaccatctgttgcggcggaagagaggtgctgatgtgtggaaataacaactgctgccggtgcttctgcgtggaatgcgtggacctgctggtgggccccggcgccgcccaggccgctattaaggaagatccttggaactgctacatgtgcggccacaagggcacatacggcctgctgagacggagagaggactggcctagcagactgcagatgttcttcgccaataaccacgaccaggagttcgacccccctaaggtgtaccctcccgtccccgccgagaagagaaagcccatccgggtcctgagcctgttcgatggcatcgccaccggtctgctggtgctgaaggacctgggcatccaggtggataggtacattgcctccgaggtgtgcgaggactccatcaccgtgggaatggtgcgtcatcagggcaagatcatgtacgtgggcgacgtgcggagcgtgacacagaagcatatccaggagtggggccctttcgacctggtgatcggcggcagcccttgcaatgacctgagcatcgtgaacccagcccggaagggcctgtacgagggaaccggcagactgttcttcgagttttacagactgctgcacgacgcccggcctaaggaaggcgacgaccggcccttcttttggctgttcgagaatgtggtggccatgggagtcagcgacaagcgggatattagccggttcctggagagcaaccccgtgatgatcgatgccaaggaagtgagcgccgcccaccgggccagatacttctggggcaatctgcctggcatgaacagacccctggccagcaccgtgaacgacaagctggagctgcaggagtgcctggagcacggccggatcgccaagttcagcaaggtgagaaccatcaccacccgaagcaacagcatcaaacaaggcaaggaccagcactttcctgtgttcatgaacgagaaggaggacatcctgtggtgtaccgagatggagagagtgttcgggttcccagtccactacacagatgtcagcaacatgtctagactggccagacagagactgctgggaagaagctggtccgtccctgtgatcagacacctgttcgcccctctgaaggagtacttcgcctgcgtgagcagcggcaacagcaacgccaacagccggggccccagcttctctagcggcctggtgccactgtccctgagagggagccacatgggccccatggagatctacaaaaccgtgagcgcctggaagcggcagcctgtgcgcgtgctgagcctgtttcggaatatcgataaagtcctgaaaagcctgggattcctggagagcggctctggctccggcggtggcaccctgaagtacgtggaggatgtgacaaacgtggtcagacgggatgtggagaagtggggccccttcgatctggtgtacggcagcacccaacccctgggcagctcttgtgaccggtgccctggctggtacatgtttcagttccaccggatcctgcagtacgccctgccgagacaggagtcccagcggccattcttttggattttcatggacaacttgctgctgaccgaggatgaccaggaaactaccactcggttcctgcagaccgaagccgtgaccctgcaggacgtgagaggccgggactaccagaacgccatgcgggtgtggtccaacatccctggactgaaaagcaagcacgcacctctgacccctaaagaagaggagtacctgcaggcccaggtgcggagcagaagcaagctggacgcccctaaggtggatctgctggtgaagaattgcctcctgcccctgagagagtacttcaagtatttcagccagaatagtctgcccctgggaggcagcggcggcggcgcccacggcagcgtgatgttcagcgacgtgagcgtggtgttcagccaggaggagtgggactacctggacgtggagcagagggacctgtacagggacgtgatgctggagaactacaacaacctggtgagcctgggctgcttcatcagcaagcccgacgtgatcagcctgctggagcagggcaaggagccctggaaggtggtgaggaaggagaggaggaggtaccccgacctggagaccaggcacggcggcccaagcagcggcgcccctcctcccagcggcggcagcccagccggctccccaacctctaccgaggagggcacctctgagtccgccacccccgagagcggccctggcacctccaccgagcccagcgagggcagcgcacccggcagccctgccggcagccccacctccacagaggagggaaccagcaccgagcccagcgaaggcagcgccccaggcaccagcaccgagcctagtgagcaggagattaaacggatcaacaagatcagaagaagacttgtgaaagacagcaacaccaagaaggccggcaagacaggccccatgaaaaccctgctggttagagtgatgacacccgatctgagagagcggctggaaaacctgagaaagaagcctgaaaatatcccccagcccatcagcaatacatctagagccaacctgaataagctgctgaccgattacaccgaaatgaagaaggcgatcctgcatgtgtactgggaagagttccagaaggaccctgtgggcctgatgagccgggtggcccagcctgccagcaagaagatcgatcagaacaagctgaaacctgagatggacgagaagggcaacctgaccaccgccggctttgcctgctctcagtgtggccagcccctgttcgtgtacaagctggagcaggtgtctgagaagggcaaggcttacaccaactacttcggacggtgcaatgtggccgagcacgaaaagctgatcctgctggcccagctgaagcccgagaaggatagcgacgaagccgtgacatatagcctgggaaagtttgggcagagggccctggatttctacagcattcatgtgaccaaggagtccacccaccccgtgaagcccctggcccagatcgccggaaacagatacgcctccggacctgtgggaaaggccctgagcgacgcatgtatgggcacaatcgcctccttcctgtctaagtaccaggacatcatcatcgaacaccagaaggtggtgaagggcaaccagaagagactggagagcctgcgggagctggccggcaaggaaaacctggaataccctagcgtgaccctgccacctcagcctcacaccaaggagggcgttgatgcctacaacgaagtgatcgcccgggtgcgaatgtgggtgaacctgaacctgtggcagaagctgaagctaagcagagatgatgccaagcctctgctgagactgaagggattcccttcctttcctctggtcgagagacaggccaacgaagtggactggtgggacatggtgtgtaacgtgaagaagctgatcaacgagaaaaaggaggatggcaaggtgttttggcagaatctggctggctacaagagacaggaagccctgagaccatacctgagcagcgaggaagatcggaagaagggaaagaaattcgctcggtaccagctgggcgacctgctgctgcacctggaaaagaagcacggcgaggactggggaaaggtgtacgacgaggcctgggagcggattgacaagaaagtggaaggcctgagcaagcacatcaagctggaagaggaacggagaagcgaggacgcccagagcaaggccgccctgaccgactggctgcgggctaaggccagcttcgtgatcgagggcctgaaggaggccgacaaggacgagttctgcagatgcgagctgaagctgcagaagtggtacggggacctgcggggaaagcccttcgccatcgaagccgagaacagcatcctggacatcagcggcttcagcaagcagtacaactgtgccttcatctggcagaaggacggcgtgaagaagctgaacctgtacctgatcatcaactacttcaagggcggcaagctgcggttcaagaagatcaaacctgaagccttcgaagccaacagattctacaccgtgatcaacaaaaagagcggcgagatcgtgcccatggaggtgaacttcaacttcgacgaccccaacctgatcatcctgcctctggcctttggcaagagacagggcagagaattcatctggaacgacctgctgtccctggaaaccggcagcctgaagctggccaacggaagagtgatcgagaagacactgtacaacagaagaacccggcaggatgagcctgccctgttcgtggccctgaccttcgagcggcgggaggtcctggactcctccaatatcaaaccaatgaacctgatcggcgtggcaagaggcgaaaacatccccgccgtgatcgccctgaccgaccccgagggctgcccactgagccggtttaaggatagcctgggaaacccaacccacatcctgagaatcggcgagagctataaggagaagcagcggaccatccaggccaagaaggaggtggagcagcggagagccggcggctacagccggaagtacgccagcaaagccaagaatctggcagacgatatggtgagaaacaccgctagagatctgctgtactacgccgtgacccaggatgccatgctgatcttcgccaacctgagccggggcttcggccggcagggcaagcggaccttcatggccgagagacagtacacacggatggaggactggctgaccgccaagctggcctacgagggcctgagcaagacctacctgtccaagacactggcccagtacacctccaagacatgcagcaactgtgggtttaccatcaccagcgccgactacgacagggtgctggagaagctgaagaagacagcaacaggctggatgaccacaattaacggcaaggagctgaaggtggagggccagattacctactacaacagatacaagagacagaacgtagtcaaggacctgtccgtcgagctggatagactgagcgaagaatctgtgaacaacgacatctcctcctggacaaagggcagaagcggagaagctctgagcctcctgaagaaaagattctcccatagacccgtgcaggagaagttcgtgtgcctgaactgcggcttcgagacacacgcagccgagcaagccgccctgaacatcgccagatcctggctgttcctgcggagccaggagtacaagaaataccagacaaacaagacaaccggcaacaccgataagagagccttcgtcgagacctggcagtccttttaccggaagaagcttaaggaggtgtggaaacctgccgtgcggtctggcggatctggcggaggctccaccagccccaagaaaaagagaaaagtctaagctgccttctgcggggcttgccttctggccatgcccttcttctctcccttgcacctgtacctcttggtctttgaataaagcctgagtaggaaggctagcaaaaaaaaaaaaaaaaaaaaaaaaaaaaaaaaaaaaaaaaaaaaaaaaaaaaaaaaaaaaaaaaaaaaaaaaaaaaaaaa

SEQ ID NO: 12490 - RNA, 5785 nt, synthetic construct
  source 1..5785: mol_type = other RNA
aggaaataagagagaaaagaagagtaagaagaaatataagagccaccatggcccctaagaagaagcgtaaagtgagccggatggaacgcctcgtctacgaggtgcggcagaagtgcagaaacatcgaggacatctgcatctcctgcggatctctgaacgtgaccctggagcacccactgttcatcggcggcatgtgccagaactgtaaaaactgttttctggagtgtgcctatcaatacgacgatgacggctaccagagctactgcaccatctgttgcggcggaagagaggtgctgatgtgtggaaataacaactgctgccggtgcttctgcgtggaatgcgtggacctgctggtgggccccggcgccgcccaggccgctattaaggaagatccttggaactgctacatgtgcggccacaagggcacatacggcctgctgagacggagagaggactggcctagcagactgcagatgttcttcgccaataaccacgaccaggagttcgacccccctaaggtgtaccctcccgtccccgccgagaagagaaagcccatccgggtcctgagcctgttcgatggcatcgccaccggtctgctggtgctgaaggacctgggcatccaggtggataggtacattgcctccgaggtgtgcgaggactccatcaccgtgggaatggtgcgtcatcagggcaagatcatgtacgtgggcgacgtgcggagcgtgacacagaagcatatccaggagtggggccctttcgacctggtgatcggcggcagcccttgcaatgacctgagcatcgtgaacccagcccggaagggcctgtacgagggaaccggcagactgttcttcgagttttacagactgctgcacgacgcccggcctaaggaaggcgacgaccggcccttcttttggctgttcgagaatgtggtggccatgggagtcagcgacaagcgggatattagccggttcctggagagcaaccccgtgatgatcgatgccaaggaagtgagcgccgcccaccgggccagatacttctggggcaatctgcctggcatgaacagacccctggccagcaccgtgaacgacaagctggagctgcaggagtgcctggagcacggccggatcgccaagttcagcaaggtgagaaccatcaccacccgaagcaacagcatcaaacaaggcaaggaccagcactttcctgtgttcatgaacgagaaggaggacatcctgtggtgtaccgagatggagagagtgttcgggttcccagtccactacacagatgtcagcaacatgtctagactggccagacagagactgctgggaagaagctggtccgtccctgtgatcagacacctgttcgcccctctgaaggagtacttcgcctgcgtgagcagcggcaacagcaacgccaacagccggggccccagcttctctagcggcctggtgccactgtccctgagagggagccacatgggccccatggagatctacaaaaccgtgagcgcctggaagcggcagcctgtgcgcgtgctgagcctgtttcggaatatcgataaagtcctgaaaagcctgggattcctggagagcggctctggctccggcggtggcaccctgaagtacgtggaggatgtgacaaacgtggtcagacgggatgtggagaagtggggccccttcgatctggtgtacggcagcacccaacccctgggcagctcttgtgaccggtgccctggctggtacatgtttcagttccaccggatcctgcagtacgccctgccgagacaggagtcccagcggccattcttttggattttcatggacaacttgctgctgaccgaggatgaccaggaaactaccactcggttcctgcagaccgaagccgtgaccctgcaggacgtgagaggccgggactaccagaacgccatgcgggtgtggtccaacatccctggactgaaaagcaagcacgcacctctgacccctaaagaagaggagtacctgcaggcccaggtgcggagcagaagcaagctggacgcccctaaggtggatctgctggtgaagaattgcctcctgcccctgagagagtacttcaagtatttcagccagaatagtctgcccctgggaggcagcggcggcggcgtgcagggcagcgtgagcttcgaggacgtggccgtgggcttcagccaggaggagtggcagatcctgggccccagccagaaggccctgtactgggacgtgatgctggagaactactgcaacctggtgagcgtgggctaccaggcccccacccccaacagcctgttccagctggagcagggcggccccccctggaccgtggagggcgccgccctgagccccacctgcagcggcaagaagctgtacggcggcccaagcagcggcgcccctcctcccagcggcggcagcccagccggctccccaacctctaccgaggagggcacctctgagtccgccacccccgagagcggccctggcacctccaccgagcccagcgagggcagcgcacccggcagccctgccggcagccccacctccacagaggagggaaccagcaccgagcccagcgaaggcagcgccccaggcaccagcaccgagcctagtgagcaggagattaaacggatcaacaagatcagaagaagacttgtgaaagacagcaacaccaagaaggccggcaagacaggccccatgaaaaccctgctggttagagtgatgacacccgatctgagagagcggctggaaaacctgagaaagaagcctgaaaatatcccccagcccatcagcaatacatctagagccaacctgaataagctgctgaccgattacaccgaaatgaagaaggcgatcctgcatgtgtactgggaagagttccagaaggaccctgtgggcctgatgagccgggtggcccagcctgccagcaagaagatcgatcagaacaagctgaaacctgagatggacgagaagggcaacctgaccaccgccggctttgcctgctctcagtgtggccagcccctgttcgtgtacaagctggagcaggtgtctgagaagggcaaggcttacaccaactacttcggacggtgcaatgtggccgagcacgaaaagctgatcctgctggcccagctgaagcccgagaaggatagcgacgaagccgtgacatatagcctgggaaagtttgggcagagggccctggatttctacagcattcatgtgaccaaggagtccacccaccccgtgaagcccctggcccagatcgccggaaacagatacgcctccggacctgtgggaaaggccctgagcgacgcatgtatgggcacaatcgcctccttcctgtctaagtaccaggacatcatcatcgaacaccagaaggtggtgaagggcaaccagaagagactggagagcctgcgggagctggccggcaaggaaaacctggaataccctagcgtgaccctgccacctcagcctcacaccaaggagggcgttgatgcctacaacgaagtgatcgcccgggtgcgaatgtgggtgaacctgaacctgtggcagaagctgaagctaagcagagatgatgccaagcctctgctgagactgaagggattcccttcctttcctctggtcgagagacaggccaacgaagtggactggtgggacatggtgtgtaacgtgaagaagctgatcaacgagaaaaaggaggatggcaaggtgttttggcagaatctggctggctacaagagacaggaagccctgagaccatacctgagcagcgaggaagatcggaagaagggaaagaaattcgctcggtaccagctgggcgacctgctgctgcacctggaaaagaagcacggcgaggactggggaaaggtgtacgacgaggcctgggagcggattgacaagaaagtggaaggcctgagcaagcacatcaagctggaagaggaacggagaagcgaggacgcccagagcaaggccgccctgaccgactggctgcgggctaaggccagcttcgtgatcgagggcctgaaggaggccgacaaggacgagttctgcagatgcgagctgaagctgcagaagtggtacggggacctgcggggaaagcccttcgccatcgaagccgagaacagcatcctggacatcagcggcttcagcaagcagtacaactgtgccttcatctggcagaaggacggcgtgaagaagctgaacctgtacctgatcatcaactacttcaagggcggcaagctgcggttcaagaagatcaaacctgaagccttcgaagccaacagattctacaccgtgatcaacaaaaagagcggcgagatcgtgcccatggaggtgaacttcaacttcgacgaccccaacctgatcatcctgcctctggcctttggcaagagacagggcagagaattcatctggaacgacctgctgtccctggaaaccggcagcctgaagctggccaacggaagagtgatcgagaagacactgtacaacagaagaacccggcaggatgagcctgccctgttcgtggccctgaccttcgagcggcgggaggtcctggactcctccaatatcaaaccaatgaacctgatcggcgtggcaagaggcgaaaacatccccgccgtgatcgccctgaccgaccccgagggctgcccactgagccggtttaaggatagcctgggaaacccaacccacatcctgagaatcggcgagagctataaggagaagcagcggaccatccaggccaagaaggaggtggagcagcggagagccggcggctacagccggaagtacgccagcaaagccaagaatctggcagacgatatggtgagaaacaccgctagagatctgctgtactacgccgtgacccaggatgccatgctgatcttcgccaacctgagccggggcttcggccggcagggcaagcggaccttcatggccgagagacagtacacacggatggaggactggctgaccgccaagctggcctacgagggcctgagcaagacctacctgtccaagacactggcccagtacacctccaagacatgcagcaactgtgggtttaccatcaccagcgccgactacgacagggtgctggagaagctgaagaagacagcaacaggctggatgaccacaattaacggcaaggagctgaaggtggagggccagattacctactacaacagatacaagagacagaacgtagtcaaggacctgtccgtcgagctggatagactgagcgaagaatctgtgaacaacgacatctcctcctggacaaagggcagaagcggagaagctctgagcctcctgaagaaaagattctcccatagacccgtgcaggagaagttcgtgtgcctgaactgcggcttcgagacacacgcagccgagcaagccgccctgaacatcgccagatcctggctgttcctgcggagccaggagtacaagaaataccagacaaacaagacaaccggcaacaccgataagagagccttcgtcgagacctggcagtccttttaccggaagaagcttaaggaggtgtggaaacctgccgtgcggtctggcggatctggcggaggctccaccagccccaagaaaaagagaaaagtctaagctgccttctgcggggcttgccttctggccatgcccttcttctctcccttgcacctgtacctcttggtctttgaataaagcctgagtaggaaggctagcaaaaaaaaaaaaaaaaaaaaaaaaaaaaaaaaaaaaaaaaaaaaaaaaaaaaaaaaaaaaaaaaaaaaaaaaaaaaaaaa

SEQ ID NO: 12491 - RNA, 5785 nt, synthetic construct
  source 1..5785: mol_type = other RNA
aggaaataagagagaaaagaagagtaagaagaaatataagagccaccatggcccctaagaagaagcgtaaagtgagccggatggaacgcctcgtctacgaggtgcggcagaagtgcagaaacatcgaggacatctgcatctcctgcggatctctgaacgtgaccctggagcacccactgttcatcggcggcatgtgccagaactgtaaaaactgttttctggagtgtgcctatcaatacgacgatgacggctaccagagctactgcaccatctgttgcggcggaagagaggtgctgatgtgtggaaataacaactgctgccggtgcttctgcgtggaatgcgtggacctgctggtgggccccggcgccgcccaggccgctattaaggaagatccttggaactgctacatgtgcggccacaagggcacatacggcctgctgagacggagagaggactggcctagcagactgcagatgttcttcgccaataaccacgaccaggagttcgacccccctaaggtgtaccctcccgtccccgccgagaagagaaagcccatccgggtcctgagcctgttcgatggcatcgccaccggtctgctggtgctgaaggacctgggcatccaggtggataggtacattgcctccgaggtgtgcgaggactccatcaccgtgggaatggtgcgtcatcagggcaagatcatgtacgtgggcgacgtgcggagcgtgacacagaagcatatccaggagtggggccctttcgacctggtgatcggcggcagcccttgcaatgacctgagcatcgtgaacccagcccggaagggcctgtacgagggaaccggcagactgttcttcgagttttacagactgctgcacgacgcccggcctaaggaaggcgacgaccggcccttcttttggctgttcgagaatgtggtggccatgggagtcagcgacaagcgggatattagccggttcctggagagcaaccccgtgatgatcgatgccaaggaagtgagcgccgcccaccgggccagatacttctggggcaatctgcctggcatgaacagacccctggccagcaccgtgaacgacaagctggagctgcaggagtgcctggagcacggccggatcgccaagttcagcaaggtgagaaccatcaccacccgaagcaacagcatcaaacaaggcaaggaccagcactttcctgtgttcatgaacgagaaggaggacatcctgtggtgtaccgagatggagagagtgttcgggttcccagtccactacacagatgtcagcaacatgtctagactggccagacagagactgctgggaagaagctggtccgtccctgtgatcagacacctgttcgcccctctgaaggagtacttcgcctgcgtgagcagcggcaacagcaacgccaacagccggggccccagcttctctagcggcctggtgccactgtccctgagagggagccacatgggccccatggagatctacaaaaccgtgagcgcctggaagcggcagcctgtgcgcgtgctgagcctgtttcggaatatcgataaagtcctgaaaagcctgggattcctggagagcggctctggctccggcggtggcaccctgaagtacgtggaggatgtgacaaacgtggtcagacgggatgtggagaagtggggccccttcgatctggtgtacggcagcacccaacccctgggcagctcttgtgaccggtgccctggctggtacatgtttcagttccaccggatcctgcagtacgccctgccgagacaggagtcccagcggccattcttttggattttcatggacaacttgctgctgaccgaggatgaccaggaaactaccactcggttcctgcagaccgaagccgtgaccctgcaggacgtgagaggccgggactaccagaacgccatgcgggtgtggtccaacatccctggactgaaaagcaagcacgcacctctgacccctaaagaagaggagtacctgcaggcccaggtgcggagcagaagcaagctggacgcccctaaggtggatctgctggtgaagaattgcctcctgcccctgagagagtacttcaagtatttcagccagaatagtctgcccctgggaggcagcggcggcggcctggtgcccgtgaccttcgaggacgtggccgtgtacttcagcagggaggagtggggcctgctggacgacatgcagaggaccttctacagggacgtgatgaaggagaactaccagaccgtggtgagcctgcccggcagcagcatccccaagcccgacgtgatcagccagatggagaggggcgaggagccctgggtgcccgacctgcagaagctgggcccccaccagacccccgagaaccccctgggcggcccaagcagcggcgcccctcctcccagcggcggcagcccagccggctccccaacctctaccgaggagggcacctctgagtccgccacccccgagagcggccctggcacctccaccgagcccagcgagggcagcgcacccggcagccctgccggcagccccacctccacagaggagggaaccagcaccgagcccagcgaaggcagcgccccaggcaccagcaccgagcctagtgagcaggagattaaacggatcaacaagatcagaagaagacttgtgaaagacagcaacaccaagaaggccggcaagacaggccccatgaaaaccctgctggttagagtgatgacacccgatctgagagagcggctggaaaacctgagaaagaagcctgaaaatatcccccagcccatcagcaatacatctagagccaacctgaataagctgctgaccgattacaccgaaatgaagaaggcgatcctgcatgtgtactgggaagagttccagaaggaccctgtgggcctgatgagccgggtggcccagcctgccagcaagaagatcgatcagaacaagctgaaacctgagatggacgagaagggcaacctgaccaccgccggctttgcctgctctcagtgtggccagcccctgttcgtgtacaagctggagcaggtgtctgagaagggcaaggcttacaccaactacttcggacggtgcaatgtggccgagcacgaaaagctgatcctgctggcccagctgaagcccgagaaggatagcgacgaagccgtgacatatagcctgggaaagtttgggcagagggccctggatttctacagcattcatgtgaccaaggagtccacccaccccgtgaagcccctggcccagatcgccggaaacagatacgcctccggacctgtgggaaaggccctgagcgacgcatgtatgggcacaatcgcctccttcctgtctaagtaccaggacatcatcatcgaacaccagaaggtggtgaagggcaaccagaagagactggagagcctgcgggagctggccggcaaggaaaacctggaataccctagcgtgaccctgccacctcagcctcacaccaaggagggcgttgatgcctacaacgaagtgatcgcccgggtgcgaatgtgggtgaacctgaacctgtggcagaagctgaagctaagcagagatgatgccaagcctctgctgagactgaagggattcccttcctttcctctggtcgagagacaggccaacgaagtggactggtgggacatggtgtgtaacgtgaagaagctgatcaacgagaaaaaggaggatggcaaggtgttttggcagaatctggctggctacaagagacaggaagccctgagaccatacctgagcagcgaggaagatcggaagaagggaaagaaattcgctcggtaccagctgggcgacctgctgctgcacctggaaaagaagcacggcgaggactggggaaaggtgtacgacgaggcctgggagcggattgacaagaaagtggaaggcctgagcaagcacatcaagctggaagaggaacggagaagcgaggacgcccagagcaaggccgccctgaccgactggctgcgggctaaggccagcttcgtgatcgagggcctgaaggaggccgacaaggacgagttctgcagatgcgagctgaagctgcagaagtggtacggggacctgcggggaaagcccttcgccatcgaagccgagaacagcatcctggacatcagcggcttcagcaagcagtacaactgtgccttcatctggcagaaggacggcgtgaagaagctgaacctgtacctgatcatcaactacttcaagggcggcaagctgcggttcaagaagatcaaacctgaagccttcgaagccaacagattctacaccgtgatcaacaaaaagagcggcgagatcgtgcccatggaggtgaacttcaacttcgacgaccccaacctgatcatcctgcctctggcctttggcaagagacagggcagagaattcatctggaacgacctgctgtccctggaaaccggcagcctgaagctggccaacggaagagtgatcgagaagacactgtacaacagaagaacccggcaggatgagcctgccctgttcgtggccctgaccttcgagcggcgggaggtcctggactcctccaatatcaaaccaatgaacctgatcggcgtggcaagaggcgaaaacatccccgccgtgatcgccctgaccgaccccgagggctgcccactgagccggtttaaggatagcctgggaaacccaacccacatcctgagaatcggcgagagctataaggagaagcagcggaccatccaggccaagaaggaggtggagcagcggagagccggcggctacagccggaagtacgccagcaaagccaagaatctggcagacgatatggtgagaaacaccgctagagatctgctgtactacgccgtgacccaggatgccatgctgatcttcgccaacctgagccggggcttcggccggcagggcaagcggaccttcatggccgagagacagtacacacggatggaggactggctgaccgccaagctggcctacgagggcctgagcaagacctacctgtccaagacactggcccagtacacctccaagacatgcagcaactgtgggtttaccatcaccagcgccgactacgacagggtgctggagaagctgaagaagacagcaacaggctggatgaccacaattaacggcaaggagctgaaggtggagggccagattacctactacaacagatacaagagacagaacgtagtcaaggacctgtccgtcgagctggatagactgagcgaagaatctgtgaacaacgacatctcctcctggacaaagggcagaagcggagaagctctgagcctcctgaagaaaagattctcccatagacccgtgcaggagaagttcgtgtgcctgaactgcggcttcgagacacacgcagccgagcaagccgccctgaacatcgccagatcctggctgttcctgcggagccaggagtacaagaaataccagacaaacaagacaaccggcaacaccgataagagagccttcgtcgagacctggcagtccttttaccggaagaagcttaaggaggtgtggaaacctgccgtgcggtctggcggatctggcggaggctccaccagccccaagaaaaagagaaaagtctaagctgccttctgcggggcttgccttctggccatgcccttcttctctcccttgcacctgtacctcttggtctttgaataaagcctgagtaggaaggctagcaaaaaaaaaaaaaaaaaaaaaaaaaaaaaaaaaaaaaaaaaaaaaaaaaaaaaaaaaaaaaaaaaaaaaaaaaaaaaaaa

SEQ ID NO: 12492 - RNA, 5785 nt, synthetic construct
  source 1..5785: mol_type = other RNA
aggaaataagagagaaaagaagagtaagaagaaatataagagccaccatggcccctaagaagaagcgtaaagtgagccggatggaacgcctcgtctacgaggtgcggcagaagtgcagaaacatcgaggacatctgcatctcctgcggatctctgaacgtgaccctggagcacccactgttcatcggcggcatgtgccagaactgtaaaaactgttttctggagtgtgcctatcaatacgacgatgacggctaccagagctactgcaccatctgttgcggcggaagagaggtgctgatgtgtggaaataacaactgctgccggtgcttctgcgtggaatgcgtggacctgctggtgggccccggcgccgcccaggccgctattaaggaagatccttggaactgctacatgtgcggccacaagggcacatacggcctgctgagacggagagaggactggcctagcagactgcagatgttcttcgccaataaccacgaccaggagttcgacccccctaaggtgtaccctcccgtccccgccgagaagagaaagcccatccgggtcctgagcctgttcgatggcatcgccaccggtctgctggtgctgaaggacctgggcatccaggtggataggtacattgcctccgaggtgtgcgaggactccatcaccgtgggaatggtgcgtcatcagggcaagatcatgtacgtgggcgacgtgcggagcgtgacacagaagcatatccaggagtggggccctttcgacctggtgatcggcggcagcccttgcaatgacctgagcatcgtgaacccagcccggaagggcctgtacgagggaaccggcagactgttcttcgagttttacagactgctgcacgacgcccggcctaaggaaggcgacgaccggcccttcttttggctgttcgagaatgtggtggccatgggagtcagcgacaagcgggatattagccggttcctggagagcaaccccgtgatgatcgatgccaaggaagtgagcgccgcccaccgggccagatacttctggggcaatctgcctggcatgaacagacccctggccagcaccgtgaacgacaagctggagctgcaggagtgcctggagcacggccggatcgccaagttcagcaaggtgagaaccatcaccacccgaagcaacagcatcaaacaaggcaaggaccagcactttcctgtgttcatgaacgagaaggaggacatcctgtggtgtaccgagatggagagagtgttcgggttcccagtccactacacagatgtcagcaacatgtctagactggccagacagagactgctgggaagaagctggtccgtccctgtgatcagacacctgttcgcccctctgaaggagtacttcgcctgcgtgagcagcggcaacagcaacgccaacagccggggccccagcttctctagcggcctggtgccactgtccctgagagggagccacatgggccccatggagatctacaaaaccgtgagcgcctggaagcggcagcctgtgcgcgtgctgagcctgtttcggaatatcgataaagtcctgaaaagcctgggattcctggagagcggctctggctccggcggtggcaccctgaagtacgtggaggatgtgacaaacgtggtcagacgggatgtggagaagtggggccccttcgatctggtgtacggcagcacccaacccctgggcagctcttgtgaccggtgccctggctggtacatgtttcagttccaccggatcctgcagtacgccctgccgagacaggagtcccagcggccattcttttggattttcatggacaacttgctgctgaccgaggatgaccaggaaactaccactcggttcctgcagaccgaagccgtgaccctgcaggacgtgagaggccgggactaccagaacgccatgcgggtgtggtccaacatccctggactgaaaagcaagcacgcacctctgacccctaaagaagaggagtacctgcaggcccaggtgcggagcagaagcaagctggacgcccctaaggtggatctgctggtgaagaattgcctcctgcccctgagagagtacttcaagtatttcagccagaatagtctgcccctgggaggcagcggcggcggcatggtgaccttcgaggacgtggccgtgcacttcaccaagaccgagtggaccggcctgagccccgcccagagggccctgtacaggagcgtgatgctggagaacttcggcaacctgaccgccctgggctaccccgtgcccaagcccgccctgatcagcctgctggagggcggcgacatggcctggggcctggaggcccaggacgaccccctggccgagaccaccaagaacgtgtgcaaggacgtgggcggcccaagcagcggcgcccctcctcccagcggcggcagcccagccggctccccaacctctaccgaggagggcacctctgagtccgccacccccgagagcggccctggcacctccaccgagcccagcgagggcagcgcacccggcagccctgccggcagccccacctccacagaggagggaaccagcaccgagcccagcgaaggcagcgccccaggcaccagcaccgagcctagtgagcaggagattaaacggatcaacaagatcagaagaagacttgtgaaagacagcaacaccaagaaggccggcaagacaggccccatgaaaaccctgctggttagagtgatgacacccgatctgagagagcggctggaaaacctgagaaagaagcctgaaaatatcccccagcccatcagcaatacatctagagccaacctgaataagctgctgaccgattacaccgaaatgaagaaggcgatcctgcatgtgtactgggaagagttccagaaggaccctgtgggcctgatgagccgggtggcccagcctgccagcaagaagatcgatcagaacaagctgaaacctgagatggacgagaagggcaacctgaccaccgccggctttgcctgctctcagtgtggccagcccctgttcgtgtacaagctggagcaggtgtctgagaagggcaaggcttacaccaactacttcggacggtgcaatgtggccgagcacgaaaagctgatcctgctggcccagctgaagcccgagaaggatagcgacgaagccgtgacatatagcctgggaaagtttgggcagagggccctggatttctacagcattcatgtgaccaaggagtccacccaccccgtgaagcccctggcccagatcgccggaaacagatacgcctccggacctgtgggaaaggccctgagcgacgcatgtatgggcacaatcgcctccttcctgtctaagtaccaggacatcatcatcgaacaccagaaggtggtgaagggcaaccagaagagactggagagcctgcgggagctggccggcaaggaaaacctggaataccctagcgtgaccctgccacctcagcctcacaccaaggagggcgttgatgcctacaacgaagtgatcgcccgggtgcgaatgtgggtgaacctgaacctgtggcagaagctgaagctaagcagagatgatgccaagcctctgctgagactgaagggattcccttcctttcctctggtcgagagacaggccaacgaagtggactggtgggacatggtgtgtaacgtgaagaagctgatcaacgagaaaaaggaggatggcaaggtgttttggcagaatctggctggctacaagagacaggaagccctgagaccatacctgagcagcgaggaagatcggaagaagggaaagaaattcgctcggtaccagctgggcgacctgctgctgcacctggaaaagaagcacggcgaggactggggaaaggtgtacgacgaggcctgggagcggattgacaagaaagtggaaggcctgagcaagcacatcaagctggaagaggaacggagaagcgaggacgcccagagcaaggccgccctgaccgactggctgcgggctaaggccagcttcgtgatcgagggcctgaaggaggccgacaaggacgagttctgcagatgcgagctgaagctgcagaagtggtacggggacctgcggggaaagcccttcgccatcgaagccgagaacagcatcctggacatcagcggcttcagcaagcagtacaactgtgccttcatctggcagaaggacggcgtgaagaagctgaacctgtacctgatcatcaactacttcaagggcggcaagctgcggttcaagaagatcaaacctgaagccttcgaagccaacagattctacaccgtgatcaacaaaaagagcggcgagatcgtgcccatggaggtgaacttcaacttcgacgaccccaacctgatcatcctgcctctggcctttggcaagagacagggcagagaattcatctggaacgacctgctgtccctggaaaccggcagcctgaagctggccaacggaagagtgatcgagaagacactgtacaacagaagaacccggcaggatgagcctgccctgttcgtggccctgaccttcgagcggcgggaggtcctggactcctccaatatcaaaccaatgaacctgatcggcgtggcaagaggcgaaaacatccccgccgtgatcgccctgaccgaccccgagggctgcccactgagccggtttaaggatagcctgggaaacccaacccacatcctgagaatcggcgagagctataaggagaagcagcggaccatccaggccaagaaggaggtggagcagcggagagccggcggctacagccggaagtacgccagcaaagccaagaatctggcagacgatatggtgagaaacaccgctagagatctgctgtactacgccgtgacccaggatgccatgctgatcttcgccaacctgagccggggcttcggccggcagggcaagcggaccttcatggccgagagacagtacacacggatggaggactggctgaccgccaagctggcctacgagggcctgagcaagacctacctgtccaagacactggcccagtacacctccaagacatgcagcaactgtgggtttaccatcaccagcgccgactacgacagggtgctggagaagctgaagaagacagcaacaggctggatgaccacaattaacggcaaggagctgaaggtggagggccagattacctactacaacagatacaagagacagaacgtagtcaaggacctgtccgtcgagctggatagactgagcgaagaatctgtgaacaacgacatctcctcctggacaaagggcagaagcggagaagctctgagcctcctgaagaaaagattctcccatagacccgtgcaggagaagttcgtgtgcctgaactgcggcttcgagacacacgcagccgagcaagccgccctgaacatcgccagatcctggctgttcctgcggagccaggagtacaagaaataccagacaaacaagacaaccggcaacaccgataagagagccttcgtcgagacctggcagtccttttaccggaagaagcttaaggaggtgtggaaacctgccgtgcggtctggcggatctggcggaggctccaccagccccaagaaaaagagaaaagtctaagctgccttctgcggggcttgccttctggccatgcccttcttctctcccttgcacctgtacctcttggtctttgaataaagcctgagtaggaaggctagcaaaaaaaaaaaaaaaaaaaaaaaaaaaaaaaaaaaaaaaaaaaaaaaaaaaaaaaaaaaaaaaaaaaaaaaaaaaaaaaa

SEQ ID NO: 12493 - RNA, 5785 nt, synthetic construct
  source 1..5785: mol_type = other RNA
aggaaataagagagaaaagaagagtaagaagaaatataagagccaccatggcccctaagaagaagcgtaaagtgagccggatggaacgcctcgtctacgaggtgcggcagaagtgcagaaacatcgaggacatctgcatctcctgcggatctctgaacgtgaccctggagcacccactgttcatcggcggcatgtgccagaactgtaaaaactgttttctggagtgtgcctatcaatacgacgatgacggctaccagagctactgcaccatctgttgcggcggaagagaggtgctgatgtgtggaaataacaactgctgccggtgcttctgcgtggaatgcgtggacctgctggtgggccccggcgccgcccaggccgctattaaggaagatccttggaactgctacatgtgcggccacaagggcacatacggcctgctgagacggagagaggactggcctagcagactgcagatgttcttcgccaataaccacgaccaggagttcgacccccctaaggtgtaccctcccgtccccgccgagaagagaaagcccatccgggtcctgagcctgttcgatggcatcgccaccggtctgctggtgctgaaggacctgggcatccaggtggataggtacattgcctccgaggtgtgcgaggactccatcaccgtgggaatggtgcgtcatcagggcaagatcatgtacgtgggcgacgtgcggagcgtgacacagaagcatatccaggagtggggccctttcgacctggtgatcggcggcagcccttgcaatgacctgagcatcgtgaacccagcccggaagggcctgtacgagggaaccggcagactgttcttcgagttttacagactgctgcacgacgcccggcctaaggaaggcgacgaccggcccttcttttggctgttcgagaatgtggtggccatgggagtcagcgacaagcgggatattagccggttcctggagagcaaccccgtgatgatcgatgccaaggaagtgagcgccgcccaccgggccagatacttctggggcaatctgcctggcatgaacagacccctggccagcaccgtgaacgacaagctggagctgcaggagtgcctggagcacggccggatcgccaagttcagcaaggtgagaaccatcaccacccgaagcaacagcatcaaacaaggcaaggaccagcactttcctgtgttcatgaacgagaaggaggacatcctgtggtgtaccgagatggagagagtgttcgggttcccagtccactacacagatgtcagcaacatgtctagactggccagacagagactgctgggaagaagctggtccgtccctgtgatcagacacctgttcgcccctctgaaggagtacttcgcctgcgtgagcagcggcaacagcaacgccaacagccggggccccagcttctctagcggcctggtgccactgtccctgagagggagccacatgggccccatggagatctacaaaaccgtgagcgcctggaagcggcagcctgtgcgcgtgctgagcctgtttcggaatatcgataaagtcctgaaaagcctgggattcctggagagcggctctggctccggcggtggcaccctgaagtacgtggaggatgtgacaaacgtggtcagacgggatgtggagaagtggggccccttcgatctggtgtacggcagcacccaacccctgggcagctcttgtgaccggtgccctggctggtacatgtttcagttccaccggatcctgcagtacgccctgccgagacaggagtcccagcggccattcttttggattttcatggacaacttgctgctgaccgaggatgaccaggaaactaccactcggttcctgcagaccgaagccgtgaccctgcaggacgtgagaggccgggactaccagaacgccatgcgggtgtggtccaacatccctggactgaaaagcaagcacgcacctctgacccctaaagaagaggagtacctgcaggcccaggtgcggagcagaagcaagctggacgcccctaaggtggatctgctggtgaagaattgcctcctgcccctgagagagtacttcaagtatttcagccagaatagtctgcccctgggaggcagcggcggcggcaacagccagggcctgctgaccttcagggacgtggccatcgagttcagccaggaggagctgaggtgcctgaaccacagccagtgggagctgtacagggacgtgatgttcgagaactacggccacctgctgttcctgggcctggtggtgagcaagcccgacctggtgatcttcctggagcagaagaaggacgtgtgggccgtgaagaggaaggagaccgtggccacccaccccggcaggtgggagggcggcccaagcagcggcgcccctcctcccagcggcggcagcccagccggctccccaacctctaccgaggagggcacctctgagtccgccacccccgagagcggccctggcacctccaccgagcccagcgagggcagcgcacccggcagccctgccggcagccccacctccacagaggagggaaccagcaccgagcccagcgaaggcagcgccccaggcaccagcaccgagcctagtgagcaggagattaaacggatcaacaagatcagaagaagacttgtgaaagacagcaacaccaagaaggccggcaagacaggccccatgaaaaccctgctggttagagtgatgacacccgatctgagagagcggctggaaaacctgagaaagaagcctgaaaatatcccccagcccatcagcaatacatctagagccaacctgaataagctgctgaccgattacaccgaaatgaagaaggcgatcctgcatgtgtactgggaagagttccagaaggaccctgtgggcctgatgagccgggtggcccagcctgccagcaagaagatcgatcagaacaagctgaaacctgagatggacgagaagggcaacctgaccaccgccggctttgcctgctctcagtgtggccagcccctgttcgtgtacaagctggagcaggtgtctgagaagggcaaggcttacaccaactacttcggacggtgcaatgtggccgagcacgaaaagctgatcctgctggcccagctgaagcccgagaaggatagcgacgaagccgtgacatatagcctgggaaagtttgggcagagggccctggatttctacagcattcatgtgaccaaggagtccacccaccccgtgaagcccctggcccagatcgccggaaacagatacgcctccggacctgtgggaaaggccctgagcgacgcatgtatgggcacaatcgcctccttcctgtctaagtaccaggacatcatcatcgaacaccagaaggtggtgaagggcaaccagaagagactggagagcctgcgggagctggccggcaaggaaaacctggaataccctagcgtgaccctgccacctcagcctcacaccaaggagggcgttgatgcctacaacgaagtgatcgcccgggtgcgaatgtgggtgaacctgaacctgtggcagaagctgaagctaagcagagatgatgccaagcctctgctgagactgaagggattcccttcctttcctctggtcgagagacaggccaacgaagtggactggtgggacatggtgtgtaacgtgaagaagctgatcaacgagaaaaaggaggatggcaaggtgttttggcagaatctggctggctacaagagacaggaagccctgagaccatacctgagcagcgaggaagatcggaagaagggaaagaaattcgctcggtaccagctgggcgacctgctgctgcacctggaaaagaagcacggcgaggactggggaaaggtgtacgacgaggcctgggagcggattgacaagaaagtggaaggcctgagcaagcacatcaagctggaagaggaacggagaagcgaggacgcccagagcaaggccgccctgaccgactggctgcgggctaaggccagcttcgtgatcgagggcctgaaggaggccgacaaggacgagttctgcagatgcgagctgaagctgcagaagtggtacggggacctgcggggaaagcccttcgccatcgaagccgagaacagcatcctggacatcagcggcttcagcaagcagtacaactgtgccttcatctggcagaaggacggcgtgaagaagctgaacctgtacctgatcatcaactacttcaagggcggcaagctgcggttcaagaagatcaaacctgaagccttcgaagccaacagattctacaccgtgatcaacaaaaagagcggcgagatcgtgcccatggaggtgaacttcaacttcgacgaccccaacctgatcatcctgcctctggcctttggcaagagacagggcagagaattcatctggaacgacctgctgtccctggaaaccggcagcctgaagctggccaacggaagagtgatcgagaagacactgtacaacagaagaacccggcaggatgagcctgccctgttcgtggccctgaccttcgagcggcgggaggtcctggactcctccaatatcaaaccaatgaacctgatcggcgtggcaagaggcgaaaacatccccgccgtgatcgccctgaccgaccccgagggctgcccactgagccggtttaaggatagcctgggaaacccaacccacatcctgagaatcggcgagagctataaggagaagcagcggaccatccaggccaagaaggaggtggagcagcggagagccggcggctacagccggaagtacgccagcaaagccaagaatctggcagacgatatggtgagaaacaccgctagagatctgctgtactacgccgtgacccaggatgccatgctgatcttcgccaacctgagccggggcttcggccggcagggcaagcggaccttcatggccgagagacagtacacacggatggaggactggctgaccgccaagctggcctacgagggcctgagcaagacctacctgtccaagacactggcccagtacacctccaagacatgcagcaactgtgggtttaccatcaccagcgccgactacgacagggtgctggagaagctgaagaagacagcaacaggctggatgaccacaattaacggcaaggagctgaaggtggagggccagattacctactacaacagatacaagagacagaacgtagtcaaggacctgtccgtcgagctggatagactgagcgaagaatctgtgaacaacgacatctcctcctggacaaagggcagaagcggagaagctctgagcctcctgaagaaaagattctcccatagacccgtgcaggagaagttcgtgtgcctgaactgcggcttcgagacacacgcagccgagcaagccgccctgaacatcgccagatcctggctgttcctgcggagccaggagtacaagaaataccagacaaacaagacaaccggcaacaccgataagagagccttcgtcgagacctggcagtccttttaccggaagaagcttaaggaggtgtggaaacctgccgtgcggtctggcggatctggcggaggctccaccagccccaagaaaaagagaaaagtctaagctgccttctgcggggcttgccttctggccatgcccttcttctctcccttgcacctgtacctcttggtctttgaataaagcctgagtaggaaggctagcaaaaaaaaaaaaaaaaaaaaaaaaaaaaaaaaaaaaaaaaaaaaaaaaaaaaaaaaaaaaaaaaaaaaaaaaaaaaaaaa

SEQ ID NO: 12494 - RNA, 5785 nt, synthetic construct
  source 1..5785: mol_type = other RNA
aggaaataagagagaaaagaagagtaagaagaaatataagagccaccatggcccctaagaagaagcgtaaagtgagccggatggaacgcctcgtctacgaggtgcggcagaagtgcagaaacatcgaggacatctgcatctcctgcggatctctgaacgtgaccctggagcacccactgttcatcggcggcatgtgccagaactgtaaaaactgttttctggagtgtgcctatcaatacgacgatgacggctaccagagctactgcaccatctgttgcggcggaagagaggtgctgatgtgtggaaataacaactgctgccggtgcttctgcgtggaatgcgtggacctgctggtgggccccggcgccgcccaggccgctattaaggaagatccttggaactgctacatgtgcggccacaagggcacatacggcctgctgagacggagagaggactggcctagcagactgcagatgttcttcgccaataaccacgaccaggagttcgacccccctaaggtgtaccctcccgtccccgccgagaagagaaagcccatccgggtcctgagcctgttcgatggcatcgccaccggtctgctggtgctgaaggacctgggcatccaggtggataggtacattgcctccgaggtgtgcgaggactccatcaccgtgggaatggtgcgtcatcagggcaagatcatgtacgtgggcgacgtgcggagcgtgacacagaagcatatccaggagtggggccctttcgacctggtgatcggcggcagcccttgcaatgacctgagcatcgtgaacccagcccggaagggcctgtacgagggaaccggcagactgttcttcgagttttacagactgctgcacgacgcccggcctaaggaaggcgacgaccggcccttcttttggctgttcgagaatgtggtggccatgggagtcagcgacaagcgggatattagccggttcctggagagcaaccccgtgatgatcgatgccaaggaagtgagcgccgcccaccgggccagatacttctggggcaatctgcctggcatgaacagacccctggccagcaccgtgaacgacaagctggagctgcaggagtgcctggagcacggccggatcgccaagttcagcaaggtgagaaccatcaccacccgaagcaacagcatcaaacaaggcaaggaccagcactttcctgtgttcatgaacgagaaggaggacatcctgtggtgtaccgagatggagagagtgttcgggttcccagtccactacacagatgtcagcaacatgtctagactggccagacagagactgctgggaagaagctggtccgtccctgtgatcagacacctgttcgcccctctgaaggagtacttcgcctgcgtgagcagcggcaacagcaacgccaacagccggggccccagcttctctagcggcctggtgccactgtccctgagagggagccacatgggccccatggagatctacaaaaccgtgagcgcctggaagcggcagcctgtgcgcgtgctgagcctgtttcggaatatcgataaagtcctgaaaagcctgggattcctggagagcggctctggctccggcggtggcaccctgaagtacgtggaggatgtgacaaacgtggtcagacgggatgtggagaagtggggccccttcgatctggtgtacggcagcacccaacccctgggcagctcttgtgaccggtgccctggctggtacatgtttcagttccaccggatcctgcagtacgccctgccgagacaggagtcccagcggccattcttttggattttcatggacaacttgctgctgaccgaggatgaccaggaaactaccactcggttcctgcagaccgaagccgtgaccctgcaggacgtgagaggccgggactaccagaacgccatgcgggtgtggtccaacatccctggactgaaaagcaagcacgcacctctgacccctaaagaagaggagtacctgcaggcccaggtgcggagcagaagcaagctggacgcccctaaggtggatctgctggtgaagaattgcctcctgcccctgagagagtacttcaagtatttcagccagaatagtctgcccctgggaggcagcggcggcggcatgatccaggcccaggagagcatcaccctggaggacgtggccgtggacttcacctgggaggagtggcagctgctgggcgccgcccagaaggacctgtacagggacgtgatgctggagaactacagcaacctggtggccgtgggctaccaggccagcaagcccgacgccctgttcaagctggagcagggcgagcagccctggaccaccgaggacggcatccacagcggcgcctgcagcgacatgggcggcccaagcagcggcgcccctcctcccagcggcggcagcccagccggctccccaacctctaccgaggagggcacctctgagtccgccacccccgagagcggccctggcacctccaccgagcccagcgagggcagcgcacccggcagccctgccggcagccccacctccacagaggagggaaccagcaccgagcccagcgaaggcagcgccccaggcaccagcaccgagcctagtgagcaggagattaaacggatcaacaagatcagaagaagacttgtgaaagacagcaacaccaagaaggccggcaagacaggccccatgaaaaccctgctggttagagtgatgacacccgatctgagagagcggctggaaaacctgagaaagaagcctgaaaatatcccccagcccatcagcaatacatctagagccaacctgaataagctgctgaccgattacaccgaaatgaagaaggcgatcctgcatgtgtactgggaagagttccagaaggaccctgtgggcctgatgagccgggtggcccagcctgccagcaagaagatcgatcagaacaagctgaaacctgagatggacgagaagggcaacctgaccaccgccggctttgcctgctctcagtgtggccagcccctgttcgtgtacaagctggagcaggtgtctgagaagggcaaggcttacaccaactacttcggacggtgcaatgtggccgagcacgaaaagctgatcctgctggcccagctgaagcccgagaaggatagcgacgaagccgtgacatatagcctgggaaagtttgggcagagggccctggatttctacagcattcatgtgaccaaggagtccacccaccccgtgaagcccctggcccagatcgccggaaacagatacgcctccggacctgtgggaaaggccctgagcgacgcatgtatgggcacaatcgcctccttcctgtctaagtaccaggacatcatcatcgaacaccagaaggtggtgaagggcaaccagaagagactggagagcctgcgggagctggccggcaaggaaaacctggaataccctagcgtgaccctgccacctcagcctcacaccaaggagggcgttgatgcctacaacgaagtgatcgcccgggtgcgaatgtgggtgaacctgaacctgtggcagaagctgaagctaagcagagatgatgccaagcctctgctgagactgaagggattcccttcctttcctctggtcgagagacaggccaacgaagtggactggtgggacatggtgtgtaacgtgaagaagctgatcaacgagaaaaaggaggatggcaaggtgttttggcagaatctggctggctacaagagacaggaagccctgagaccatacctgagcagcgaggaagatcggaagaagggaaagaaattcgctcggtaccagctgggcgacctgctgctgcacctggaaaagaagcacggcgaggactggggaaaggtgtacgacgaggcctgggagcggattgacaagaaagtggaaggcctgagcaagcacatcaagctggaagaggaacggagaagcgaggacgcccagagcaaggccgccctgaccgactggctgcgggctaaggccagcttcgtgatcgagggcctgaaggaggccgacaaggacgagttctgcagatgcgagctgaagctgcagaagtggtacggggacctgcggggaaagcccttcgccatcgaagccgagaacagcatcctggacatcagcggcttcagcaagcagtacaactgtgccttcatctggcagaaggacggcgtgaagaagctgaacctgtacctgatcatcaactacttcaagggcggcaagctgcggttcaagaagatcaaacctgaagccttcgaagccaacagattctacaccgtgatcaacaaaaagagcggcgagatcgtgcccatggaggtgaacttcaacttcgacgaccccaacctgatcatcctgcctctggcctttggcaagagacagggcagagaattcatctggaacgacctgctgtccctggaaaccggcagcctgaagctggccaacggaagagtgatcgagaagacactgtacaacagaagaacccggcaggatgagcctgccctgttcgtggccctgaccttcgagcggcgggaggtcctggactcctccaatatcaaaccaatgaacctgatcggcgtggcaagaggcgaaaacatccccgccgtgatcgccctgaccgaccccgagggctgcccactgagccggtttaaggatagcctgggaaacccaacccacatcctgagaatcggcgagagctataaggagaagcagcggaccatccaggccaagaaggaggtggagcagcggagagccggcggctacagccggaagtacgccagcaaagccaagaatctggcagacgatatggtgagaaacaccgctagagatctgctgtactacgccgtgacccaggatgccatgctgatcttcgccaacctgagccggggcttcggccggcagggcaagcggaccttcatggccgagagacagtacacacggatggaggactggctgaccgccaagctggcctacgagggcctgagcaagacctacctgtccaagacactggcccagtacacctccaagacatgcagcaactgtgggtttaccatcaccagcgccgactacgacagggtgctggagaagctgaagaagacagcaacaggctggatgaccacaattaacggcaaggagctgaaggtggagggccagattacctactacaacagatacaagagacagaacgtagtcaaggacctgtccgtcgagctggatagactgagcgaagaatctgtgaacaacgacatctcctcctggacaaagggcagaagcggagaagctctgagcctcctgaagaaaagattctcccatagacccgtgcaggagaagttcgtgtgcctgaactgcggcttcgagacacacgcagccgagcaagccgccctgaacatcgccagatcctggctgttcctgcggagccaggagtacaagaaataccagacaaacaagacaaccggcaacaccgataagagagccttcgtcgagacctggcagtccttttaccggaagaagcttaaggaggtgtggaaacctgccgtgcggtctggcggatctggcggaggctccaccagccccaagaaaaagagaaaagtctaagctgccttctgcggggcttgccttctggccatgcccttcttctctcccttgcacctgtacctcttggtctttgaataaagcctgagtaggaaggctagcaaaaaaaaaaaaaaaaaaaaaaaaaaaaaaaaaaaaaaaaaaaaaaaaaaaaaaaaaaaaaaaaaaaaaaaaaaaaaaaa

SEQ ID NO: 12495 - RNA, 5785 nt, synthetic construct
  source 1..5785: mol_type = other RNA
aggaaataagagagaaaagaagagtaagaagaaatataagagccaccatggcccctaagaagaagcgtaaagtgagccggatggaacgcctcgtctacgaggtgcggcagaagtgcagaaacatcgaggacatctgcatctcctgcggatctctgaacgtgaccctggagcacccactgttcatcggcggcatgtgccagaactgtaaaaactgttttctggagtgtgcctatcaatacgacgatgacggctaccagagctactgcaccatctgttgcggcggaagagaggtgctgatgtgtggaaataacaactgctgccggtgcttctgcgtggaatgcgtggacctgctggtgggccccggcgccgcccaggccgctattaaggaagatccttggaactgctacatgtgcggccacaagggcacatacggcctgctgagacggagagaggactggcctagcagactgcagatgttcttcgccaataaccacgaccaggagttcgacccccctaaggtgtaccctcccgtccccgccgagaagagaaagcccatccgggtcctgagcctgttcgatggcatcgccaccggtctgctggtgctgaaggacctgggcatccaggtggataggtacattgcctccgaggtgtgcgaggactccatcaccgtgggaatggtgcgtcatcagggcaagatcatgtacgtgggcgacgtgcggagcgtgacacagaagcatatccaggagtggggccctttcgacctggtgatcggcggcagcccttgcaatgacctgagcatcgtgaacccagcccggaagggcctgtacgagggaaccggcagactgttcttcgagttttacagactgctgcacgacgcccggcctaaggaaggcgacgaccggcccttcttttggctgttcgagaatgtggtggccatgggagtcagcgacaagcgggatattagccggttcctggagagcaaccccgtgatgatcgatgccaaggaagtgagcgccgcccaccgggccagatacttctggggcaatctgcctggcatgaacagacccctggccagcaccgtgaacgacaagctggagctgcaggagtgcctggagcacggccggatcgccaagttcagcaaggtgagaaccatcaccacccgaagcaacagcatcaaacaaggcaaggaccagcactttcctgtgttcatgaacgagaaggaggacatcctgtggtgtaccgagatggagagagtgttcgggttcccagtccactacacagatgtcagcaacatgtctagactggccagacagagactgctgggaagaagctggtccgtccctgtgatcagacacctgttcgcccctctgaaggagtacttcgcctgcgtgagcagcggcaacagcaacgccaacagccggggccccagcttctctagcggcctggtgccactgtccctgagagggagccacatgggccccatggagatctacaaaaccgtgagcgcctggaagcggcagcctgtgcgcgtgctgagcctgtttcggaatatcgataaagtcctgaaaagcctgggattcctggagagcggctctggctccggcggtggcaccctgaagtacgtggaggatgtgacaaacgtggtcagacgggatgtggagaagtggggccccttcgatctggtgtacggcagcacccaacccctgggcagctcttgtgaccggtgccctggctggtacatgtttcagttccaccggatcctgcagtacgccctgccgagacaggagtcccagcggccattcttttggattttcatggacaacttgctgctgaccgaggatgaccaggaaactaccactcggttcctgcagaccgaagccgtgaccctgcaggacgtgagaggccgggactaccagaacgccatgcgggtgtggtccaacatccctggactgaaaagcaagcacgcacctctgacccctaaagaagaggagtacctgcaggcccaggtgcggagcagaagcaagctggacgcccctaaggtggatctgctggtgaagaattgcctcctgcccctgagagagtacttcaagtatttcagccagaatagtctgcccctgggaggcagcggcggcggcgagccctgggccatcaccttcgccgacgtggccgtgtacttcagccccgaggagtggggctgcctgcagcccacccagagggccctgtacagggacgtgatgagggacacctacgtgctgctgagcgccctgggcggcggcggcgccaagcccgccctgatcagctgggtggagagggaggccgagctgtgggaccccgacgcccaggaccccgaggtgcccaagtggcccaccgaggccgacggcggcccaagcagcggcgcccctcctcccagcggcggcagcccagccggctccccaacctctaccgaggagggcacctctgagtccgccacccccgagagcggccctggcacctccaccgagcccagcgagggcagcgcacccggcagccctgccggcagccccacctccacagaggagggaaccagcaccgagcccagcgaaggcagcgccccaggcaccagcaccgagcctagtgagcaggagattaaacggatcaacaagatcagaagaagacttgtgaaagacagcaacaccaagaaggccggcaagacaggccccatgaaaaccctgctggttagagtgatgacacccgatctgagagagcggctggaaaacctgagaaagaagcctgaaaatatcccccagcccatcagcaatacatctagagccaacctgaataagctgctgaccgattacaccgaaatgaagaaggcgatcctgcatgtgtactgggaagagttccagaaggaccctgtgggcctgatgagccgggtggcccagcctgccagcaagaagatcgatcagaacaagctgaaacctgagatggacgagaagggcaacctgaccaccgccggctttgcctgctctcagtgtggccagcccctgttcgtgtacaagctggagcaggtgtctgagaagggcaaggcttacaccaactacttcggacggtgcaatgtggccgagcacgaaaagctgatcctgctggcccagctgaagcccgagaaggatagcgacgaagccgtgacatatagcctgggaaagtttgggcagagggccctggatttctacagcattcatgtgaccaaggagtccacccaccccgtgaagcccctggcccagatcgccggaaacagatacgcctccggacctgtgggaaaggccctgagcgacgcatgtatgggcacaatcgcctccttcctgtctaagtaccaggacatcatcatcgaacaccagaaggtggtgaagggcaaccagaagagactggagagcctgcgggagctggccggcaaggaaaacctggaataccctagcgtgaccctgccacctcagcctcacaccaaggagggcgttgatgcctacaacgaagtgatcgcccgggtgcgaatgtgggtgaacctgaacctgtggcagaagctgaagctaagcagagatgatgccaagcctctgctgagactgaagggattcccttcctttcctctggtcgagagacaggccaacgaagtggactggtgggacatggtgtgtaacgtgaagaagctgatcaacgagaaaaaggaggatggcaaggtgttttggcagaatctggctggctacaagagacaggaagccctgagaccatacctgagcagcgaggaagatcggaagaagggaaagaaattcgctcggtaccagctgggcgacctgctgctgcacctggaaaagaagcacggcgaggactggggaaaggtgtacgacgaggcctgggagcggattgacaagaaagtggaaggcctgagcaagcacatcaagctggaagaggaacggagaagcgaggacgcccagagcaaggccgccctgaccgactggctgcgggctaaggccagcttcgtgatcgagggcctgaaggaggccgacaaggacgagttctgcagatgcgagctgaagctgcagaagtggtacggggacctgcggggaaagcccttcgccatcgaagccgagaacagcatcctggacatcagcggcttcagcaagcagtacaactgtgccttcatctggcagaaggacggcgtgaagaagctgaacctgtacctgatcatcaactacttcaagggcggcaagctgcggttcaagaagatcaaacctgaagccttcgaagccaacagattctacaccgtgatcaacaaaaagagcggcgagatcgtgcccatggaggtgaacttcaacttcgacgaccccaacctgatcatcctgcctctggcctttggcaagagacagggcagagaattcatctggaacgacctgctgtccctggaaaccggcagcctgaagctggccaacggaagagtgatcgagaagacactgtacaacagaagaacccggcaggatgagcctgccctgttcgtggccctgaccttcgagcggcgggaggtcctggactcctccaatatcaaaccaatgaacctgatcggcgtggcaagaggcgaaaacatccccgccgtgatcgccctgaccgaccccgagggctgcccactgagccggtttaaggatagcctgggaaacccaacccacatcctgagaatcggcgagagctataaggagaagcagcggaccatccaggccaagaaggaggtggagcagcggagagccggcggctacagccggaagtacgccagcaaagccaagaatctggcagacgatatggtgagaaacaccgctagagatctgctgtactacgccgtgacccaggatgccatgctgatcttcgccaacctgagccggggcttcggccggcagggcaagcggaccttcatggccgagagacagtacacacggatggaggactggctgaccgccaagctggcctacgagggcctgagcaagacctacctgtccaagacactggcccagtacacctccaagacatgcagcaactgtgggtttaccatcaccagcgccgactacgacagggtgctggagaagctgaagaagacagcaacaggctggatgaccacaattaacggcaaggagctgaaggtggagggccagattacctactacaacagatacaagagacagaacgtagtcaaggacctgtccgtcgagctggatagactgagcgaagaatctgtgaacaacgacatctcctcctggacaaagggcagaagcggagaagctctgagcctcctgaagaaaagattctcccatagacccgtgcaggagaagttcgtgtgcctgaactgcggcttcgagacacacgcagccgagcaagccgccctgaacatcgccagatcctggctgttcctgcggagccaggagtacaagaaataccagacaaacaagacaaccggcaacaccgataagagagccttcgtcgagacctggcagtccttttaccggaagaagcttaaggaggtgtggaaacctgccgtgcggtctggcggatctggcggaggctccaccagccccaagaaaaagagaaaagtctaagctgccttctgcggggcttgccttctggccatgcccttcttctctcccttgcacctgtacctcttggtctttgaataaagcctgagtaggaaggctagcaaaaaaaaaaaaaaaaaaaaaaaaaaaaaaaaaaaaaaaaaaaaaaaaaaaaaaaaaaaaaaaaaaaaaaaaaaaaaaaa

SEQ ID NO: 12496 - RNA, 5785 nt, synthetic construct
  source 1..5785: mol_type = other RNA
aggaaataagagagaaaagaagagtaagaagaaatataagagccaccatggcccctaagaagaagcgtaaagtgagccggatggaacgcctcgtctacgaggtgcggcagaagtgcagaaacatcgaggacatctgcatctcctgcggatctctgaacgtgaccctggagcacccactgttcatcggcggcatgtgccagaactgtaaaaactgttttctggagtgtgcctatcaatacgacgatgacggctaccagagctactgcaccatctgttgcggcggaagagaggtgctgatgtgtggaaataacaactgctgccggtgcttctgcgtggaatgcgtggacctgctggtgggccccggcgccgcccaggccgctattaaggaagatccttggaactgctacatgtgcggccacaagggcacatacggcctgctgagacggagagaggactggcctagcagactgcagatgttcttcgccaataaccacgaccaggagttcgacccccctaaggtgtaccctcccgtccccgccgagaagagaaagcccatccgggtcctgagcctgttcgatggcatcgccaccggtctgctggtgctgaaggacctgggcatccaggtggataggtacattgcctccgaggtgtgcgaggactccatcaccgtgggaatggtgcgtcatcagggcaagatcatgtacgtgggcgacgtgcggagcgtgacacagaagcatatccaggagtggggccctttcgacctggtgatcggcggcagcccttgcaatgacctgagcatcgtgaacccagcccggaagggcctgtacgagggaaccggcagactgttcttcgagttttacagactgctgcacgacgcccggcctaaggaaggcgacgaccggcccttcttttggctgttcgagaatgtggtggccatgggagtcagcgacaagcgggatattagccggttcctggagagcaaccccgtgatgatcgatgccaaggaagtgagcgccgcccaccgggccagatacttctggggcaatctgcctggcatgaacagacccctggccagcaccgtgaacgacaagctggagctgcaggagtgcctggagcacggccggatcgccaagttcagcaaggtgagaaccatcaccacccgaagcaacagcatcaaacaaggcaaggaccagcactttcctgtgttcatgaacgagaaggaggacatcctgtggtgtaccgagatggagagagtgttcgggttcccagtccactacacagatgtcagcaacatgtctagactggccagacagagactgctgggaagaagctggtccgtccctgtgatcagacacctgttcgcccctctgaaggagtacttcgcctgcgtgagcagcggcaacagcaacgccaacagccggggccccagcttctctagcggcctggtgccactgtccctgagagggagccacatgggccccatggagatctacaaaaccgtgagcgcctggaagcggcagcctgtgcgcgtgctgagcctgtttcggaatatcgataaagtcctgaaaagcctgggattcctggagagcggctctggctccggcggtggcaccctgaagtacgtggaggatgtgacaaacgtggtcagacgggatgtggagaagtggggccccttcgatctggtgtacggcagcacccaacccctgggcagctcttgtgaccggtgccctggctggtacatgtttcagttccaccggatcctgcagtacgccctgccgagacaggagtcccagcggccattcttttggattttcatggacaacttgctgctgaccgaggatgaccaggaaactaccactcggttcctgcagaccgaagccgtgaccctgcaggacgtgagaggccgggactaccagaacgccatgcgggtgtggtccaacatccctggactgaaaagcaagcacgcacctctgacccctaaagaagaggagtacctgcaggcccaggtgcggagcagaagcaagctggacgcccctaaggtggatctgctggtgaagaattgcctcctgcccctgagagagtacttcaagtatttcagccagaatagtctgcccctgggaggcagcggcggcggcagccaggagcccgtgagcttcgaggaggtggccgtgtacttcagcagggaggagtgggccctgctggaccccgcccagagggccctgtacagggacgtgatgctggagacctacgagtgcgtggccagcctggcccccctgcccgcccccaagcccatggtgatcagcctgctggaggagggcgaggagccctggatccccgacgtgggcagccccgaggccgtggccggcgacgtgagccccggcggcccaagcagcggcgcccctcctcccagcggcggcagcccagccggctccccaacctctaccgaggagggcacctctgagtccgccacccccgagagcggccctggcacctccaccgagcccagcgagggcagcgcacccggcagccctgccggcagccccacctccacagaggagggaaccagcaccgagcccagcgaaggcagcgccccaggcaccagcaccgagcctagtgagcaggagattaaacggatcaacaagatcagaagaagacttgtgaaagacagcaacaccaagaaggccggcaagacaggccccatgaaaaccctgctggttagagtgatgacacccgatctgagagagcggctggaaaacctgagaaagaagcctgaaaatatcccccagcccatcagcaatacatctagagccaacctgaataagctgctgaccgattacaccgaaatgaagaaggcgatcctgcatgtgtactgggaagagttccagaaggaccctgtgggcctgatgagccgggtggcccagcctgccagcaagaagatcgatcagaacaagctgaaacctgagatggacgagaagggcaacctgaccaccgccggctttgcctgctctcagtgtggccagcccctgttcgtgtacaagctggagcaggtgtctgagaagggcaaggcttacaccaactacttcggacggtgcaatgtggccgagcacgaaaagctgatcctgctggcccagctgaagcccgagaaggatagcgacgaagccgtgacatatagcctgggaaagtttgggcagagggccctggatttctacagcattcatgtgaccaaggagtccacccaccccgtgaagcccctggcccagatcgccggaaacagatacgcctccggacctgtgggaaaggccctgagcgacgcatgtatgggcacaatcgcctccttcctgtctaagtaccaggacatcatcatcgaacaccagaaggtggtgaagggcaaccagaagagactggagagcctgcgggagctggccggcaaggaaaacctggaataccctagcgtgaccctgccacctcagcctcacaccaaggagggcgttgatgcctacaacgaagtgatcgcccgggtgcgaatgtgggtgaacctgaacctgtggcagaagctgaagctaagcagagatgatgccaagcctctgctgagactgaagggattcccttcctttcctctggtcgagagacaggccaacgaagtggactggtgggacatggtgtgtaacgtgaagaagctgatcaacgagaaaaaggaggatggcaaggtgttttggcagaatctggctggctacaagagacaggaagccctgagaccatacctgagcagcgaggaagatcggaagaagggaaagaaattcgctcggtaccagctgggcgacctgctgctgcacctggaaaagaagcacggcgaggactggggaaaggtgtacgacgaggcctgggagcggattgacaagaaagtggaaggcctgagcaagcacatcaagctggaagaggaacggagaagcgaggacgcccagagcaaggccgccctgaccgactggctgcgggctaaggccagcttcgtgatcgagggcctgaaggaggccgacaaggacgagttctgcagatgcgagctgaagctgcagaagtggtacggggacctgcggggaaagcccttcgccatcgaagccgagaacagcatcctggacatcagcggcttcagcaagcagtacaactgtgccttcatctggcagaaggacggcgtgaagaagctgaacctgtacctgatcatcaactacttcaagggcggcaagctgcggttcaagaagatcaaacctgaagccttcgaagccaacagattctacaccgtgatcaacaaaaagagcggcgagatcgtgcccatggaggtgaacttcaacttcgacgaccccaacctgatcatcctgcctctggcctttggcaagagacagggcagagaattcatctggaacgacctgctgtccctggaaaccggcagcctgaagctggccaacggaagagtgatcgagaagacactgtacaacagaagaacccggcaggatgagcctgccctgttcgtggccctgaccttcgagcggcgggaggtcctggactcctccaatatcaaaccaatgaacctgatcggcgtggcaagaggcgaaaacatccccgccgtgatcgccctgaccgaccccgagggctgcccactgagccggtttaaggatagcctgggaaacccaacccacatcctgagaatcggcgagagctataaggagaagcagcggaccatccaggccaagaaggaggtggagcagcggagagccggcggctacagccggaagtacgccagcaaagccaagaatctggcagacgatatggtgagaaacaccgctagagatctgctgtactacgccgtgacccaggatgccatgctgatcttcgccaacctgagccggggcttcggccggcagggcaagcggaccttcatggccgagagacagtacacacggatggaggactggctgaccgccaagctggcctacgagggcctgagcaagacctacctgtccaagacactggcccagtacacctccaagacatgcagcaactgtgggtttaccatcaccagcgccgactacgacagggtgctggagaagctgaagaagacagcaacaggctggatgaccacaattaacggcaaggagctgaaggtggagggccagattacctactacaacagatacaagagacagaacgtagtcaaggacctgtccgtcgagctggatagactgagcgaagaatctgtgaacaacgacatctcctcctggacaaagggcagaagcggagaagctctgagcctcctgaagaaaagattctcccatagacccgtgcaggagaagttcgtgtgcctgaactgcggcttcgagacacacgcagccgagcaagccgccctgaacatcgccagatcctggctgttcctgcggagccaggagtacaagaaataccagacaaacaagacaaccggcaacaccgataagagagccttcgtcgagacctggcagtccttttaccggaagaagcttaaggaggtgtggaaacctgccgtgcggtctggcggatctggcggaggctccaccagccccaagaaaaagagaaaagtctaagctgccttctgcggggcttgccttctggccatgcccttcttctctcccttgcacctgtacctcttggtctttgaataaagcctgagtaggaaggctagcaaaaaaaaaaaaaaaaaaaaaaaaaaaaaaaaaaaaaaaaaaaaaaaaaaaaaaaaaaaaaaaaaaaaaaaaaaaaaaaa

SEQ ID NO: 12497 - RNA, 5785 nt, synthetic construct
  source 1..5785: mol_type = other RNA
aggaaataagagagaaaagaagagtaagaagaaatataagagccaccatggcccctaagaagaagcgtaaagtgagccggatggaacgcctcgtctacgaggtgcggcagaagtgcagaaacatcgaggacatctgcatctcctgcggatctctgaacgtgaccctggagcacccactgttcatcggcggcatgtgccagaactgtaaaaactgttttctggagtgtgcctatcaatacgacgatgacggctaccagagctactgcaccatctgttgcggcggaagagaggtgctgatgtgtggaaataacaactgctgccggtgcttctgcgtggaatgcgtggacctgctggtgggccccggcgccgcccaggccgctattaaggaagatccttggaactgctacatgtgcggccacaagggcacatacggcctgctgagacggagagaggactggcctagcagactgcagatgttcttcgccaataaccacgaccaggagttcgacccccctaaggtgtaccctcccgtccccgccgagaagagaaagcccatccgggtcctgagcctgttcgatggcatcgccaccggtctgctggtgctgaaggacctgggcatccaggtggataggtacattgcctccgaggtgtgcgaggactccatcaccgtgggaatggtgcgtcatcagggcaagatcatgtacgtgggcgacgtgcggagcgtgacacagaagcatatccaggagtggggccctttcgacctggtgatcggcggcagcccttgcaatgacctgagcatcgtgaacccagcccggaagggcctgtacgagggaaccggcagactgttcttcgagttttacagactgctgcacgacgcccggcctaaggaaggcgacgaccggcccttcttttggctgttcgagaatgtggtggccatgggagtcagcgacaagcgggatattagccggttcctggagagcaaccccgtgatgatcgatgccaaggaagtgagcgccgcccaccgggccagatacttctggggcaatctgcctggcatgaacagacccctggccagcaccgtgaacgacaagctggagctgcaggagtgcctggagcacggccggatcgccaagttcagcaaggtgagaaccatcaccacccgaagcaacagcatcaaacaaggcaaggaccagcactttcctgtgttcatgaacgagaaggaggacatcctgtggtgtaccgagatggagagagtgttcgggttcccagtccactacacagatgtcagcaacatgtctagactggccagacagagactgctgggaagaagctggtccgtccctgtgatcagacacctgttcgcccctctgaaggagtacttcgcctgcgtgagcagcggcaacagcaacgccaacagccggggccccagcttctctagcggcctggtgccactgtccctgagagggagccacatgggccccatggagatctacaaaaccgtgagcgcctggaagcggcagcctgtgcgcgtgctgagcctgtttcggaatatcgataaagtcctgaaaagcctgggattcctggagagcggctctggctccggcggtggcaccctgaagtacgtggaggatgtgacaaacgtggtcagacgggatgtggagaagtggggccccttcgatctggtgtacggcagcacccaacccctgggcagctcttgtgaccggtgccctggctggtacatgtttcagttccaccggatcctgcagtacgccctgccgagacaggagtcccagcggccattcttttggattttcatggacaacttgctgctgaccgaggatgaccaggaaactaccactcggttcctgcagaccgaagccgtgaccctgcaggacgtgagaggccgggactaccagaacgccatgcgggtgtggtccaacatccctggactgaaaagcaagcacgcacctctgacccctaaagaagaggagtacctgcaggcccaggtgcggagcagaagcaagctggacgcccctaaggtggatctgctggtgaagaattgcctcctgcccctgagagagtacttcaagtatttcagccagaatagtctgcccctgggaggcagcggcggcggcgcccaggcccccctgagcttcgaggacgtggccgtgagcttcagcagggaggagtggaggctgctggtgcccgcccagaaggacctgtacagggacgtgatgctggagaactacaggaacctggtgagcgtgggctaccaggccagcgagcccggcagcctgttccagctggagcacgccggccccctgagggccgtggagggcgccgcccccaggcccccctgccccgaggagatctgggagggcggcccaagcagcggcgcccctcctcccagcggcggcagcccagccggctccccaacctctaccgaggagggcacctctgagtccgccacccccgagagcggccctggcacctccaccgagcccagcgagggcagcgcacccggcagccctgccggcagccccacctccacagaggagggaaccagcaccgagcccagcgaaggcagcgccccaggcaccagcaccgagcctagtgagcaggagattaaacggatcaacaagatcagaagaagacttgtgaaagacagcaacaccaagaaggccggcaagacaggccccatgaaaaccctgctggttagagtgatgacacccgatctgagagagcggctggaaaacctgagaaagaagcctgaaaatatcccccagcccatcagcaatacatctagagccaacctgaataagctgctgaccgattacaccgaaatgaagaaggcgatcctgcatgtgtactgggaagagttccagaaggaccctgtgggcctgatgagccgggtggcccagcctgccagcaagaagatcgatcagaacaagctgaaacctgagatggacgagaagggcaacctgaccaccgccggctttgcctgctctcagtgtggccagcccctgttcgtgtacaagctggagcaggtgtctgagaagggcaaggcttacaccaactacttcggacggtgcaatgtggccgagcacgaaaagctgatcctgctggcccagctgaagcccgagaaggatagcgacgaagccgtgacatatagcctgggaaagtttgggcagagggccctggatttctacagcattcatgtgaccaaggagtccacccaccccgtgaagcccctggcccagatcgccggaaacagatacgcctccggacctgtgggaaaggccctgagcgacgcatgtatgggcacaatcgcctccttcctgtctaagtaccaggacatcatcatcgaacaccagaaggtggtgaagggcaaccagaagagactggagagcctgcgggagctggccggcaaggaaaacctggaataccctagcgtgaccctgccacctcagcctcacaccaaggagggcgttgatgcctacaacgaagtgatcgcccgggtgcgaatgtgggtgaacctgaacctgtggcagaagctgaagctaagcagagatgatgccaagcctctgctgagactgaagggattcccttcctttcctctggtcgagagacaggccaacgaagtggactggtgggacatggtgtgtaacgtgaagaagctgatcaacgagaaaaaggaggatggcaaggtgttttggcagaatctggctggctacaagagacaggaagccctgagaccatacctgagcagcgaggaagatcggaagaagggaaagaaattcgctcggtaccagctgggcgacctgctgctgcacctggaaaagaagcacggcgaggactggggaaaggtgtacgacgaggcctgggagcggattgacaagaaagtggaaggcctgagcaagcacatcaagctggaagaggaacggagaagcgaggacgcccagagcaaggccgccctgaccgactggctgcgggctaaggccagcttcgtgatcgagggcctgaaggaggccgacaaggacgagttctgcagatgcgagctgaagctgcagaagtggtacggggacctgcggggaaagcccttcgccatcgaagccgagaacagcatcctggacatcagcggcttcagcaagcagtacaactgtgccttcatctggcagaaggacggcgtgaagaagctgaacctgtacctgatcatcaactacttcaagggcggcaagctgcggttcaagaagatcaaacctgaagccttcgaagccaacagattctacaccgtgatcaacaaaaagagcggcgagatcgtgcccatggaggtgaacttcaacttcgacgaccccaacctgatcatcctgcctctggcctttggcaagagacagggcagagaattcatctggaacgacctgctgtccctggaaaccggcagcctgaagctggccaacggaagagtgatcgagaagacactgtacaacagaagaacccggcaggatgagcctgccctgttcgtggccctgaccttcgagcggcgggaggtcctggactcctccaatatcaaaccaatgaacctgatcggcgtggcaagaggcgaaaacatccccgccgtgatcgccctgaccgaccccgagggctgcccactgagccggtttaaggatagcctgggaaacccaacccacatcctgagaatcggcgagagctataaggagaagcagcggaccatccaggccaagaaggaggtggagcagcggagagccggcggctacagccggaagtacgccagcaaagccaagaatctggcagacgatatggtgagaaacaccgctagagatctgctgtactacgccgtgacccaggatgccatgctgatcttcgccaacctgagccggggcttcggccggcagggcaagcggaccttcatggccgagagacagtacacacggatggaggactggctgaccgccaagctggcctacgagggcctgagcaagacctacctgtccaagacactggcccagtacacctccaagacatgcagcaactgtgggtttaccatcaccagcgccgactacgacagggtgctggagaagctgaagaagacagcaacaggctggatgaccacaattaacggcaaggagctgaaggtggagggccagattacctactacaacagatacaagagacagaacgtagtcaaggacctgtccgtcgagctggatagactgagcgaagaatctgtgaacaacgacatctcctcctggacaaagggcagaagcggagaagctctgagcctcctgaagaaaagattctcccatagacccgtgcaggagaagttcgtgtgcctgaactgcggcttcgagacacacgcagccgagcaagccgccctgaacatcgccagatcctggctgttcctgcggagccaggagtacaagaaataccagacaaacaagacaaccggcaacaccgataagagagccttcgtcgagacctggcagtccttttaccggaagaagcttaaggaggtgtggaaacctgccgtgcggtctggcggatctggcggaggctccaccagccccaagaaaaagagaaaagtctaagctgccttctgcggggcttgccttctggccatgcccttcttctctcccttgcacctgtacctcttggtctttgaataaagcctgagtaggaaggctagcaaaaaaaaaaaaaaaaaaaaaaaaaaaaaaaaaaaaaaaaaaaaaaaaaaaaaaaaaaaaaaaaaaaaaaaaaaaaaaaa

SEQ ID NO: 12498 - RNA, 5785 nt, synthetic construct
  source 1..5785: mol_type = other RNA
aggaaataagagagaaaagaagagtaagaagaaatataagagccaccatggcccctaagaagaagcgtaaagtgagccggatggaacgcctcgtctacgaggtgcggcagaagtgcagaaacatcgaggacatctgcatctcctgcggatctctgaacgtgaccctggagcacccactgttcatcggcggcatgtgccagaactgtaaaaactgttttctggagtgtgcctatcaatacgacgatgacggctaccagagctactgcaccatctgttgcggcggaagagaggtgctgatgtgtggaaataacaactgctgccggtgcttctgcgtggaatgcgtggacctgctggtgggccccggcgccgcccaggccgctattaaggaagatccttggaactgctacatgtgcggccacaagggcacatacggcctgctgagacggagagaggactggcctagcagactgcagatgttcttcgccaataaccacgaccaggagttcgacccccctaaggtgtaccctcccgtccccgccgagaagagaaagcccatccgggtcctgagcctgttcgatggcatcgccaccggtctgctggtgctgaaggacctgggcatccaggtggataggtacattgcctccgaggtgtgcgaggactccatcaccgtgggaatggtgcgtcatcagggcaagatcatgtacgtgggcgacgtgcggagcgtgacacagaagcatatccaggagtggggccctttcgacctggtgatcggcggcagcccttgcaatgacctgagcatcgtgaacccagcccggaagggcctgtacgagggaaccggcagactgttcttcgagttttacagactgctgcacgacgcccggcctaaggaaggcgacgaccggcccttcttttggctgttcgagaatgtggtggccatgggagtcagcgacaagcgggatattagccggttcctggagagcaaccccgtgatgatcgatgccaaggaagtgagcgccgcccaccgggccagatacttctggggcaatctgcctggcatgaacagacccctggccagcaccgtgaacgacaagctggagctgcaggagtgcctggagcacggccggatcgccaagttcagcaaggtgagaaccatcaccacccgaagcaacagcatcaaacaaggcaaggaccagcactttcctgtgttcatgaacgagaaggaggacatcctgtggtgtaccgagatggagagagtgttcgggttcccagtccactacacagatgtcagcaacatgtctagactggccagacagagactgctgggaagaagctggtccgtccctgtgatcagacacctgttcgcccctctgaaggagtacttcgcctgcgtgagcagcggcaacagcaacgccaacagccggggccccagcttctctagcggcctggtgccactgtccctgagagggagccacatgggccccatggagatctacaaaaccgtgagcgcctggaagcggcagcctgtgcgcgtgctgagcctgtttcggaatatcgataaagtcctgaaaagcctgggattcctggagagcggctctggctccggcggtggcaccctgaagtacgtggaggatgtgacaaacgtggtcagacgggatgtggagaagtggggccccttcgatctggtgtacggcagcacccaacccctgggcagctcttgtgaccggtgccctggctggtacatgtttcagttccaccggatcctgcagtacgccctgccgagacaggagtcccagcggccattcttttggattttcatggacaacttgctgctgaccgaggatgaccaggaaactaccactcggttcctgcagaccgaagccgtgaccctgcaggacgtgagaggccgggactaccagaacgccatgcgggtgtggtccaacatccctggactgaaaagcaagcacgcacctctgacccctaaagaagaggagtacctgcaggcccaggtgcggagcagaagcaagctggacgcccctaaggtggatctgctggtgaagaattgcctcctgcccctgagagagtacttcaagtatttcagccagaatagtctgcccctgggaggcagcggcggcggcccccaggagcccgtgaccttcgccgacgtggccgtgctgttcacccccgaggagtggctgttcctggacagcgcccagaagagcctgtacagggacgtgatgctggagaactacaggaacctggccagcgtgggcgaccagctgtgcaagaccaagatgagcagccacatggagcagagggaggagctgtgcgtgaccgagaggggcgtgttccccggcgcccacctgggcccccacctgcagggcggcccaagcagcggcgcccctcctcccagcggcggcagcccagccggctccccaacctctaccgaggagggcacctctgagtccgccacccccgagagcggccctggcacctccaccgagcccagcgagggcagcgcacccggcagccctgccggcagccccacctccacagaggagggaaccagcaccgagcccagcgaaggcagcgccccaggcaccagcaccgagcctagtgagcaggagattaaacggatcaacaagatcagaagaagacttgtgaaagacagcaacaccaagaaggccggcaagacaggccccatgaaaaccctgctggttagagtgatgacacccgatctgagagagcggctggaaaacctgagaaagaagcctgaaaatatcccccagcccatcagcaatacatctagagccaacctgaataagctgctgaccgattacaccgaaatgaagaaggcgatcctgcatgtgtactgggaagagttccagaaggaccctgtgggcctgatgagccgggtggcccagcctgccagcaagaagatcgatcagaacaagctgaaacctgagatggacgagaagggcaacctgaccaccgccggctttgcctgctctcagtgtggccagcccctgttcgtgtacaagctggagcaggtgtctgagaagggcaaggcttacaccaactacttcggacggtgcaatgtggccgagcacgaaaagctgatcctgctggcccagctgaagcccgagaaggatagcgacgaagccgtgacatatagcctgggaaagtttgggcagagggccctggatttctacagcattcatgtgaccaaggagtccacccaccccgtgaagcccctggcccagatcgccggaaacagatacgcctccggacctgtgggaaaggccctgagcgacgcatgtatgggcacaatcgcctccttcctgtctaagtaccaggacatcatcatcgaacaccagaaggtggtgaagggcaaccagaagagactggagagcctgcgggagctggccggcaaggaaaacctggaataccctagcgtgaccctgccacctcagcctcacaccaaggagggcgttgatgcctacaacgaagtgatcgcccgggtgcgaatgtgggtgaacctgaacctgtggcagaagctgaagctaagcagagatgatgccaagcctctgctgagactgaagggattcccttcctttcctctggtcgagagacaggccaacgaagtggactggtgggacatggtgtgtaacgtgaagaagctgatcaacgagaaaaaggaggatggcaaggtgttttggcagaatctggctggctacaagagacaggaagccctgagaccatacctgagcagcgaggaagatcggaagaagggaaagaaattcgctcggtaccagctgggcgacctgctgctgcacctggaaaagaagcacggcgaggactggggaaaggtgtacgacgaggcctgggagcggattgacaagaaagtggaaggcctgagcaagcacatcaagctggaagaggaacggagaagcgaggacgcccagagcaaggccgccctgaccgactggctgcgggctaaggccagcttcgtgatcgagggcctgaaggaggccgacaaggacgagttctgcagatgcgagctgaagctgcagaagtggtacggggacctgcggggaaagcccttcgccatcgaagccgagaacagcatcctggacatcagcggcttcagcaagcagtacaactgtgccttcatctggcagaaggacggcgtgaagaagctgaacctgtacctgatcatcaactacttcaagggcggcaagctgcggttcaagaagatcaaacctgaagccttcgaagccaacagattctacaccgtgatcaacaaaaagagcggcgagatcgtgcccatggaggtgaacttcaacttcgacgaccccaacctgatcatcctgcctctggcctttggcaagagacagggcagagaattcatctggaacgacctgctgtccctggaaaccggcagcctgaagctggccaacggaagagtgatcgagaagacactgtacaacagaagaacccggcaggatgagcctgccctgttcgtggccctgaccttcgagcggcgggaggtcctggactcctccaatatcaaaccaatgaacctgatcggcgtggcaagaggcgaaaacatccccgccgtgatcgccctgaccgaccccgagggctgcccactgagccggtttaaggatagcctgggaaacccaacccacatcctgagaatcggcgagagctataaggagaagcagcggaccatccaggccaagaaggaggtggagcagcggagagccggcggctacagccggaagtacgccagcaaagccaagaatctggcagacgatatggtgagaaacaccgctagagatctgctgtactacgccgtgacccaggatgccatgctgatcttcgccaacctgagccggggcttcggccggcagggcaagcggaccttcatggccgagagacagtacacacggatggaggactggctgaccgccaagctggcctacgagggcctgagcaagacctacctgtccaagacactggcccagtacacctccaagacatgcagcaactgtgggtttaccatcaccagcgccgactacgacagggtgctggagaagctgaagaagacagcaacaggctggatgaccacaattaacggcaaggagctgaaggtggagggccagattacctactacaacagatacaagagacagaacgtagtcaaggacctgtccgtcgagctggatagactgagcgaagaatctgtgaacaacgacatctcctcctggacaaagggcagaagcggagaagctctgagcctcctgaagaaaagattctcccatagacccgtgcaggagaagttcgtgtgcctgaactgcggcttcgagacacacgcagccgagcaagccgccctgaacatcgccagatcctggctgttcctgcggagccaggagtacaagaaataccagacaaacaagacaaccggcaacaccgataagagagccttcgtcgagacctggcagtccttttaccggaagaagcttaaggaggtgtggaaacctgccgtgcggtctggcggatctggcggaggctccaccagccccaagaaaaagagaaaagtctaagctgccttctgcggggcttgccttctggccatgcccttcttctctcccttgcacctgtacctcttggtctttgaataaagcctgagtaggaaggctagcaaaaaaaaaaaaaaaaaaaaaaaaaaaaaaaaaaaaaaaaaaaaaaaaaaaaaaaaaaaaaaaaaaaaaaaaaaaaaaaa

SEQ ID NO: 12499 - RNA, 5785 nt, synthetic construct
  source 1..5785: mol_type = other RNA
aggaaataagagagaaaagaagagtaagaagaaatataagagccaccatggcccctaagaagaagcgtaaagtgagccggatggaacgcctcgtctacgaggtgcggcagaagtgcagaaacatcgaggacatctgcatctcctgcggatctctgaacgtgaccctggagcacccactgttcatcggcggcatgtgccagaactgtaaaaactgttttctggagtgtgcctatcaatacgacgatgacggctaccagagctactgcaccatctgttgcggcggaagagaggtgctgatgtgtggaaataacaactgctgccggtgcttctgcgtggaatgcgtggacctgctggtgggccccggcgccgcccaggccgctattaaggaagatccttggaactgctacatgtgcggccacaagggcacatacggcctgctgagacggagagaggactggcctagcagactgcagatgttcttcgccaataaccacgaccaggagttcgacccccctaaggtgtaccctcccgtccccgccgagaagagaaagcccatccgggtcctgagcctgttcgatggcatcgccaccggtctgctggtgctgaaggacctgggcatccaggtggataggtacattgcctccgaggtgtgcgaggactccatcaccgtgggaatggtgcgtcatcagggcaagatcatgtacgtgggcgacgtgcggagcgtgacacagaagcatatccaggagtggggccctttcgacctggtgatcggcggcagcccttgcaatgacctgagcatcgtgaacccagcccggaagggcctgtacgagggaaccggcagactgttcttcgagttttacagactgctgcacgacgcccggcctaaggaaggcgacgaccggcccttcttttggctgttcgagaatgtggtggccatgggagtcagcgacaagcgggatattagccggttcctggagagcaaccccgtgatgatcgatgccaaggaagtgagcgccgcccaccgggccagatacttctggggcaatctgcctggcatgaacagacccctggccagcaccgtgaacgacaagctggagctgcaggagtgcctggagcacggccggatcgccaagttcagcaaggtgagaaccatcaccacccgaagcaacagcatcaaacaaggcaaggaccagcactttcctgtgttcatgaacgagaaggaggacatcctgtggtgtaccgagatggagagagtgttcgggttcccagtccactacacagatgtcagcaacatgtctagactggccagacagagactgctgggaagaagctggtccgtccctgtgatcagacacctgttcgcccctctgaaggagtacttcgcctgcgtgagcagcggcaacagcaacgccaacagccggggccccagcttctctagcggcctggtgccactgtccctgagagggagccacatgggccccatggagatctacaaaaccgtgagcgcctggaagcggcagcctgtgcgcgtgctgagcctgtttcggaatatcgataaagtcctgaaaagcctgggattcctggagagcggctctggctccggcggtggcaccctgaagtacgtggaggatgtgacaaacgtggtcagacgggatgtggagaagtggggccccttcgatctggtgtacggcagcacccaacccctgggcagctcttgtgaccggtgccctggctggtacatgtttcagttccaccggatcctgcagtacgccctgccgagacaggagtcccagcggccattcttttggattttcatggacaacttgctgctgaccgaggatgaccaggaaactaccactcggttcctgcagaccgaagccgtgaccctgcaggacgtgagaggccgggactaccagaacgccatgcgggtgtggtccaacatccctggactgaaaagcaagcacgcacctctgacccctaaagaagaggagtacctgcaggcccaggtgcggagcagaagcaagctggacgcccctaaggtggatctgctggtgaagaattgcctcctgcccctgagagagtacttcaagtatttcagccagaatagtctgcccctgggaggcagcggcggcggcatggccttcgaggacgtggccgtgtacttcagccaggaggagtggggcctgctggacaccgcccagagggccctgtacaggcacgtgatgctggagaacttcaccctggtgagcagcctgggcctgagcaccagcaggcccagggtggtggtgcagctggagaggggcgaggagccctgggtgcccagcaggatcgacagcacccccgccaggaacgcccagggcaggaggaaccccggcagcggcggcccaagcagcggcgcccctcctcccagcggcggcagcccagccggctccccaacctctaccgaggagggcacctctgagtccgccacccccgagagcggccctggcacctccaccgagcccagcgagggcagcgcacccggcagccctgccggcagccccacctccacagaggagggaaccagcaccgagcccagcgaaggcagcgccccaggcaccagcaccgagcctagtgagcaggagattaaacggatcaacaagatcagaagaagacttgtgaaagacagcaacaccaagaaggccggcaagacaggccccatgaaaaccctgctggttagagtgatgacacccgatctgagagagcggctggaaaacctgagaaagaagcctgaaaatatcccccagcccatcagcaatacatctagagccaacctgaataagctgctgaccgattacaccgaaatgaagaaggcgatcctgcatgtgtactgggaagagttccagaaggaccctgtgggcctgatgagccgggtggcccagcctgccagcaagaagatcgatcagaacaagctgaaacctgagatggacgagaagggcaacctgaccaccgccggctttgcctgctctcagtgtggccagcccctgttcgtgtacaagctggagcaggtgtctgagaagggcaaggcttacaccaactacttcggacggtgcaatgtggccgagcacgaaaagctgatcctgctggcccagctgaagcccgagaaggatagcgacgaagccgtgacatatagcctgggaaagtttgggcagagggccctggatttctacagcattcatgtgaccaaggagtccacccaccccgtgaagcccctggcccagatcgccggaaacagatacgcctccggacctgtgggaaaggccctgagcgacgcatgtatgggcacaatcgcctccttcctgtctaagtaccaggacatcatcatcgaacaccagaaggtggtgaagggcaaccagaagagactggagagcctgcgggagctggccggcaaggaaaacctggaataccctagcgtgaccctgccacctcagcctcacaccaaggagggcgttgatgcctacaacgaagtgatcgcccgggtgcgaatgtgggtgaacctgaacctgtggcagaagctgaagctaagcagagatgatgccaagcctctgctgagactgaagggattcccttcctttcctctggtcgagagacaggccaacgaagtggactggtgggacatggtgtgtaacgtgaagaagctgatcaacgagaaaaaggaggatggcaaggtgttttggcagaatctggctggctacaagagacaggaagccctgagaccatacctgagcagcgaggaagatcggaagaagggaaagaaattcgctcggtaccagctgggcgacctgctgctgcacctggaaaagaagcacggcgaggactggggaaaggtgtacgacgaggcctgggagcggattgacaagaaagtggaaggcctgagcaagcacatcaagctggaagaggaacggagaagcgaggacgcccagagcaaggccgccctgaccgactggctgcgggctaaggccagcttcgtgatcgagggcctgaaggaggccgacaaggacgagttctgcagatgcgagctgaagctgcagaagtggtacggggacctgcggggaaagcccttcgccatcgaagccgagaacagcatcctggacatcagcggcttcagcaagcagtacaactgtgccttcatctggcagaaggacggcgtgaagaagctgaacctgtacctgatcatcaactacttcaagggcggcaagctgcggttcaagaagatcaaacctgaagccttcgaagccaacagattctacaccgtgatcaacaaaaagagcggcgagatcgtgcccatggaggtgaacttcaacttcgacgaccccaacctgatcatcctgcctctggcctttggcaagagacagggcagagaattcatctggaacgacctgctgtccctggaaaccggcagcctgaagctggccaacggaagagtgatcgagaagacactgtacaacagaagaacccggcaggatgagcctgccctgttcgtggccctgaccttcgagcggcgggaggtcctggactcctccaatatcaaaccaatgaacctgatcggcgtggcaagaggcgaaaacatccccgccgtgatcgccctgaccgaccccgagggctgcccactgagccggtttaaggatagcctgggaaacccaacccacatcctgagaatcggcgagagctataaggagaagcagcggaccatccaggccaagaaggaggtggagcagcggagagccggcggctacagccggaagtacgccagcaaagccaagaatctggcagacgatatggtgagaaacaccgctagagatctgctgtactacgccgtgacccaggatgccatgctgatcttcgccaacctgagccggggcttcggccggcagggcaagcggaccttcatggccgagagacagtacacacggatggaggactggctgaccgccaagctggcctacgagggcctgagcaagacctacctgtccaagacactggcccagtacacctccaagacatgcagcaactgtgggtttaccatcaccagcgccgactacgacagggtgctggagaagctgaagaagacagcaacaggctggatgaccacaattaacggcaaggagctgaaggtggagggccagattacctactacaacagatacaagagacagaacgtagtcaaggacctgtccgtcgagctggatagactgagcgaagaatctgtgaacaacgacatctcctcctggacaaagggcagaagcggagaagctctgagcctcctgaagaaaagattctcccatagacccgtgcaggagaagttcgtgtgcctgaactgcggcttcgagacacacgcagccgagcaagccgccctgaacatcgccagatcctggctgttcctgcggagccaggagtacaagaaataccagacaaacaagacaaccggcaacaccgataagagagccttcgtcgagacctggcagtccttttaccggaagaagcttaaggaggtgtggaaacctgccgtgcggtctggcggatctggcggaggctccaccagccccaagaaaaagagaaaagtctaagctgccttctgcggggcttgccttctggccatgcccttcttctctcccttgcacctgtacctcttggtctttgaataaagcctgagtaggaaggctagcaaaaaaaaaaaaaaaaaaaaaaaaaaaaaaaaaaaaaaaaaaaaaaaaaaaaaaaaaaaaaaaaaaaaaaaaaaaaaaaa

SEQ ID NO: 12500 - RNA, 5785 nt, synthetic construct
  source 1..5785: mol_type = other RNA
aggaaataagagagaaaagaagagtaagaagaaatataagagccaccatggcccctaagaagaagcgtaaagtgagccggatggaacgcctcgtctacgaggtgcggcagaagtgcagaaacatcgaggacatctgcatctcctgcggatctctgaacgtgaccctggagcacccactgttcatcggcggcatgtgccagaactgtaaaaactgttttctggagtgtgcctatcaatacgacgatgacggctaccagagctactgcaccatctgttgcggcggaagagaggtgctgatgtgtggaaataacaactgctgccggtgcttctgcgtggaatgcgtggacctgctggtgggccccggcgccgcccaggccgctattaaggaagatccttggaactgctacatgtgcggccacaagggcacatacggcctgctgagacggagagaggactggcctagcagactgcagatgttcttcgccaataaccacgaccaggagttcgacccccctaaggtgtaccctcccgtccccgccgagaagagaaagcccatccgggtcctgagcctgttcgatggcatcgccaccggtctgctggtgctgaaggacctgggcatccaggtggataggtacattgcctccgaggtgtgcgaggactccatcaccgtgggaatggtgcgtcatcagggcaagatcatgtacgtgggcgacgtgcggagcgtgacacagaagcatatccaggagtggggccctttcgacctggtgatcggcggcagcccttgcaatgacctgagcatcgtgaacccagcccggaagggcctgtacgagggaaccggcagactgttcttcgagttttacagactgctgcacgacgcccggcctaaggaaggcgacgaccggcccttcttttggctgttcgagaatgtggtggccatgggagtcagcgacaagcgggatattagccggttcctggagagcaaccccgtgatgatcgatgccaaggaagtgagcgccgcccaccgggccagatacttctggggcaatctgcctggcatgaacagacccctggccagcaccgtgaacgacaagctggagctgcaggagtgcctggagcacggccggatcgccaagttcagcaaggtgagaaccatcaccacccgaagcaacagcatcaaacaaggcaaggaccagcactttcctgtgttcatgaacgagaaggaggacatcctgtggtgtaccgagatggagagagtgttcgggttcccagtccactacacagatgtcagcaacatgtctagactggccagacagagactgctgggaagaagctggtccgtccctgtgatcagacacctgttcgcccctctgaaggagtacttcgcctgcgtgagcagcggcaacagcaacgccaacagccggggccccagcttctctagcggcctggtgccactgtccctgagagggagccacatgggccccatggagatctacaaaaccgtgagcgcctggaagcggcagcctgtgcgcgtgctgagcctgtttcggaatatcgataaagtcctgaaaagcctgggattcctggagagcggctctggctccggcggtggcaccctgaagtacgtggaggatgtgacaaacgtggtcagacgggatgtggagaagtggggccccttcgatctggtgtacggcagcacccaacccctgggcagctcttgtgaccggtgccctggctggtacatgtttcagttccaccggatcctgcagtacgccctgccgagacaggagtcccagcggccattcttttggattttcatggacaacttgctgctgaccgaggatgaccaggaaactaccactcggttcctgcagaccgaagccgtgaccctgcaggacgtgagaggccgggactaccagaacgccatgcgggtgtggtccaacatccctggactgaaaagcaagcacgcacctctgacccctaaagaagaggagtacctgcaggcccaggtgcggagcagaagcaagctggacgcccctaaggtggatctgctggtgaagaattgcctcctgcccctgagagagtacttcaagtatttcagccagaatagtctgcccctgggaggcagcggcggcggcagccaggccagcgtgagcttcaaggacgtgaacgtggagttcacccaggacgagtggcagcagatgggccccgcccagaggaacctgtacagggacgtgatgctggagaactacagcaacctggtgagcgtgggctactgcatcttcaagcccaaggtgatcttcaggctggagcagggcgaggagccctggagcagcgaggaggagttcagcagccagaggaggcccaagaactacagggacggcggcccaagcagcggcgcccctcctcccagcggcggcagcccagccggctccccaacctctaccgaggagggcacctctgagtccgccacccccgagagcggccctggcacctccaccgagcccagcgagggcagcgcacccggcagccctgccggcagccccacctccacagaggagggaaccagcaccgagcccagcgaaggcagcgccccaggcaccagcaccgagcctagtgagcaggagattaaacggatcaacaagatcagaagaagacttgtgaaagacagcaacaccaagaaggccggcaagacaggccccatgaaaaccctgctggttagagtgatgacacccgatctgagagagcggctggaaaacctgagaaagaagcctgaaaatatcccccagcccatcagcaatacatctagagccaacctgaataagctgctgaccgattacaccgaaatgaagaaggcgatcctgcatgtgtactgggaagagttccagaaggaccctgtgggcctgatgagccgggtggcccagcctgccagcaagaagatcgatcagaacaagctgaaacctgagatggacgagaagggcaacctgaccaccgccggctttgcctgctctcagtgtggccagcccctgttcgtgtacaagctggagcaggtgtctgagaagggcaaggcttacaccaactacttcggacggtgcaatgtggccgagcacgaaaagctgatcctgctggcccagctgaagcccgagaaggatagcgacgaagccgtgacatatagcctgggaaagtttgggcagagggccctggatttctacagcattcatgtgaccaaggagtccacccaccccgtgaagcccctggcccagatcgccggaaacagatacgcctccggacctgtgggaaaggccctgagcgacgcatgtatgggcacaatcgcctccttcctgtctaagtaccaggacatcatcatcgaacaccagaaggtggtgaagggcaaccagaagagactggagagcctgcgggagctggccggcaaggaaaacctggaataccctagcgtgaccctgccacctcagcctcacaccaaggagggcgttgatgcctacaacgaagtgatcgcccgggtgcgaatgtgggtgaacctgaacctgtggcagaagctgaagctaagcagagatgatgccaagcctctgctgagactgaagggattcccttcctttcctctggtcgagagacaggccaacgaagtggactggtgggacatggtgtgtaacgtgaagaagctgatcaacgagaaaaaggaggatggcaaggtgttttggcagaatctggctggctacaagagacaggaagccctgagaccatacctgagcagcgaggaagatcggaagaagggaaagaaattcgctcggtaccagctgggcgacctgctgctgcacctggaaaagaagcacggcgaggactggggaaaggtgtacgacgaggcctgggagcggattgacaagaaagtggaaggcctgagcaagcacatcaagctggaagaggaacggagaagcgaggacgcccagagcaaggccgccctgaccgactggctgcgggctaaggccagcttcgtgatcgagggcctgaaggaggccgacaaggacgagttctgcagatgcgagctgaagctgcagaagtggtacggggacctgcggggaaagcccttcgccatcgaagccgagaacagcatcctggacatcagcggcttcagcaagcagtacaactgtgccttcatctggcagaaggacggcgtgaagaagctgaacctgtacctgatcatcaactacttcaagggcggcaagctgcggttcaagaagatcaaacctgaagccttcgaagccaacagattctacaccgtgatcaacaaaaagagcggcgagatcgtgcccatggaggtgaacttcaacttcgacgaccccaacctgatcatcctgcctctggcctttggcaagagacagggcagagaattcatctggaacgacctgctgtccctggaaaccggcagcctgaagctggccaacggaagagtgatcgagaagacactgtacaacagaagaacccggcaggatgagcctgccctgttcgtggccctgaccttcgagcggcgggaggtcctggactcctccaatatcaaaccaatgaacctgatcggcgtggcaagaggcgaaaacatccccgccgtgatcgccctgaccgaccccgagggctgcccactgagccggtttaaggatagcctgggaaacccaacccacatcctgagaatcggcgagagctataaggagaagcagcggaccatccaggccaagaaggaggtggagcagcggagagccggcggctacagccggaagtacgccagcaaagccaagaatctggcagacgatatggtgagaaacaccgctagagatctgctgtactacgccgtgacccaggatgccatgctgatcttcgccaacctgagccggggcttcggccggcagggcaagcggaccttcatggccgagagacagtacacacggatggaggactggctgaccgccaagctggcctacgagggcctgagcaagacctacctgtccaagacactggcccagtacacctccaagacatgcagcaactgtgggtttaccatcaccagcgccgactacgacagggtgctggagaagctgaagaagacagcaacaggctggatgaccacaattaacggcaaggagctgaaggtggagggccagattacctactacaacagatacaagagacagaacgtagtcaaggacctgtccgtcgagctggatagactgagcgaagaatctgtgaacaacgacatctcctcctggacaaagggcagaagcggagaagctctgagcctcctgaagaaaagattctcccatagacccgtgcaggagaagttcgtgtgcctgaactgcggcttcgagacacacgcagccgagcaagccgccctgaacatcgccagatcctggctgttcctgcggagccaggagtacaagaaataccagacaaacaagacaaccggcaacaccgataagagagccttcgtcgagacctggcagtccttttaccggaagaagcttaaggaggtgtggaaacctgccgtgcggtctggcggatctggcggaggctccaccagccccaagaaaaagagaaaagtctaagctgccttctgcggggcttgccttctggccatgcccttcttctctcccttgcacctgtacctcttggtctttgaataaagcctgagtaggaaggctagcaaaaaaaaaaaaaaaaaaaaaaaaaaaaaaaaaaaaaaaaaaaaaaaaaaaaaaaaaaaaaaaaaaaaaaaaaaaaaaaa

SEQ ID NO: 12501 - RNA, 5785 nt, synthetic construct
  source 1..5785: mol_type = other RNA
aggaaataagagagaaaagaagagtaagaagaaatataagagccaccatggcccctaagaagaagcgtaaagtgagccggatggaacgcctcgtctacgaggtgcggcagaagtgcagaaacatcgaggacatctgcatctcctgcggatctctgaacgtgaccctggagcacccactgttcatcggcggcatgtgccagaactgtaaaaactgttttctggagtgtgcctatcaatacgacgatgacggctaccagagctactgcaccatctgttgcggcggaagagaggtgctgatgtgtggaaataacaactgctgccggtgcttctgcgtggaatgcgtggacctgctggtgggccccggcgccgcccaggccgctattaaggaagatccttggaactgctacatgtgcggccacaagggcacatacggcctgctgagacggagagaggactggcctagcagactgcagatgttcttcgccaataaccacgaccaggagttcgacccccctaaggtgtaccctcccgtccccgccgagaagagaaagcccatccgggtcctgagcctgttcgatggcatcgccaccggtctgctggtgctgaaggacctgggcatccaggtggataggtacattgcctccgaggtgtgcgaggactccatcaccgtgggaatggtgcgtcatcagggcaagatcatgtacgtgggcgacgtgcggagcgtgacacagaagcatatccaggagtggggccctttcgacctggtgatcggcggcagcccttgcaatgacctgagcatcgtgaacccagcccggaagggcctgtacgagggaaccggcagactgttcttcgagttttacagactgctgcacgacgcccggcctaaggaaggcgacgaccggcccttcttttggctgttcgagaatgtggtggccatgggagtcagcgacaagcgggatattagccggttcctggagagcaaccccgtgatgatcgatgccaaggaagtgagcgccgcccaccgggccagatacttctggggcaatctgcctggcatgaacagacccctggccagcaccgtgaacgacaagctggagctgcaggagtgcctggagcacggccggatcgccaagttcagcaaggtgagaaccatcaccacccgaagcaacagcatcaaacaaggcaaggaccagcactttcctgtgttcatgaacgagaaggaggacatcctgtggtgtaccgagatggagagagtgttcgggttcccagtccactacacagatgtcagcaacatgtctagactggccagacagagactgctgggaagaagctggtccgtccctgtgatcagacacctgttcgcccctctgaaggagtacttcgcctgcgtgagcagcggcaacagcaacgccaacagccggggccccagcttctctagcggcctggtgccactgtccctgagagggagccacatgggccccatggagatctacaaaaccgtgagcgcctggaagcggcagcctgtgcgcgtgctgagcctgtttcggaatatcgataaagtcctgaaaagcctgggattcctggagagcggctctggctccggcggtggcaccctgaagtacgtggaggatgtgacaaacgtggtcagacgggatgtggagaagtggggccccttcgatctggtgtacggcagcacccaacccctgggcagctcttgtgaccggtgccctggctggtacatgtttcagttccaccggatcctgcagtacgccctgccgagacaggagtcccagcggccattcttttggattttcatggacaacttgctgctgaccgaggatgaccaggaaactaccactcggttcctgcagaccgaagccgtgaccctgcaggacgtgagaggccgggactaccagaacgccatgcgggtgtggtccaacatccctggactgaaaagcaagcacgcacctctgacccctaaagaagaggagtacctgcaggcccaggtgcggagcagaagcaagctggacgcccctaaggtggatctgctggtgaagaattgcctcctgcccctgagagagtacttcaagtatttcagccagaatagtctgcccctgggaggcagcggcggcggcggccaggagagcgtgaccttcaccgacgtggccgtggacttcaccctggaggagtgggcctacctggaccacttccagaaggagctgtacaaggacgtgatgctggagaactacaggaacctgctgtgcctgggcctggccgtgagcaagcccgacgtgatcagccagctggagcagggcgacgccccctggatgagcgagggcggcgtgcccaggagcatctacagcgactgggagaccaggggcggcccaagcagcggcgcccctcctcccagcggcggcagcccagccggctccccaacctctaccgaggagggcacctctgagtccgccacccccgagagcggccctggcacctccaccgagcccagcgagggcagcgcacccggcagccctgccggcagccccacctccacagaggagggaaccagcaccgagcccagcgaaggcagcgccccaggcaccagcaccgagcctagtgagcaggagattaaacggatcaacaagatcagaagaagacttgtgaaagacagcaacaccaagaaggccggcaagacaggccccatgaaaaccctgctggttagagtgatgacacccgatctgagagagcggctggaaaacctgagaaagaagcctgaaaatatcccccagcccatcagcaatacatctagagccaacctgaataagctgctgaccgattacaccgaaatgaagaaggcgatcctgcatgtgtactgggaagagttccagaaggaccctgtgggcctgatgagccgggtggcccagcctgccagcaagaagatcgatcagaacaagctgaaacctgagatggacgagaagggcaacctgaccaccgccggctttgcctgctctcagtgtggccagcccctgttcgtgtacaagctggagcaggtgtctgagaagggcaaggcttacaccaactacttcggacggtgcaatgtggccgagcacgaaaagctgatcctgctggcccagctgaagcccgagaaggatagcgacgaagccgtgacatatagcctgggaaagtttgggcagagggccctggatttctacagcattcatgtgaccaaggagtccacccaccccgtgaagcccctggcccagatcgccggaaacagatacgcctccggacctgtgggaaaggccctgagcgacgcatgtatgggcacaatcgcctccttcctgtctaagtaccaggacatcatcatcgaacaccagaaggtggtgaagggcaaccagaagagactggagagcctgcgggagctggccggcaaggaaaacctggaataccctagcgtgaccctgccacctcagcctcacaccaaggagggcgttgatgcctacaacgaagtgatcgcccgggtgcgaatgtgggtgaacctgaacctgtggcagaagctgaagctaagcagagatgatgccaagcctctgctgagactgaagggattcccttcctttcctctggtcgagagacaggccaacgaagtggactggtgggacatggtgtgtaacgtgaagaagctgatcaacgagaaaaaggaggatggcaaggtgttttggcagaatctggctggctacaagagacaggaagccctgagaccatacctgagcagcgaggaagatcggaagaagggaaagaaattcgctcggtaccagctgggcgacctgctgctgcacctggaaaagaagcacggcgaggactggggaaaggtgtacgacgaggcctgggagcggattgacaagaaagtggaaggcctgagcaagcacatcaagctggaagaggaacggagaagcgaggacgcccagagcaaggccgccctgaccgactggctgcgggctaaggccagcttcgtgatcgagggcctgaaggaggccgacaaggacgagttctgcagatgcgagctgaagctgcagaagtggtacggggacctgcggggaaagcccttcgccatcgaagccgagaacagcatcctggacatcagcggcttcagcaagcagtacaactgtgccttcatctggcagaaggacggcgtgaagaagctgaacctgtacctgatcatcaactacttcaagggcggcaagctgcggttcaagaagatcaaacctgaagccttcgaagccaacagattctacaccgtgatcaacaaaaagagcggcgagatcgtgcccatggaggtgaacttcaacttcgacgaccccaacctgatcatcctgcctctggcctttggcaagagacagggcagagaattcatctggaacgacctgctgtccctggaaaccggcagcctgaagctggccaacggaagagtgatcgagaagacactgtacaacagaagaacccggcaggatgagcctgccctgttcgtggccctgaccttcgagcggcgggaggtcctggactcctccaatatcaaaccaatgaacctgatcggcgtggcaagaggcgaaaacatccccgccgtgatcgccctgaccgaccccgagggctgcccactgagccggtttaaggatagcctgggaaacccaacccacatcctgagaatcggcgagagctataaggagaagcagcggaccatccaggccaagaaggaggtggagcagcggagagccggcggctacagccggaagtacgccagcaaagccaagaatctggcagacgatatggtgagaaacaccgctagagatctgctgtactacgccgtgacccaggatgccatgctgatcttcgccaacctgagccggggcttcggccggcagggcaagcggaccttcatggccgagagacagtacacacggatggaggactggctgaccgccaagctggcctacgagggcctgagcaagacctacctgtccaagacactggcccagtacacctccaagacatgcagcaactgtgggtttaccatcaccagcgccgactacgacagggtgctggagaagctgaagaagacagcaacaggctggatgaccacaattaacggcaaggagctgaaggtggagggccagattacctactacaacagatacaagagacagaacgtagtcaaggacctgtccgtcgagctggatagactgagcgaagaatctgtgaacaacgacatctcctcctggacaaagggcagaagcggagaagctctgagcctcctgaagaaaagattctcccatagacccgtgcaggagaagttcgtgtgcctgaactgcggcttcgagacacacgcagccgagcaagccgccctgaacatcgccagatcctggctgttcctgcggagccaggagtacaagaaataccagacaaacaagacaaccggcaacaccgataagagagccttcgtcgagacctggcagtccttttaccggaagaagcttaaggaggtgtggaaacctgccgtgcggtctggcggatctggcggaggctccaccagccccaagaaaaagagaaaagtctaagctgccttctgcggggcttgccttctggccatgcccttcttctctcccttgcacctgtacctcttggtctttgaataaagcctgagtaggaaggctagcaaaaaaaaaaaaaaaaaaaaaaaaaaaaaaaaaaaaaaaaaaaaaaaaaaaaaaaaaaaaaaaaaaaaaaaaaaaaaaaa

SEQ ID NO: 12502 - RNA, 5794 nt, synthetic construct
  source 1..5794: mol_type = other RNA
aggaaataagagagaaaagaagagtaagaagaaatataagagccaccatggcccctaagaagaagcgtaaagtgagccggatggaacgcctcgtctacgaggtgcggcagaagtgcagaaacatcgaggacatctgcatctcctgcggatctctgaacgtgaccctggagcacccactgttcatcggcggcatgtgccagaactgtaaaaactgttttctggagtgtgcctatcaatacgacgatgacggctaccagagctactgcaccatctgttgcggcggaagagaggtgctgatgtgtggaaataacaactgctgccggtgcttctgcgtggaatgcgtggacctgctggtgggccccggcgccgcccaggccgctattaaggaagatccttggaactgctacatgtgcggccacaagggcacatacggcctgctgagacggagagaggactggcctagcagactgcagatgttcttcgccaataaccacgaccaggagttcgacccccctaaggtgtaccctcccgtccccgccgagaagagaaagcccatccgggtcctgagcctgttcgatggcatcgccaccggtctgctggtgctgaaggacctgggcatccaggtggataggtacattgcctccgaggtgtgcgaggactccatcaccgtgggaatggtgcgtcatcagggcaagatcatgtacgtgggcgacgtgcggagcgtgacacagaagcatatccaggagtggggccctttcgacctggtgatcggcggcagcccttgcaatgacctgagcatcgtgaacccagcccggaagggcctgtacgagggaaccggcagactgttcttcgagttttacagactgctgcacgacgcccggcctaaggaaggcgacgaccggcccttcttttggctgttcgagaatgtggtggccatgggagtcagcgacaagcgggatattagccggttcctggagagcaaccccgtgatgatcgatgccaaggaagtgagcgccgcccaccgggccagatacttctggggcaatctgcctggcatgaacagacccctggccagcaccgtgaacgacaagctggagctgcaggagtgcctggagcacggccggatcgccaagttcagcaaggtgagaaccatcaccacccgaagcaacagcatcaaacaaggcaaggaccagcactttcctgtgttcatgaacgagaaggaggacatcctgtggtgtaccgagatggagagagtgttcgggttcccagtccactacacagatgtcagcaacatgtctagactggccagacagagactgctgggaagaagctggtccgtccctgtgatcagacacctgttcgcccctctgaaggagtacttcgcctgcgtgagcagcggcaacagcaacgccaacagccggggccccagcttctctagcggcctggtgccactgtccctgagagggagccacatgggccccatggagatctacaaaaccgtgagcgcctggaagcggcagcctgtgcgcgtgctgagcctgtttcggaatatcgataaagtcctgaaaagcctgggattcctggagagcggctctggctccggcggtggcaccctgaagtacgtggaggatgtgacaaacgtggtcagacgggatgtggagaagtggggccccttcgatctggtgtacggcagcacccaacccctgggcagctcttgtgaccggtgccctggctggtacatgtttcagttccaccggatcctgcagtacgccctgccgagacaggagtcccagcggccattcttttggattttcatggacaacttgctgctgaccgaggatgaccaggaaactaccactcggttcctgcagaccgaagccgtgaccctgcaggacgtgagaggccgggactaccagaacgccatgcgggtgtggtccaacatccctggactgaaaagcaagcacgcacctctgacccctaaagaagaggagtacctgcaggcccaggtgcggagcagaagcaagctggacgcccctaaggtggatctgctggtgaagaattgcctcctgcccctgagagagtacttcaagtatttcagccagaatagtctgcccctgggaggcagcggcggcggcgtgacctacgacgacgtgcacatcgacttcacctgggaggagtggaccctgctggaccccagccagaagaacctgtacaaggacgtgatgctggagacctacaggaacctgaccaccgtgggctacagctgggaggaccacctgatcgaggagcactgcaagagcagcaggaagcacgagaggcacgagaggatccccaccggcgagcagcccagcgagagcacccagagcttcagggccttcgcccaccacggcggcccaagcagcggcgcccctcctcccagcggcggcagcccagccggctccccaacctctaccgaggagggcacctctgagtccgccacccccgagagcggccctggcacctccaccgagcccagcgagggcagcgcacccggcagccctgccggcagccccacctccacagaggagggaaccagcaccgagcccagcgaaggcagcgccccaggcaccagcaccgagcctagtgagcaggagattaaacggatcaacaagatcagaagaagacttgtgaaagacagcaacaccaagaaggccggcaagacaggccccatgaaaaccctgctggttagagtgatgacacccgatctgagagagcggctggaaaacctgagaaagaagcctgaaaatatcccccagcccatcagcaatacatctagagccaacctgaataagctgctgaccgattacaccgaaatgaagaaggcgatcctgcatgtgtactgggaagagttccagaaggaccctgtgggcctgatgagccgggtggcccagcctgccagcaagaagatcgatcagaacaagctgaaacctgagatggacgagaagggcaacctgaccaccgccggctttgcctgctctcagtgtggccagcccctgttcgtgtacaagctggagcaggtgtctgagaagggcaaggcttacaccaactacttcggacggtgcaatgtggccgagcacgaaaagctgatcctgctggcccagctgaagcccgagaaggatagcgacgaagccgtgacatatagcctgggaaagtttgggcagagggccctggatttctacagcattcatgtgaccaaggagtccacccaccccgtgaagcccctggcccagatcgccggaaacagatacgcctccggacctgtgggaaaggccctgagcgacgcatgtatgggcacaatcgcctccttcctgtctaagtaccaggacatcatcatcgaacaccagaaggtggtgaagggcaaccagaagagactggagagcctgcgggagctggccggcaaggaaaacctggaataccctagcgtgaccctgccacctcagcctcacaccaaggagggcgttgatgcctacaacgaagtgatcgcccgggtgcgaatgtgggtgaacctgaacctgtggcagaagctgaagctaagcagagatgatgccaagcctctgctgagactgaagggattcccttcctttcctctggtcgagagacaggccaacgaagtggactggtgggacatggtgtgtaacgtgaagaagctgatcaacgagaaaaaggaggatggcaaggtgttttggcagaatctggctggctacaagagacaggaagccctgagaccatacctgagcagcgaggaagatcggaagaagggaaagaaattcgctcggtaccagctgggcgacctgctgctgcacctggaaaagaagcacggcgaggactggggaaaggtgtacgacgaggcctgggagcggattgacaagaaagtggaaggcctgagcaagcacatcaagctggaagaggaacggagaagcgaggacgcccagagcaaggccgccctgaccgactggctgcgggctaaggccagcttcgtgatcgagggcctgaaggaggccgacaaggacgagttctgcagatgcgagctgaagctgcagaagtggtacggggacctgcggggaaagcccttcgccatcgaagccgagaacagcatcctggacatcagcggcttcagcaagcagtacaactgtgccttcatctggcagaaggacggcgtgaagaagctgaacctgtacctgatcatcaactacttcaagggcggcaagctgcggttcaagaagatcaaacctgaagccttcgaagccaacagattctacaccgtgatcaacaaaaagagcggcgagatcgtgcccatggaggtgaacttcaacttcgacgaccccaacctgatcatcctgcctctggcctttggcaagagacagggcagagaattcatctggaacgacctgctgtccctggaaaccggcagcctgaagctggccaacggaagagtgatcgagaagacactgtacaacagaagaacccggcaggatgagcctgccctgttcgtggccctgaccttcgagcggcgggaggtcctggactcctccaatatcaaaccaatgaacctgatcggcgtggcaagaggcgaaaacatccccgccgtgatcgccctgaccgaccccgagggctgcccactgagccggtttaaggatagcctgggaaacccaacccacatcctgagaatcggcgagagctataaggagaagcagcggaccatccaggccaagaaggaggtggagcagcggagagccggcggctacagccggaagtacgccagcaaagccaagaatctggcagacgatatggtgagaaacaccgctagagatctgctgtactacgccgtgacccaggatgccatgctgatcttcgccaacctgagccggggcttcggccggcagggcaagcggaccttcatggccgagagacagtacacacggatggaggactggctgaccgccaagctggcctacgagggcctgagcaagacctacctgtccaagacactggcccagtacacctccaagacatgcagcaactgtgggtttaccatcaccagcgccgactacgacagggtgctggagaagctgaagaagacagcaacaggctggatgaccacaattaacggcaaggagctgaaggtggagggccagattacctactacaacagatacaagagacagaacgtagtcaaggacctgtccgtcgagctggatagactgagcgaagaatctgtgaacaacgacatctcctcctggacaaagggcagaagcggagaagctctgagcctcctgaagaaaagattctcccatagacccgtgcaggagaagttcgtgtgcctgaactgcggcttcgagacacacgcagccgagcaagccgccctgaacatcgccagatcctggctgttcctgcggagccaggagtacaagaaataccagacaaacaagacaaccggcaacaccgataagagagccttcgtcgagacctggcagtccttttaccggaagaagcttaaggaggtgtggaaacctgccgtgcggtctggcggatctggcggaggctccaccagccccaagaaaaagagaaaagtctaagctgccttctgcggggcttgccttctggccatgcccttcttctctcccttgcacctgtacctcttggtctttgaataaagcctgagtaggaaggctagcaaaaaaaaaaaaaaaaaaaaaaaaaaaaaaaaaaaaaaaaaaaaaaaaaaaaaaaaaaaaaaaaaaaaaaaaaaaaaaaa

SEQ ID NO: 12503 - RNA, 5785 nt, synthetic construct
  source 1..5785: mol_type = other RNA
aggaaataagagagaaaagaagagtaagaagaaatataagagccaccatggcccctaagaagaagcgtaaagtgagccggatggaacgcctcgtctacgaggtgcggcagaagtgcagaaacatcgaggacatctgcatctcctgcggatctctgaacgtgaccctggagcacccactgttcatcggcggcatgtgccagaactgtaaaaactgttttctggagtgtgcctatcaatacgacgatgacggctaccagagctactgcaccatctgttgcggcggaagagaggtgctgatgtgtggaaataacaactgctgccggtgcttctgcgtggaatgcgtggacctgctggtgggccccggcgccgcccaggccgctattaaggaagatccttggaactgctacatgtgcggccacaagggcacatacggcctgctgagacggagagaggactggcctagcagactgcagatgttcttcgccaataaccacgaccaggagttcgacccccctaaggtgtaccctcccgtccccgccgagaagagaaagcccatccgggtcctgagcctgttcgatggcatcgccaccggtctgctggtgctgaaggacctgggcatccaggtggataggtacattgcctccgaggtgtgcgaggactccatcaccgtgggaatggtgcgtcatcagggcaagatcatgtacgtgggcgacgtgcggagcgtgacacagaagcatatccaggagtggggccctttcgacctggtgatcggcggcagcccttgcaatgacctgagcatcgtgaacccagcccggaagggcctgtacgagggaaccggcagactgttcttcgagttttacagactgctgcacgacgcccggcctaaggaaggcgacgaccggcccttcttttggctgttcgagaatgtggtggccatgggagtcagcgacaagcgggatattagccggttcctggagagcaaccccgtgatgatcgatgccaaggaagtgagcgccgcccaccgggccagatacttctggggcaatctgcctggcatgaacagacccctggccagcaccgtgaacgacaagctggagctgcaggagtgcctggagcacggccggatcgccaagttcagcaaggtgagaaccatcaccacccgaagcaacagcatcaaacaaggcaaggaccagcactttcctgtgttcatgaacgagaaggaggacatcctgtggtgtaccgagatggagagagtgttcgggttcccagtccactacacagatgtcagcaacatgtctagactggccagacagagactgctgggaagaagctggtccgtccctgtgatcagacacctgttcgcccctctgaaggagtacttcgcctgcgtgagcagcggcaacagcaacgccaacagccggggccccagcttctctagcggcctggtgccactgtccctgagagggagccacatgggccccatggagatctacaaaaccgtgagcgcctggaagcggcagcctgtgcgcgtgctgagcctgtttcggaatatcgataaagtcctgaaaagcctgggattcctggagagcggctctggctccggcggtggcaccctgaagtacgtggaggatgtgacaaacgtggtcagacgggatgtggagaagtggggccccttcgatctggtgtacggcagcacccaacccctgggcagctcttgtgaccggtgccctggctggtacatgtttcagttccaccggatcctgcagtacgccctgccgagacaggagtcccagcggccattcttttggattttcatggacaacttgctgctgaccgaggatgaccaggaaactaccactcggttcctgcagaccgaagccgtgaccctgcaggacgtgagaggccgggactaccagaacgccatgcgggtgtggtccaacatccctggactgaaaagcaagcacgcacctctgacccctaaagaagaggagtacctgcaggcccaggtgcggagcagaagcaagctggacgcccctaaggtggatctgctggtgaagaattgcctcctgcccctgagagagtacttcaagtatttcagccagaatagtctgcccctgggaggcagcggcggcggcagccaggagctgctgaccttcaaggacatcagcatcgacttcacccaggaggagtggggccagctgacccccgcccaccagaacctgtacagggaggtgatgctggagaactacagcaacctggtgagcgtggccggctaccagctgagcaagcccgtggtgatcagccagctggagaagggcgaggagccctggatgaccgagaaggagggccccggcgaccccagcagcgacctgaagagcggcggcccaagcagcggcgcccctcctcccagcggcggcagcccagccggctccccaacctctaccgaggagggcacctctgagtccgccacccccgagagcggccctggcacctccaccgagcccagcgagggcagcgcacccggcagccctgccggcagccccacctccacagaggagggaaccagcaccgagcccagcgaaggcagcgccccaggcaccagcaccgagcctagtgagcaggagattaaacggatcaacaagatcagaagaagacttgtgaaagacagcaacaccaagaaggccggcaagacaggccccatgaaaaccctgctggttagagtgatgacacccgatctgagagagcggctggaaaacctgagaaagaagcctgaaaatatcccccagcccatcagcaatacatctagagccaacctgaataagctgctgaccgattacaccgaaatgaagaaggcgatcctgcatgtgtactgggaagagttccagaaggaccctgtgggcctgatgagccgggtggcccagcctgccagcaagaagatcgatcagaacaagctgaaacctgagatggacgagaagggcaacctgaccaccgccggctttgcctgctctcagtgtggccagcccctgttcgtgtacaagctggagcaggtgtctgagaagggcaaggcttacaccaactacttcggacggtgcaatgtggccgagcacgaaaagctgatcctgctggcccagctgaagcccgagaaggatagcgacgaagccgtgacatatagcctgggaaagtttgggcagagggccctggatttctacagcattcatgtgaccaaggagtccacccaccccgtgaagcccctggcccagatcgccggaaacagatacgcctccggacctgtgggaaaggccctgagcgacgcatgtatgggcacaatcgcctccttcctgtctaagtaccaggacatcatcatcgaacaccagaaggtggtgaagggcaaccagaagagactggagagcctgcgggagctggccggcaaggaaaacctggaataccctagcgtgaccctgccacctcagcctcacaccaaggagggcgttgatgcctacaacgaagtgatcgcccgggtgcgaatgtgggtgaacctgaacctgtggcagaagctgaagctaagcagagatgatgccaagcctctgctgagactgaagggattcccttcctttcctctggtcgagagacaggccaacgaagtggactggtgggacatggtgtgtaacgtgaagaagctgatcaacgagaaaaaggaggatggcaaggtgttttggcagaatctggctggctacaagagacaggaagccctgagaccatacctgagcagcgaggaagatcggaagaagggaaagaaattcgctcggtaccagctgggcgacctgctgctgcacctggaaaagaagcacggcgaggactggggaaaggtgtacgacgaggcctgggagcggattgacaagaaagtggaaggcctgagcaagcacatcaagctggaagaggaacggagaagcgaggacgcccagagcaaggccgccctgaccgactggctgcgggctaaggccagcttcgtgatcgagggcctgaaggaggccgacaaggacgagttctgcagatgcgagctgaagctgcagaagtggtacggggacctgcggggaaagcccttcgccatcgaagccgagaacagcatcctggacatcagcggcttcagcaagcagtacaactgtgccttcatctggcagaaggacggcgtgaagaagctgaacctgtacctgatcatcaactacttcaagggcggcaagctgcggttcaagaagatcaaacctgaagccttcgaagccaacagattctacaccgtgatcaacaaaaagagcggcgagatcgtgcccatggaggtgaacttcaacttcgacgaccccaacctgatcatcctgcctctggcctttggcaagagacagggcagagaattcatctggaacgacctgctgtccctggaaaccggcagcctgaagctggccaacggaagagtgatcgagaagacactgtacaacagaagaacccggcaggatgagcctgccctgttcgtggccctgaccttcgagcggcgggaggtcctggactcctccaatatcaaaccaatgaacctgatcggcgtggcaagaggcgaaaacatccccgccgtgatcgccctgaccgaccccgagggctgcccactgagccggtttaaggatagcctgggaaacccaacccacatcctgagaatcggcgagagctataaggagaagcagcggaccatccaggccaagaaggaggtggagcagcggagagccggcggctacagccggaagtacgccagcaaagccaagaatctggcagacgatatggtgagaaacaccgctagagatctgctgtactacgccgtgacccaggatgccatgctgatcttcgccaacctgagccggggcttcggccggcagggcaagcggaccttcatggccgagagacagtacacacggatggaggactggctgaccgccaagctggcctacgagggcctgagcaagacctacctgtccaagacactggcccagtacacctccaagacatgcagcaactgtgggtttaccatcaccagcgccgactacgacagggtgctggagaagctgaagaagacagcaacaggctggatgaccacaattaacggcaaggagctgaaggtggagggccagattacctactacaacagatacaagagacagaacgtagtcaaggacctgtccgtcgagctggatagactgagcgaagaatctgtgaacaacgacatctcctcctggacaaagggcagaagcggagaagctctgagcctcctgaagaaaagattctcccatagacccgtgcaggagaagttcgtgtgcctgaactgcggcttcgagacacacgcagccgagcaagccgccctgaacatcgccagatcctggctgttcctgcggagccaggagtacaagaaataccagacaaacaagacaaccggcaacaccgataagagagccttcgtcgagacctggcagtccttttaccggaagaagcttaaggaggtgtggaaacctgccgtgcggtctggcggatctggcggaggctccaccagccccaagaaaaagagaaaagtctaagctgccttctgcggggcttgccttctggccatgcccttcttctctcccttgcacctgtacctcttggtctttgaataaagcctgagtaggaaggctagcaaaaaaaaaaaaaaaaaaaaaaaaaaaaaaaaaaaaaaaaaaaaaaaaaaaaaaaaaaaaaaaaaaaaaaaaaaaaaaaa

SEQ ID NO: 12504 - RNA, 5785 nt, synthetic construct
  source 1..5785: mol_type = other RNA
aggaaataagagagaaaagaagagtaagaagaaatataagagccaccatggcccctaagaagaagcgtaaagtgagccggatggaacgcctcgtctacgaggtgcggcagaagtgcagaaacatcgaggacatctgcatctcctgcggatctctgaacgtgaccctggagcacccactgttcatcggcggcatgtgccagaactgtaaaaactgttttctggagtgtgcctatcaatacgacgatgacggctaccagagctactgcaccatctgttgcggcggaagagaggtgctgatgtgtggaaataacaactgctgccggtgcttctgcgtggaatgcgtggacctgctggtgggccccggcgccgcccaggccgctattaaggaagatccttggaactgctacatgtgcggccacaagggcacatacggcctgctgagacggagagaggactggcctagcagactgcagatgttcttcgccaataaccacgaccaggagttcgacccccctaaggtgtaccctcccgtccccgccgagaagagaaagcccatccgggtcctgagcctgttcgatggcatcgccaccggtctgctggtgctgaaggacctgggcatccaggtggataggtacattgcctccgaggtgtgcgaggactccatcaccgtgggaatggtgcgtcatcagggcaagatcatgtacgtgggcgacgtgcggagcgtgacacagaagcatatccaggagtggggccctttcgacctggtgatcggcggcagcccttgcaatgacctgagcatcgtgaacccagcccggaagggcctgtacgagggaaccggcagactgttcttcgagttttacagactgctgcacgacgcccggcctaaggaaggcgacgaccggcccttcttttggctgttcgagaatgtggtggccatgggagtcagcgacaagcgggatattagccggttcctggagagcaaccccgtgatgatcgatgccaaggaagtgagcgccgcccaccgggccagatacttctggggcaatctgcctggcatgaacagacccctggccagcaccgtgaacgacaagctggagctgcaggagtgcctggagcacggccggatcgccaagttcagcaaggtgagaaccatcaccacccgaagcaacagcatcaaacaaggcaaggaccagcactttcctgtgttcatgaacgagaaggaggacatcctgtggtgtaccgagatggagagagtgttcgggttcccagtccactacacagatgtcagcaacatgtctagactggccagacagagactgctgggaagaagctggtccgtccctgtgatcagacacctgttcgcccctctgaaggagtacttcgcctgcgtgagcagcggcaacagcaacgccaacagccggggccccagcttctctagcggcctggtgccactgtccctgagagggagccacatgggccccatggagatctacaaaaccgtgagcgcctggaagcggcagcctgtgcgcgtgctgagcctgtttcggaatatcgataaagtcctgaaaagcctgggattcctggagagcggctctggctccggcggtggcaccctgaagtacgtggaggatgtgacaaacgtggtcagacgggatgtggagaagtggggccccttcgatctggtgtacggcagcacccaacccctgggcagctcttgtgaccggtgccctggctggtacatgtttcagttccaccggatcctgcagtacgccctgccgagacaggagtcccagcggccattcttttggattttcatggacaacttgctgctgaccgaggatgaccaggaaactaccactcggttcctgcagaccgaagccgtgaccctgcaggacgtgagaggccgggactaccagaacgccatgcgggtgtggtccaacatccctggactgaaaagcaagcacgcacctctgacccctaaagaagaggagtacctgcaggcccaggtgcggagcagaagcaagctggacgcccctaaggtggatctgctggtgaagaattgcctcctgcccctgagagagtacttcaagtatttcagccagaatagtctgcccctgggaggcagcggcggcggcgaggagctgcccgtggtgttcgaggacgtggccgtgtacttcaccagggaggagtgggccatgctggacaagaggcagaaggagctgtacagggacgtgatgaggatgaactacgagctgctggccagcctgggccccgccgcccccaagcccgacctgatcctgaagctggagaggagggccgccccctggatcaaggaccccaacggccccaagtggggcaagggcaggccccccggcaagggcggcccaagcagcggcgcccctcctcccagcggcggcagcccagccggctccccaacctctaccgaggagggcacctctgagtccgccacccccgagagcggccctggcacctccaccgagcccagcgagggcagcgcacccggcagccctgccggcagccccacctccacagaggagggaaccagcaccgagcccagcgaaggcagcgccccaggcaccagcaccgagcctagtgagcaggagattaaacggatcaacaagatcagaagaagacttgtgaaagacagcaacaccaagaaggccggcaagacaggccccatgaaaaccctgctggttagagtgatgacacccgatctgagagagcggctggaaaacctgagaaagaagcctgaaaatatcccccagcccatcagcaatacatctagagccaacctgaataagctgctgaccgattacaccgaaatgaagaaggcgatcctgcatgtgtactgggaagagttccagaaggaccctgtgggcctgatgagccgggtggcccagcctgccagcaagaagatcgatcagaacaagctgaaacctgagatggacgagaagggcaacctgaccaccgccggctttgcctgctctcagtgtggccagcccctgttcgtgtacaagctggagcaggtgtctgagaagggcaaggcttacaccaactacttcggacggtgcaatgtggccgagcacgaaaagctgatcctgctggcccagctgaagcccgagaaggatagcgacgaagccgtgacatatagcctgggaaagtttgggcagagggccctggatttctacagcattcatgtgaccaaggagtccacccaccccgtgaagcccctggcccagatcgccggaaacagatacgcctccggacctgtgggaaaggccctgagcgacgcatgtatgggcacaatcgcctccttcctgtctaagtaccaggacatcatcatcgaacaccagaaggtggtgaagggcaaccagaagagactggagagcctgcgggagctggccggcaaggaaaacctggaataccctagcgtgaccctgccacctcagcctcacaccaaggagggcgttgatgcctacaacgaagtgatcgcccgggtgcgaatgtgggtgaacctgaacctgtggcagaagctgaagctaagcagagatgatgccaagcctctgctgagactgaagggattcccttcctttcctctggtcgagagacaggccaacgaagtggactggtgggacatggtgtgtaacgtgaagaagctgatcaacgagaaaaaggaggatggcaaggtgttttggcagaatctggctggctacaagagacaggaagccctgagaccatacctgagcagcgaggaagatcggaagaagggaaagaaattcgctcggtaccagctgggcgacctgctgctgcacctggaaaagaagcacggcgaggactggggaaaggtgtacgacgaggcctgggagcggattgacaagaaagtggaaggcctgagcaagcacatcaagctggaagaggaacggagaagcgaggacgcccagagcaaggccgccctgaccgactggctgcgggctaaggccagcttcgtgatcgagggcctgaaggaggccgacaaggacgagttctgcagatgcgagctgaagctgcagaagtggtacggggacctgcggggaaagcccttcgccatcgaagccgagaacagcatcctggacatcagcggcttcagcaagcagtacaactgtgccttcatctggcagaaggacggcgtgaagaagctgaacctgtacctgatcatcaactacttcaagggcggcaagctgcggttcaagaagatcaaacctgaagccttcgaagccaacagattctacaccgtgatcaacaaaaagagcggcgagatcgtgcccatggaggtgaacttcaacttcgacgaccccaacctgatcatcctgcctctggcctttggcaagagacagggcagagaattcatctggaacgacctgctgtccctggaaaccggcagcctgaagctggccaacggaagagtgatcgagaagacactgtacaacagaagaacccggcaggatgagcctgccctgttcgtggccctgaccttcgagcggcgggaggtcctggactcctccaatatcaaaccaatgaacctgatcggcgtggcaagaggcgaaaacatccccgccgtgatcgccctgaccgaccccgagggctgcccactgagccggtttaaggatagcctgggaaacccaacccacatcctgagaatcggcgagagctataaggagaagcagcggaccatccaggccaagaaggaggtggagcagcggagagccggcggctacagccggaagtacgccagcaaagccaagaatctggcagacgatatggtgagaaacaccgctagagatctgctgtactacgccgtgacccaggatgccatgctgatcttcgccaacctgagccggggcttcggccggcagggcaagcggaccttcatggccgagagacagtacacacggatggaggactggctgaccgccaagctggcctacgagggcctgagcaagacctacctgtccaagacactggcccagtacacctccaagacatgcagcaactgtgggtttaccatcaccagcgccgactacgacagggtgctggagaagctgaagaagacagcaacaggctggatgaccacaattaacggcaaggagctgaaggtggagggccagattacctactacaacagatacaagagacagaacgtagtcaaggacctgtccgtcgagctggatagactgagcgaagaatctgtgaacaacgacatctcctcctggacaaagggcagaagcggagaagctctgagcctcctgaagaaaagattctcccatagacccgtgcaggagaagttcgtgtgcctgaactgcggcttcgagacacacgcagccgagcaagccgccctgaacatcgccagatcctggctgttcctgcggagccaggagtacaagaaataccagacaaacaagacaaccggcaacaccgataagagagccttcgtcgagacctggcagtccttttaccggaagaagcttaaggaggtgtggaaacctgccgtgcggtctggcggatctggcggaggctccaccagccccaagaaaaagagaaaagtctaagctgccttctgcggggcttgccttctggccatgcccttcttctctcccttgcacctgtacctcttggtctttgaataaagcctgagtaggaaggctagcaaaaaaaaaaaaaaaaaaaaaaaaaaaaaaaaaaaaaaaaaaaaaaaaaaaaaaaaaaaaaaaaaaaaaaaaaaaaaaaa

SEQ ID NO: 12505 - RNA, 5785 nt, synthetic construct
  source 1..5785: mol_type = other RNA
aggaaataagagagaaaagaagagtaagaagaaatataagagccaccatggcccctaagaagaagcgtaaagtgagccggatggaacgcctcgtctacgaggtgcggcagaagtgcagaaacatcgaggacatctgcatctcctgcggatctctgaacgtgaccctggagcacccactgttcatcggcggcatgtgccagaactgtaaaaactgttttctggagtgtgcctatcaatacgacgatgacggctaccagagctactgcaccatctgttgcggcggaagagaggtgctgatgtgtggaaataacaactgctgccggtgcttctgcgtggaatgcgtggacctgctggtgggccccggcgccgcccaggccgctattaaggaagatccttggaactgctacatgtgcggccacaagggcacatacggcctgctgagacggagagaggactggcctagcagactgcagatgttcttcgccaataaccacgaccaggagttcgacccccctaaggtgtaccctcccgtccccgccgagaagagaaagcccatccgggtcctgagcctgttcgatggcatcgccaccggtctgctggtgctgaaggacctgggcatccaggtggataggtacattgcctccgaggtgtgcgaggactccatcaccgtgggaatggtgcgtcatcagggcaagatcatgtacgtgggcgacgtgcggagcgtgacacagaagcatatccaggagtggggccctttcgacctggtgatcggcggcagcccttgcaatgacctgagcatcgtgaacccagcccggaagggcctgtacgagggaaccggcagactgttcttcgagttttacagactgctgcacgacgcccggcctaaggaaggcgacgaccggcccttcttttggctgttcgagaatgtggtggccatgggagtcagcgacaagcgggatattagccggttcctggagagcaaccccgtgatgatcgatgccaaggaagtgagcgccgcccaccgggccagatacttctggggcaatctgcctggcatgaacagacccctggccagcaccgtgaacgacaagctggagctgcaggagtgcctggagcacggccggatcgccaagttcagcaaggtgagaaccatcaccacccgaagcaacagcatcaaacaaggcaaggaccagcactttcctgtgttcatgaacgagaaggaggacatcctgtggtgtaccgagatggagagagtgttcgggttcccagtccactacacagatgtcagcaacatgtctagactggccagacagagactgctgggaagaagctggtccgtccctgtgatcagacacctgttcgcccctctgaaggagtacttcgcctgcgtgagcagcggcaacagcaacgccaacagccggggccccagcttctctagcggcctggtgccactgtccctgagagggagccacatgggccccatggagatctacaaaaccgtgagcgcctggaagcggcagcctgtgcgcgtgctgagcctgtttcggaatatcgataaagtcctgaaaagcctgggattcctggagagcggctctggctccggcggtggcaccctgaagtacgtggaggatgtgacaaacgtggtcagacgggatgtggagaagtggggccccttcgatctggtgtacggcagcacccaacccctgggcagctcttgtgaccggtgccctggctggtacatgtttcagttccaccggatcctgcagtacgccctgccgagacaggagtcccagcggccattcttttggattttcatggacaacttgctgctgaccgaggatgaccaggaaactaccactcggttcctgcagaccgaagccgtgaccctgcaggacgtgagaggccgggactaccagaacgccatgcgggtgtggtccaacatccctggactgaaaagcaagcacgcacctctgacccctaaagaagaggagtacctgcaggcccaggtgcggagcagaagcaagctggacgcccctaaggtggatctgctggtgaagaattgcctcctgcccctgagagagtacttcaagtatttcagccagaatagtctgcccctgggaggcagcggcggcggcttccaggaggccgtgaccttcaaggacgtggccgtggccttcaccgaggaggagctgggcatgctggacagcgcccagaagaagctgtacagggacgtgatgctggagaacttcaggaacctggtgagcgtgggccaccagagcttcaagcccgacatgatcagccagctggagagggaggagaagctgtggatgaaggagctgcagacccagaggggcaagcacagcggcgagtactgcgccggcggcccaagcagcggcgcccctcctcccagcggcggcagcccagccggctccccaacctctaccgaggagggcacctctgagtccgccacccccgagagcggccctggcacctccaccgagcccagcgagggcagcgcacccggcagccctgccggcagccccacctccacagaggagggaaccagcaccgagcccagcgaaggcagcgccccaggcaccagcaccgagcctagtgagcaggagattaaacggatcaacaagatcagaagaagacttgtgaaagacagcaacaccaagaaggccggcaagacaggccccatgaaaaccctgctggttagagtgatgacacccgatctgagagagcggctggaaaacctgagaaagaagcctgaaaatatcccccagcccatcagcaatacatctagagccaacctgaataagctgctgaccgattacaccgaaatgaagaaggcgatcctgcatgtgtactgggaagagttccagaaggaccctgtgggcctgatgagccgggtggcccagcctgccagcaagaagatcgatcagaacaagctgaaacctgagatggacgagaagggcaacctgaccaccgccggctttgcctgctctcagtgtggccagcccctgttcgtgtacaagctggagcaggtgtctgagaagggcaaggcttacaccaactacttcggacggtgcaatgtggccgagcacgaaaagctgatcctgctggcccagctgaagcccgagaaggatagcgacgaagccgtgacatatagcctgggaaagtttgggcagagggccctggatttctacagcattcatgtgaccaaggagtccacccaccccgtgaagcccctggcccagatcgccggaaacagatacgcctccggacctgtgggaaaggccctgagcgacgcatgtatgggcacaatcgcctccttcctgtctaagtaccaggacatcatcatcgaacaccagaaggtggtgaagggcaaccagaagagactggagagcctgcgggagctggccggcaaggaaaacctggaataccctagcgtgaccctgccacctcagcctcacaccaaggagggcgttgatgcctacaacgaagtgatcgcccgggtgcgaatgtgggtgaacctgaacctgtggcagaagctgaagctaagcagagatgatgccaagcctctgctgagactgaagggattcccttcctttcctctggtcgagagacaggccaacgaagtggactggtgggacatggtgtgtaacgtgaagaagctgatcaacgagaaaaaggaggatggcaaggtgttttggcagaatctggctggctacaagagacaggaagccctgagaccatacctgagcagcgaggaagatcggaagaagggaaagaaattcgctcggtaccagctgggcgacctgctgctgcacctggaaaagaagcacggcgaggactggggaaaggtgtacgacgaggcctgggagcggattgacaagaaagtggaaggcctgagcaagcacatcaagctggaagaggaacggagaagcgaggacgcccagagcaaggccgccctgaccgactggctgcgggctaaggccagcttcgtgatcgagggcctgaaggaggccgacaaggacgagttctgcagatgcgagctgaagctgcagaagtggtacggggacctgcggggaaagcccttcgccatcgaagccgagaacagcatcctggacatcagcggcttcagcaagcagtacaactgtgccttcatctggcagaaggacggcgtgaagaagctgaacctgtacctgatcatcaactacttcaagggcggcaagctgcggttcaagaagatcaaacctgaagccttcgaagccaacagattctacaccgtgatcaacaaaaagagcggcgagatcgtgcccatggaggtgaacttcaacttcgacgaccccaacctgatcatcctgcctctggcctttggcaagagacagggcagagaattcatctggaacgacctgctgtccctggaaaccggcagcctgaagctggccaacggaagagtgatcgagaagacactgtacaacagaagaacccggcaggatgagcctgccctgttcgtggccctgaccttcgagcggcgggaggtcctggactcctccaatatcaaaccaatgaacctgatcggcgtggcaagaggcgaaaacatccccgccgtgatcgccctgaccgaccccgagggctgcccactgagccggtttaaggatagcctgggaaacccaacccacatcctgagaatcggcgagagctataaggagaagcagcggaccatccaggccaagaaggaggtggagcagcggagagccggcggctacagccggaagtacgccagcaaagccaagaatctggcagacgatatggtgagaaacaccgctagagatctgctgtactacgccgtgacccaggatgccatgctgatcttcgccaacctgagccggggcttcggccggcagggcaagcggaccttcatggccgagagacagtacacacggatggaggactggctgaccgccaagctggcctacgagggcctgagcaagacctacctgtccaagacactggcccagtacacctccaagacatgcagcaactgtgggtttaccatcaccagcgccgactacgacagggtgctggagaagctgaagaagacagcaacaggctggatgaccacaattaacggcaaggagctgaaggtggagggccagattacctactacaacagatacaagagacagaacgtagtcaaggacctgtccgtcgagctggatagactgagcgaagaatctgtgaacaacgacatctcctcctggacaaagggcagaagcggagaagctctgagcctcctgaagaaaagattctcccatagacccgtgcaggagaagttcgtgtgcctgaactgcggcttcgagacacacgcagccgagcaagccgccctgaacatcgccagatcctggctgttcctgcggagccaggagtacaagaaataccagacaaacaagacaaccggcaacaccgataagagagccttcgtcgagacctggcagtccttttaccggaagaagcttaaggaggtgtggaaacctgccgtgcggtctggcggatctggcggaggctccaccagccccaagaaaaagagaaaagtctaagctgccttctgcggggcttgccttctggccatgcccttcttctctcccttgcacctgtacctcttggtctttgaataaagcctgagtaggaaggctagcaaaaaaaaaaaaaaaaaaaaaaaaaaaaaaaaaaaaaaaaaaaaaaaaaaaaaaaaaaaaaaaaaaaaaaaaaaaaaaaa

SEQ ID NO: 12506 - RNA, 5785 nt, synthetic construct
  source 1..5785: mol_type = other RNA
aggaaataagagagaaaagaagagtaagaagaaatataagagccaccatggcccctaagaagaagcgtaaagtgagccggatggaacgcctcgtctacgaggtgcggcagaagtgcagaaacatcgaggacatctgcatctcctgcggatctctgaacgtgaccctggagcacccactgttcatcggcggcatgtgccagaactgtaaaaactgttttctggagtgtgcctatcaatacgacgatgacggctaccagagctactgcaccatctgttgcggcggaagagaggtgctgatgtgtggaaataacaactgctgccggtgcttctgcgtggaatgcgtggacctgctggtgggccccggcgccgcccaggccgctattaaggaagatccttggaactgctacatgtgcggccacaagggcacatacggcctgctgagacggagagaggactggcctagcagactgcagatgttcttcgccaataaccacgaccaggagttcgacccccctaaggtgtaccctcccgtccccgccgagaagagaaagcccatccgggtcctgagcctgttcgatggcatcgccaccggtctgctggtgctgaaggacctgggcatccaggtggataggtacattgcctccgaggtgtgcgaggactccatcaccgtgggaatggtgcgtcatcagggcaagatcatgtacgtgggcgacgtgcggagcgtgacacagaagcatatccaggagtggggccctttcgacctggtgatcggcggcagcccttgcaatgacctgagcatcgtgaacccagcccggaagggcctgtacgagggaaccggcagactgttcttcgagttttacagactgctgcacgacgcccggcctaaggaaggcgacgaccggcccttcttttggctgttcgagaatgtggtggccatgggagtcagcgacaagcgggatattagccggttcctggagagcaaccccgtgatgatcgatgccaaggaagtgagcgccgcccaccgggccagatacttctggggcaatctgcctggcatgaacagacccctggccagcaccgtgaacgacaagctggagctgcaggagtgcctggagcacggccggatcgccaagttcagcaaggtgagaaccatcaccacccgaagcaacagcatcaaacaaggcaaggaccagcactttcctgtgttcatgaacgagaaggaggacatcctgtggtgtaccgagatggagagagtgttcgggttcccagtccactacacagatgtcagcaacatgtctagactggccagacagagactgctgggaagaagctggtccgtccctgtgatcagacacctgttcgcccctctgaaggagtacttcgcctgcgtgagcagcggcaacagcaacgccaacagccggggccccagcttctctagcggcctggtgccactgtccctgagagggagccacatgggccccatggagatctacaaaaccgtgagcgcctggaagcggcagcctgtgcgcgtgctgagcctgtttcggaatatcgataaagtcctgaaaagcctgggattcctggagagcggctctggctccggcggtggcaccctgaagtacgtggaggatgtgacaaacgtggtcagacgggatgtggagaagtggggccccttcgatctggtgtacggcagcacccaacccctgggcagctcttgtgaccggtgccctggctggtacatgtttcagttccaccggatcctgcagtacgccctgccgagacaggagtcccagcggccattcttttggattttcatggacaacttgctgctgaccgaggatgaccaggaaactaccactcggttcctgcagaccgaagccgtgaccctgcaggacgtgagaggccgggactaccagaacgccatgcgggtgtggtccaacatccctggactgaaaagcaagcacgcacctctgacccctaaagaagaggagtacctgcaggcccaggtgcggagcagaagcaagctggacgcccctaaggtggatctgctggtgaagaattgcctcctgcccctgagagagtacttcaagtatttcagccagaatagtctgcccctgggaggcagcggcggcggcatgggccagctgaccttcaacgacgtgaccatcgagttcagcctggaggagtggcagtgcctggacaagccccagcagaacctgtacagggaggtgatgctggagaactacaggaacctggtgttcctgggcatcgccgtgagcaagcccgacctgatcacctgcctgaagcagggcaaggagccctggaacatcaggaggcacgagatggtgaccaagccccccgccatgtgcagccacttcggcggcccaagcagcggcgcccctcctcccagcggcggcagcccagccggctccccaacctctaccgaggagggcacctctgagtccgccacccccgagagcggccctggcacctccaccgagcccagcgagggcagcgcacccggcagccctgccggcagccccacctccacagaggagggaaccagcaccgagcccagcgaaggcagcgccccaggcaccagcaccgagcctagtgagcaggagattaaacggatcaacaagatcagaagaagacttgtgaaagacagcaacaccaagaaggccggcaagacaggccccatgaaaaccctgctggttagagtgatgacacccgatctgagagagcggctggaaaacctgagaaagaagcctgaaaatatcccccagcccatcagcaatacatctagagccaacctgaataagctgctgaccgattacaccgaaatgaagaaggcgatcctgcatgtgtactgggaagagttccagaaggaccctgtgggcctgatgagccgggtggcccagcctgccagcaagaagatcgatcagaacaagctgaaacctgagatggacgagaagggcaacctgaccaccgccggctttgcctgctctcagtgtggccagcccctgttcgtgtacaagctggagcaggtgtctgagaagggcaaggcttacaccaactacttcggacggtgcaatgtggccgagcacgaaaagctgatcctgctggcccagctgaagcccgagaaggatagcgacgaagccgtgacatatagcctgggaaagtttgggcagagggccctggatttctacagcattcatgtgaccaaggagtccacccaccccgtgaagcccctggcccagatcgccggaaacagatacgcctccggacctgtgggaaaggccctgagcgacgcatgtatgggcacaatcgcctccttcctgtctaagtaccaggacatcatcatcgaacaccagaaggtggtgaagggcaaccagaagagactggagagcctgcgggagctggccggcaaggaaaacctggaataccctagcgtgaccctgccacctcagcctcacaccaaggagggcgttgatgcctacaacgaagtgatcgcccgggtgcgaatgtgggtgaacctgaacctgtggcagaagctgaagctaagcagagatgatgccaagcctctgctgagactgaagggattcccttcctttcctctggtcgagagacaggccaacgaagtggactggtgggacatggtgtgtaacgtgaagaagctgatcaacgagaaaaaggaggatggcaaggtgttttggcagaatctggctggctacaagagacaggaagccctgagaccatacctgagcagcgaggaagatcggaagaagggaaagaaattcgctcggtaccagctgggcgacctgctgctgcacctggaaaagaagcacggcgaggactggggaaaggtgtacgacgaggcctgggagcggattgacaagaaagtggaaggcctgagcaagcacatcaagctggaagaggaacggagaagcgaggacgcccagagcaaggccgccctgaccgactggctgcgggctaaggccagcttcgtgatcgagggcctgaaggaggccgacaaggacgagttctgcagatgcgagctgaagctgcagaagtggtacggggacctgcggggaaagcccttcgccatcgaagccgagaacagcatcctggacatcagcggcttcagcaagcagtacaactgtgccttcatctggcagaaggacggcgtgaagaagctgaacctgtacctgatcatcaactacttcaagggcggcaagctgcggttcaagaagatcaaacctgaagccttcgaagccaacagattctacaccgtgatcaacaaaaagagcggcgagatcgtgcccatggaggtgaacttcaacttcgacgaccccaacctgatcatcctgcctctggcctttggcaagagacagggcagagaattcatctggaacgacctgctgtccctggaaaccggcagcctgaagctggccaacggaagagtgatcgagaagacactgtacaacagaagaacccggcaggatgagcctgccctgttcgtggccctgaccttcgagcggcgggaggtcctggactcctccaatatcaaaccaatgaacctgatcggcgtggcaagaggcgaaaacatccccgccgtgatcgccctgaccgaccccgagggctgcccactgagccggtttaaggatagcctgggaaacccaacccacatcctgagaatcggcgagagctataaggagaagcagcggaccatccaggccaagaaggaggtggagcagcggagagccggcggctacagccggaagtacgccagcaaagccaagaatctggcagacgatatggtgagaaacaccgctagagatctgctgtactacgccgtgacccaggatgccatgctgatcttcgccaacctgagccggggcttcggccggcagggcaagcggaccttcatggccgagagacagtacacacggatggaggactggctgaccgccaagctggcctacgagggcctgagcaagacctacctgtccaagacactggcccagtacacctccaagacatgcagcaactgtgggtttaccatcaccagcgccgactacgacagggtgctggagaagctgaagaagacagcaacaggctggatgaccacaattaacggcaaggagctgaaggtggagggccagattacctactacaacagatacaagagacagaacgtagtcaaggacctgtccgtcgagctggatagactgagcgaagaatctgtgaacaacgacatctcctcctggacaaagggcagaagcggagaagctctgagcctcctgaagaaaagattctcccatagacccgtgcaggagaagttcgtgtgcctgaactgcggcttcgagacacacgcagccgagcaagccgccctgaacatcgccagatcctggctgttcctgcggagccaggagtacaagaaataccagacaaacaagacaaccggcaacaccgataagagagccttcgtcgagacctggcagtccttttaccggaagaagcttaaggaggtgtggaaacctgccgtgcggtctggcggatctggcggaggctccaccagccccaagaaaaagagaaaagtctaagctgccttctgcggggcttgccttctggccatgcccttcttctctcccttgcacctgtacctcttggtctttgaataaagcctgagtaggaaggctagcaaaaaaaaaaaaaaaaaaaaaaaaaaaaaaaaaaaaaaaaaaaaaaaaaaaaaaaaaaaaaaaaaaaaaaaaaaaaaaaa

SEQ ID NO: 12507 - RNA, 5785 nt, synthetic construct
  source 1..5785: mol_type = other RNA
aggaaataagagagaaaagaagagtaagaagaaatataagagccaccatggcccctaagaagaagcgtaaagtgagccggatggaacgcctcgtctacgaggtgcggcagaagtgcagaaacatcgaggacatctgcatctcctgcggatctctgaacgtgaccctggagcacccactgttcatcggcggcatgtgccagaactgtaaaaactgttttctggagtgtgcctatcaatacgacgatgacggctaccagagctactgcaccatctgttgcggcggaagagaggtgctgatgtgtggaaataacaactgctgccggtgcttctgcgtggaatgcgtggacctgctggtgggccccggcgccgcccaggccgctattaaggaagatccttggaactgctacatgtgcggccacaagggcacatacggcctgctgagacggagagaggactggcctagcagactgcagatgttcttcgccaataaccacgaccaggagttcgacccccctaaggtgtaccctcccgtccccgccgagaagagaaagcccatccgggtcctgagcctgttcgatggcatcgccaccggtctgctggtgctgaaggacctgggcatccaggtggataggtacattgcctccgaggtgtgcgaggactccatcaccgtgggaatggtgcgtcatcagggcaagatcatgtacgtgggcgacgtgcggagcgtgacacagaagcatatccaggagtggggccctttcgacctggtgatcggcggcagcccttgcaatgacctgagcatcgtgaacccagcccggaagggcctgtacgagggaaccggcagactgttcttcgagttttacagactgctgcacgacgcccggcctaaggaaggcgacgaccggcccttcttttggctgttcgagaatgtggtggccatgggagtcagcgacaagcgggatattagccggttcctggagagcaaccccgtgatgatcgatgccaaggaagtgagcgccgcccaccgggccagatacttctggggcaatctgcctggcatgaacagacccctggccagcaccgtgaacgacaagctggagctgcaggagtgcctggagcacggccggatcgccaagttcagcaaggtgagaaccatcaccacccgaagcaacagcatcaaacaaggcaaggaccagcactttcctgtgttcatgaacgagaaggaggacatcctgtggtgtaccgagatggagagagtgttcgggttcccagtccactacacagatgtcagcaacatgtctagactggccagacagagactgctgggaagaagctggtccgtccctgtgatcagacacctgttcgcccctctgaaggagtacttcgcctgcgtgagcagcggcaacagcaacgccaacagccggggccccagcttctctagcggcctggtgccactgtccctgagagggagccacatgggccccatggagatctacaaaaccgtgagcgcctggaagcggcagcctgtgcgcgtgctgagcctgtttcggaatatcgataaagtcctgaaaagcctgggattcctggagagcggctctggctccggcggtggcaccctgaagtacgtggaggatgtgacaaacgtggtcagacgggatgtggagaagtggggccccttcgatctggtgtacggcagcacccaacccctgggcagctcttgtgaccggtgccctggctggtacatgtttcagttccaccggatcctgcagtacgccctgccgagacaggagtcccagcggccattcttttggattttcatggacaacttgctgctgaccgaggatgaccaggaaactaccactcggttcctgcagaccgaagccgtgaccctgcaggacgtgagaggccgggactaccagaacgccatgcgggtgtggtccaacatccctggactgaaaagcaagcacgcacctctgacccctaaagaagaggagtacctgcaggcccaggtgcggagcagaagcaagctggacgcccctaaggtggatctgctggtgaagaattgcctcctgcccctgagagagtacttcaagtatttcagccagaatagtctgcccctgggaggcagcggcggcggcatgcccctgaaggccaggtaccaggagatggtgaccttcgaggacgtggccgtgcacttcaccaagaccgagtggaccggcctgagccccgcccagagggccctgtacaggagcgtgatgctggagaacttcggcaacctgaccgccctgggctaccccgtgcccaagcccgccctgatcagcctgctggagggcggcgacatggcctggggcctggaggcccaggacgacccccccgccgagggcggcccaagcagcggcgcccctcctcccagcggcggcagcccagccggctccccaacctctaccgaggagggcacctctgagtccgccacccccgagagcggccctggcacctccaccgagcccagcgagggcagcgcacccggcagccctgccggcagccccacctccacagaggagggaaccagcaccgagcccagcgaaggcagcgccccaggcaccagcaccgagcctagtgagcaggagattaaacggatcaacaagatcagaagaagacttgtgaaagacagcaacaccaagaaggccggcaagacaggccccatgaaaaccctgctggttagagtgatgacacccgatctgagagagcggctggaaaacctgagaaagaagcctgaaaatatcccccagcccatcagcaatacatctagagccaacctgaataagctgctgaccgattacaccgaaatgaagaaggcgatcctgcatgtgtactgggaagagttccagaaggaccctgtgggcctgatgagccgggtggcccagcctgccagcaagaagatcgatcagaacaagctgaaacctgagatggacgagaagggcaacctgaccaccgccggctttgcctgctctcagtgtggccagcccctgttcgtgtacaagctggagcaggtgtctgagaagggcaaggcttacaccaactacttcggacggtgcaatgtggccgagcacgaaaagctgatcctgctggcccagctgaagcccgagaaggatagcgacgaagccgtgacatatagcctgggaaagtttgggcagagggccctggatttctacagcattcatgtgaccaaggagtccacccaccccgtgaagcccctggcccagatcgccggaaacagatacgcctccggacctgtgggaaaggccctgagcgacgcatgtatgggcacaatcgcctccttcctgtctaagtaccaggacatcatcatcgaacaccagaaggtggtgaagggcaaccagaagagactggagagcctgcgggagctggccggcaaggaaaacctggaataccctagcgtgaccctgccacctcagcctcacaccaaggagggcgttgatgcctacaacgaagtgatcgcccgggtgcgaatgtgggtgaacctgaacctgtggcagaagctgaagctaagcagagatgatgccaagcctctgctgagactgaagggattcccttcctttcctctggtcgagagacaggccaacgaagtggactggtgggacatggtgtgtaacgtgaagaagctgatcaacgagaaaaaggaggatggcaaggtgttttggcagaatctggctggctacaagagacaggaagccctgagaccatacctgagcagcgaggaagatcggaagaagggaaagaaattcgctcggtaccagctgggcgacctgctgctgcacctggaaaagaagcacggcgaggactggggaaaggtgtacgacgaggcctgggagcggattgacaagaaagtggaaggcctgagcaagcacatcaagctggaagaggaacggagaagcgaggacgcccagagcaaggccgccctgaccgactggctgcgggctaaggccagcttcgtgatcgagggcctgaaggaggccgacaaggacgagttctgcagatgcgagctgaagctgcagaagtggtacggggacctgcggggaaagcccttcgccatcgaagccgagaacagcatcctggacatcagcggcttcagcaagcagtacaactgtgccttcatctggcagaaggacggcgtgaagaagctgaacctgtacctgatcatcaactacttcaagggcggcaagctgcggttcaagaagatcaaacctgaagccttcgaagccaacagattctacaccgtgatcaacaaaaagagcggcgagatcgtgcccatggaggtgaacttcaacttcgacgaccccaacctgatcatcctgcctctggcctttggcaagagacagggcagagaattcatctggaacgacctgctgtccctggaaaccggcagcctgaagctggccaacggaagagtgatcgagaagacactgtacaacagaagaacccggcaggatgagcctgccctgttcgtggccctgaccttcgagcggcgggaggtcctggactcctccaatatcaaaccaatgaacctgatcggcgtggcaagaggcgaaaacatccccgccgtgatcgccctgaccgaccccgagggctgcccactgagccggtttaaggatagcctgggaaacccaacccacatcctgagaatcggcgagagctataaggagaagcagcggaccatccaggccaagaaggaggtggagcagcggagagccggcggctacagccggaagtacgccagcaaagccaagaatctggcagacgatatggtgagaaacaccgctagagatctgctgtactacgccgtgacccaggatgccatgctgatcttcgccaacctgagccggggcttcggccggcagggcaagcggaccttcatggccgagagacagtacacacggatggaggactggctgaccgccaagctggcctacgagggcctgagcaagacctacctgtccaagacactggcccagtacacctccaagacatgcagcaactgtgggtttaccatcaccagcgccgactacgacagggtgctggagaagctgaagaagacagcaacaggctggatgaccacaattaacggcaaggagctgaaggtggagggccagattacctactacaacagatacaagagacagaacgtagtcaaggacctgtccgtcgagctggatagactgagcgaagaatctgtgaacaacgacatctcctcctggacaaagggcagaagcggagaagctctgagcctcctgaagaaaagattctcccatagacccgtgcaggagaagttcgtgtgcctgaactgcggcttcgagacacacgcagccgagcaagccgccctgaacatcgccagatcctggctgttcctgcggagccaggagtacaagaaataccagacaaacaagacaaccggcaacaccgataagagagccttcgtcgagacctggcagtccttttaccggaagaagcttaaggaggtgtggaaacctgccgtgcggtctggcggatctggcggaggctccaccagccccaagaaaaagagaaaagtctaagctgccttctgcggggcttgccttctggccatgcccttcttctctcccttgcacctgtacctcttggtctttgaataaagcctgagtaggaaggctagcaaaaaaaaaaaaaaaaaaaaaaaaaaaaaaaaaaaaaaaaaaaaaaaaaaaaaaaaaaaaaaaaaaaaaaaaaaaaaaaa

SEQ ID NO: 12508 - RNA, 5785 nt, synthetic construct
  source 1..5785: mol_type = other RNA
aggaaataagagagaaaagaagagtaagaagaaatataagagccaccatggcccctaagaagaagcgtaaagtgagccggatggaacgcctcgtctacgaggtgcggcagaagtgcagaaacatcgaggacatctgcatctcctgcggatctctgaacgtgaccctggagcacccactgttcatcggcggcatgtgccagaactgtaaaaactgttttctggagtgtgcctatcaatacgacgatgacggctaccagagctactgcaccatctgttgcggcggaagagaggtgctgatgtgtggaaataacaactgctgccggtgcttctgcgtggaatgcgtggacctgctggtgggccccggcgccgcccaggccgctattaaggaagatccttggaactgctacatgtgcggccacaagggcacatacggcctgctgagacggagagaggactggcctagcagactgcagatgttcttcgccaataaccacgaccaggagttcgacccccctaaggtgtaccctcccgtccccgccgagaagagaaagcccatccgggtcctgagcctgttcgatggcatcgccaccggtctgctggtgctgaaggacctgggcatccaggtggataggtacattgcctccgaggtgtgcgaggactccatcaccgtgggaatggtgcgtcatcagggcaagatcatgtacgtgggcgacgtgcggagcgtgacacagaagcatatccaggagtggggccctttcgacctggtgatcggcggcagcccttgcaatgacctgagcatcgtgaacccagcccggaagggcctgtacgagggaaccggcagactgttcttcgagttttacagactgctgcacgacgcccggcctaaggaaggcgacgaccggcccttcttttggctgttcgagaatgtggtggccatgggagtcagcgacaagcgggatattagccggttcctggagagcaaccccgtgatgatcgatgccaaggaagtgagcgccgcccaccgggccagatacttctggggcaatctgcctggcatgaacagacccctggccagcaccgtgaacgacaagctggagctgcaggagtgcctggagcacggccggatcgccaagttcagcaaggtgagaaccatcaccacccgaagcaacagcatcaaacaaggcaaggaccagcactttcctgtgttcatgaacgagaaggaggacatcctgtggtgtaccgagatggagagagtgttcgggttcccagtccactacacagatgtcagcaacatgtctagactggccagacagagactgctgggaagaagctggtccgtccctgtgatcagacacctgttcgcccctctgaaggagtacttcgcctgcgtgagcagcggcaacagcaacgccaacagccggggccccagcttctctagcggcctggtgccactgtccctgagagggagccacatgggccccatggagatctacaaaaccgtgagcgcctggaagcggcagcctgtgcgcgtgctgagcctgtttcggaatatcgataaagtcctgaaaagcctgggattcctggagagcggctctggctccggcggtggcaccctgaagtacgtggaggatgtgacaaacgtggtcagacgggatgtggagaagtggggccccttcgatctggtgtacggcagcacccaacccctgggcagctcttgtgaccggtgccctggctggtacatgtttcagttccaccggatcctgcagtacgccctgccgagacaggagtcccagcggccattcttttggattttcatggacaacttgctgctgaccgaggatgaccaggaaactaccactcggttcctgcagaccgaagccgtgaccctgcaggacgtgagaggccgggactaccagaacgccatgcgggtgtggtccaacatccctggactgaaaagcaagcacgcacctctgacccctaaagaagaggagtacctgcaggcccaggtgcggagcagaagcaagctggacgcccctaaggtggatctgctggtgaagaattgcctcctgcccctgagagagtacttcaagtatttcagccagaatagtctgcccctgggaggcagcggcggcggcttccaggagagcgtgatgttcgaggacgtggccgtgtacttcacccagaaggagtgggccgacctggcccccgcccagagggccctgtacagggacgtgatgctggagaactacggcaacatggtgagcctggccttccccttccccaagcccgccgtgatcagcaagctggagaggggcgaggagccctggggcctggacccccaggtggtgcccaacgaggagggcctgaagggcttccccggcggcccaagcagcggcgcccctcctcccagcggcggcagcccagccggctccccaacctctaccgaggagggcacctctgagtccgccacccccgagagcggccctggcacctccaccgagcccagcgagggcagcgcacccggcagccctgccggcagccccacctccacagaggagggaaccagcaccgagcccagcgaaggcagcgccccaggcaccagcaccgagcctagtgagcaggagattaaacggatcaacaagatcagaagaagacttgtgaaagacagcaacaccaagaaggccggcaagacaggccccatgaaaaccctgctggttagagtgatgacacccgatctgagagagcggctggaaaacctgagaaagaagcctgaaaatatcccccagcccatcagcaatacatctagagccaacctgaataagctgctgaccgattacaccgaaatgaagaaggcgatcctgcatgtgtactgggaagagttccagaaggaccctgtgggcctgatgagccgggtggcccagcctgccagcaagaagatcgatcagaacaagctgaaacctgagatggacgagaagggcaacctgaccaccgccggctttgcctgctctcagtgtggccagcccctgttcgtgtacaagctggagcaggtgtctgagaagggcaaggcttacaccaactacttcggacggtgcaatgtggccgagcacgaaaagctgatcctgctggcccagctgaagcccgagaaggatagcgacgaagccgtgacatatagcctgggaaagtttgggcagagggccctggatttctacagcattcatgtgaccaaggagtccacccaccccgtgaagcccctggcccagatcgccggaaacagatacgcctccggacctgtgggaaaggccctgagcgacgcatgtatgggcacaatcgcctccttcctgtctaagtaccaggacatcatcatcgaacaccagaaggtggtgaagggcaaccagaagagactggagagcctgcgggagctggccggcaaggaaaacctggaataccctagcgtgaccctgccacctcagcctcacaccaaggagggcgttgatgcctacaacgaagtgatcgcccgggtgcgaatgtgggtgaacctgaacctgtggcagaagctgaagctaagcagagatgatgccaagcctctgctgagactgaagggattcccttcctttcctctggtcgagagacaggccaacgaagtggactggtgggacatggtgtgtaacgtgaagaagctgatcaacgagaaaaaggaggatggcaaggtgttttggcagaatctggctggctacaagagacaggaagccctgagaccatacctgagcagcgaggaagatcggaagaagggaaagaaattcgctcggtaccagctgggcgacctgctgctgcacctggaaaagaagcacggcgaggactggggaaaggtgtacgacgaggcctgggagcggattgacaagaaagtggaaggcctgagcaagcacatcaagctggaagaggaacggagaagcgaggacgcccagagcaaggccgccctgaccgactggctgcgggctaaggccagcttcgtgatcgagggcctgaaggaggccgacaaggacgagttctgcagatgcgagctgaagctgcagaagtggtacggggacctgcggggaaagcccttcgccatcgaagccgagaacagcatcctggacatcagcggcttcagcaagcagtacaactgtgccttcatctggcagaaggacggcgtgaagaagctgaacctgtacctgatcatcaactacttcaagggcggcaagctgcggttcaagaagatcaaacctgaagccttcgaagccaacagattctacaccgtgatcaacaaaaagagcggcgagatcgtgcccatggaggtgaacttcaacttcgacgaccccaacctgatcatcctgcctctggcctttggcaagagacagggcagagaattcatctggaacgacctgctgtccctggaaaccggcagcctgaagctggccaacggaagagtgatcgagaagacactgtacaacagaagaacccggcaggatgagcctgccctgttcgtggccctgaccttcgagcggcgggaggtcctggactcctccaatatcaaaccaatgaacctgatcggcgtggcaagaggcgaaaacatccccgccgtgatcgccctgaccgaccccgagggctgcccactgagccggtttaaggatagcctgggaaacccaacccacatcctgagaatcggcgagagctataaggagaagcagcggaccatccaggccaagaaggaggtggagcagcggagagccggcggctacagccggaagtacgccagcaaagccaagaatctggcagacgatatggtgagaaacaccgctagagatctgctgtactacgccgtgacccaggatgccatgctgatcttcgccaacctgagccggggcttcggccggcagggcaagcggaccttcatggccgagagacagtacacacggatggaggactggctgaccgccaagctggcctacgagggcctgagcaagacctacctgtccaagacactggcccagtacacctccaagacatgcagcaactgtgggtttaccatcaccagcgccgactacgacagggtgctggagaagctgaagaagacagcaacaggctggatgaccacaattaacggcaaggagctgaaggtggagggccagattacctactacaacagatacaagagacagaacgtagtcaaggacctgtccgtcgagctggatagactgagcgaagaatctgtgaacaacgacatctcctcctggacaaagggcagaagcggagaagctctgagcctcctgaagaaaagattctcccatagacccgtgcaggagaagttcgtgtgcctgaactgcggcttcgagacacacgcagccgagcaagccgccctgaacatcgccagatcctggctgttcctgcggagccaggagtacaagaaataccagacaaacaagacaaccggcaacaccgataagagagccttcgtcgagacctggcagtccttttaccggaagaagcttaaggaggtgtggaaacctgccgtgcggtctggcggatctggcggaggctccaccagccccaagaaaaagagaaaagtctaagctgccttctgcggggcttgccttctggccatgcccttcttctctcccttgcacctgtacctcttggtctttgaataaagcctgagtaggaaggctagcaaaaaaaaaaaaaaaaaaaaaaaaaaaaaaaaaaaaaaaaaaaaaaaaaaaaaaaaaaaaaaaaaaaaaaaaaaaaaaaa

SEQ ID NO: 12509 - RNA, 5785 nt, synthetic construct
  source 1..5785: mol_type = other RNA
aggaaataagagagaaaagaagagtaagaagaaatataagagccaccatggcccctaagaagaagcgtaaagtgagccggatggaacgcctcgtctacgaggtgcggcagaagtgcagaaacatcgaggacatctgcatctcctgcggatctctgaacgtgaccctggagcacccactgttcatcggcggcatgtgccagaactgtaaaaactgttttctggagtgtgcctatcaatacgacgatgacggctaccagagctactgcaccatctgttgcggcggaagagaggtgctgatgtgtggaaataacaactgctgccggtgcttctgcgtggaatgcgtggacctgctggtgggccccggcgccgcccaggccgctattaaggaagatccttggaactgctacatgtgcggccacaagggcacatacggcctgctgagacggagagaggactggcctagcagactgcagatgttcttcgccaataaccacgaccaggagttcgacccccctaaggtgtaccctcccgtccccgccgagaagagaaagcccatccgggtcctgagcctgttcgatggcatcgccaccggtctgctggtgctgaaggacctgggcatccaggtggataggtacattgcctccgaggtgtgcgaggactccatcaccgtgggaatggtgcgtcatcagggcaagatcatgtacgtgggcgacgtgcggagcgtgacacagaagcatatccaggagtggggccctttcgacctggtgatcggcggcagcccttgcaatgacctgagcatcgtgaacccagcccggaagggcctgtacgagggaaccggcagactgttcttcgagttttacagactgctgcacgacgcccggcctaaggaaggcgacgaccggcccttcttttggctgttcgagaatgtggtggccatgggagtcagcgacaagcgggatattagccggttcctggagagcaaccccgtgatgatcgatgccaaggaagtgagcgccgcccaccgggccagatacttctggggcaatctgcctggcatgaacagacccctggccagcaccgtgaacgacaagctggagctgcaggagtgcctggagcacggccggatcgccaagttcagcaaggtgagaaccatcaccacccgaagcaacagcatcaaacaaggcaaggaccagcactttcctgtgttcatgaacgagaaggaggacatcctgtggtgtaccgagatggagagagtgttcgggttcccagtccactacacagatgtcagcaacatgtctagactggccagacagagactgctgggaagaagctggtccgtccctgtgatcagacacctgttcgcccctctgaaggagtacttcgcctgcgtgagcagcggcaacagcaacgccaacagccggggccccagcttctctagcggcctggtgccactgtccctgagagggagccacatgggccccatggagatctacaaaaccgtgagcgcctggaagcggcagcctgtgcgcgtgctgagcctgtttcggaatatcgataaagtcctgaaaagcctgggattcctggagagcggctctggctccggcggtggcaccctgaagtacgtggaggatgtgacaaacgtggtcagacgggatgtggagaagtggggccccttcgatctggtgtacggcagcacccaacccctgggcagctcttgtgaccggtgccctggctggtacatgtttcagttccaccggatcctgcagtacgccctgccgagacaggagtcccagcggccattcttttggattttcatggacaacttgctgctgaccgaggatgaccaggaaactaccactcggttcctgcagaccgaagccgtgaccctgcaggacgtgagaggccgggactaccagaacgccatgcgggtgtggtccaacatccctggactgaaaagcaagcacgcacctctgacccctaaagaagaggagtacctgcaggcccaggtgcggagcagaagcaagctggacgcccctaaggtggatctgctggtgaagaattgcctcctgcccctgagagagtacttcaagtatttcagccagaatagtctgcccctgggaggcagcggcggcggcatggtgttcgaggacgtggccgtgtacttcagcagggaggagtggggcctgctggacagcgcccagagggccctgtacaggcaggtgatgctggagaacttcgccctggtggccagcctgggcctgagcgccagcaggcccaggatcgtgctgcagctggagaggggcgaggagccctgggtgctgagcggcctggacgtggccctggccagggacgcccagaggaggcccggccccggcgagggcggcccaagcagcggcgcccctcctcccagcggcggcagcccagccggctccccaacctctaccgaggagggcacctctgagtccgccacccccgagagcggccctggcacctccaccgagcccagcgagggcagcgcacccggcagccctgccggcagccccacctccacagaggagggaaccagcaccgagcccagcgaaggcagcgccccaggcaccagcaccgagcctagtgagcaggagattaaacggatcaacaagatcagaagaagacttgtgaaagacagcaacaccaagaaggccggcaagacaggccccatgaaaaccctgctggttagagtgatgacacccgatctgagagagcggctggaaaacctgagaaagaagcctgaaaatatcccccagcccatcagcaatacatctagagccaacctgaataagctgctgaccgattacaccgaaatgaagaaggcgatcctgcatgtgtactgggaagagttccagaaggaccctgtgggcctgatgagccgggtggcccagcctgccagcaagaagatcgatcagaacaagctgaaacctgagatggacgagaagggcaacctgaccaccgccggctttgcctgctctcagtgtggccagcccctgttcgtgtacaagctggagcaggtgtctgagaagggcaaggcttacaccaactacttcggacggtgcaatgtggccgagcacgaaaagctgatcctgctggcccagctgaagcccgagaaggatagcgacgaagccgtgacatatagcctgggaaagtttgggcagagggccctggatttctacagcattcatgtgaccaaggagtccacccaccccgtgaagcccctggcccagatcgccggaaacagatacgcctccggacctgtgggaaaggccctgagcgacgcatgtatgggcacaatcgcctccttcctgtctaagtaccaggacatcatcatcgaacaccagaaggtggtgaagggcaaccagaagagactggagagcctgcgggagctggccggcaaggaaaacctggaataccctagcgtgaccctgccacctcagcctcacaccaaggagggcgttgatgcctacaacgaagtgatcgcccgggtgcgaatgtgggtgaacctgaacctgtggcagaagctgaagctaagcagagatgatgccaagcctctgctgagactgaagggattcccttcctttcctctggtcgagagacaggccaacgaagtggactggtgggacatggtgtgtaacgtgaagaagctgatcaacgagaaaaaggaggatggcaaggtgttttggcagaatctggctggctacaagagacaggaagccctgagaccatacctgagcagcgaggaagatcggaagaagggaaagaaattcgctcggtaccagctgggcgacctgctgctgcacctggaaaagaagcacggcgaggactggggaaaggtgtacgacgaggcctgggagcggattgacaagaaagtggaaggcctgagcaagcacatcaagctggaagaggaacggagaagcgaggacgcccagagcaaggccgccctgaccgactggctgcgggctaaggccagcttcgtgatcgagggcctgaaggaggccgacaaggacgagttctgcagatgcgagctgaagctgcagaagtggtacggggacctgcggggaaagcccttcgccatcgaagccgagaacagcatcctggacatcagcggcttcagcaagcagtacaactgtgccttcatctggcagaaggacggcgtgaagaagctgaacctgtacctgatcatcaactacttcaagggcggcaagctgcggttcaagaagatcaaacctgaagccttcgaagccaacagattctacaccgtgatcaacaaaaagagcggcgagatcgtgcccatggaggtgaacttcaacttcgacgaccccaacctgatcatcctgcctctggcctttggcaagagacagggcagagaattcatctggaacgacctgctgtccctggaaaccggcagcctgaagctggccaacggaagagtgatcgagaagacactgtacaacagaagaacccggcaggatgagcctgccctgttcgtggccctgaccttcgagcggcgggaggtcctggactcctccaatatcaaaccaatgaacctgatcggcgtggcaagaggcgaaaacatccccgccgtgatcgccctgaccgaccccgagggctgcccactgagccggtttaaggatagcctgggaaacccaacccacatcctgagaatcggcgagagctataaggagaagcagcggaccatccaggccaagaaggaggtggagcagcggagagccggcggctacagccggaagtacgccagcaaagccaagaatctggcagacgatatggtgagaaacaccgctagagatctgctgtactacgccgtgacccaggatgccatgctgatcttcgccaacctgagccggggcttcggccggcagggcaagcggaccttcatggccgagagacagtacacacggatggaggactggctgaccgccaagctggcctacgagggcctgagcaagacctacctgtccaagacactggcccagtacacctccaagacatgcagcaactgtgggtttaccatcaccagcgccgactacgacagggtgctggagaagctgaagaagacagcaacaggctggatgaccacaattaacggcaaggagctgaaggtggagggccagattacctactacaacagatacaagagacagaacgtagtcaaggacctgtccgtcgagctggatagactgagcgaagaatctgtgaacaacgacatctcctcctggacaaagggcagaagcggagaagctctgagcctcctgaagaaaagattctcccatagacccgtgcaggagaagttcgtgtgcctgaactgcggcttcgagacacacgcagccgagcaagccgccctgaacatcgccagatcctggctgttcctgcggagccaggagtacaagaaataccagacaaacaagacaaccggcaacaccgataagagagccttcgtcgagacctggcagtccttttaccggaagaagcttaaggaggtgtggaaacctgccgtgcggtctggcggatctggcggaggctccaccagccccaagaaaaagagaaaagtctaagctgccttctgcggggcttgccttctggccatgcccttcttctctcccttgcacctgtacctcttggtctttgaataaagcctgagtaggaaggctagcaaaaaaaaaaaaaaaaaaaaaaaaaaaaaaaaaaaaaaaaaaaaaaaaaaaaaaaaaaaaaaaaaaaaaaaaaaaaaaaa

SEQ ID NO: 12510 - RNA, 5785 nt, synthetic construct
  source 1..5785: mol_type = other RNA
aggaaataagagagaaaagaagagtaagaagaaatataagagccaccatggcccctaagaagaagcgtaaagtgagccggatggaacgcctcgtctacgaggtgcggcagaagtgcagaaacatcgaggacatctgcatctcctgcggatctctgaacgtgaccctggagcacccactgttcatcggcggcatgtgccagaactgtaaaaactgttttctggagtgtgcctatcaatacgacgatgacggctaccagagctactgcaccatctgttgcggcggaagagaggtgctgatgtgtggaaataacaactgctgccggtgcttctgcgtggaatgcgtggacctgctggtgggccccggcgccgcccaggccgctattaaggaagatccttggaactgctacatgtgcggccacaagggcacatacggcctgctgagacggagagaggactggcctagcagactgcagatgttcttcgccaataaccacgaccaggagttcgacccccctaaggtgtaccctcccgtccccgccgagaagagaaagcccatccgggtcctgagcctgttcgatggcatcgccaccggtctgctggtgctgaaggacctgggcatccaggtggataggtacattgcctccgaggtgtgcgaggactccatcaccgtgggaatggtgcgtcatcagggcaagatcatgtacgtgggcgacgtgcggagcgtgacacagaagcatatccaggagtggggccctttcgacctggtgatcggcggcagcccttgcaatgacctgagcatcgtgaacccagcccggaagggcctgtacgagggaaccggcagactgttcttcgagttttacagactgctgcacgacgcccggcctaaggaaggcgacgaccggcccttcttttggctgttcgagaatgtggtggccatgggagtcagcgacaagcgggatattagccggttcctggagagcaaccccgtgatgatcgatgccaaggaagtgagcgccgcccaccgggccagatacttctggggcaatctgcctggcatgaacagacccctggccagcaccgtgaacgacaagctggagctgcaggagtgcctggagcacggccggatcgccaagttcagcaaggtgagaaccatcaccacccgaagcaacagcatcaaacaaggcaaggaccagcactttcctgtgttcatgaacgagaaggaggacatcctgtggtgtaccgagatggagagagtgttcgggttcccagtccactacacagatgtcagcaacatgtctagactggccagacagagactgctgggaagaagctggtccgtccctgtgatcagacacctgttcgcccctctgaaggagtacttcgcctgcgtgagcagcggcaacagcaacgccaacagccggggccccagcttctctagcggcctggtgccactgtccctgagagggagccacatgggccccatggagatctacaaaaccgtgagcgcctggaagcggcagcctgtgcgcgtgctgagcctgtttcggaatatcgataaagtcctgaaaagcctgggattcctggagagcggctctggctccggcggtggcaccctgaagtacgtggaggatgtgacaaacgtggtcagacgggatgtggagaagtggggccccttcgatctggtgtacggcagcacccaacccctgggcagctcttgtgaccggtgccctggctggtacatgtttcagttccaccggatcctgcagtacgccctgccgagacaggagtcccagcggccattcttttggattttcatggacaacttgctgctgaccgaggatgaccaggaaactaccactcggttcctgcagaccgaagccgtgaccctgcaggacgtgagaggccgggactaccagaacgccatgcgggtgtggtccaacatccctggactgaaaagcaagcacgcacctctgacccctaaagaagaggagtacctgcaggcccaggtgcggagcagaagcaagctggacgcccctaaggtggatctgctggtgaagaattgcctcctgcccctgagagagtacttcaagtatttcagccagaatagtctgcccctgggaggcagcggcggcggcagcgtggccttcagggacgtgatcgtggacttcacccaggaggagtggcagcagctgaagcccgcccagaaggacctgtacagggacgtgatgatggagaactactggaacctggtgagcctggacctggagaccaggcccgacaagaaggagagcgacccccaggaggacgactgggaggacaggcccagcatcgccgtggtggccgagggccccatgaggaccggcgaccagggctgcatcggcggcccaagcagcggcgcccctcctcccagcggcggcagcccagccggctccccaacctctaccgaggagggcacctctgagtccgccacccccgagagcggccctggcacctccaccgagcccagcgagggcagcgcacccggcagccctgccggcagccccacctccacagaggagggaaccagcaccgagcccagcgaaggcagcgccccaggcaccagcaccgagcctagtgagcaggagattaaacggatcaacaagatcagaagaagacttgtgaaagacagcaacaccaagaaggccggcaagacaggccccatgaaaaccctgctggttagagtgatgacacccgatctgagagagcggctggaaaacctgagaaagaagcctgaaaatatcccccagcccatcagcaatacatctagagccaacctgaataagctgctgaccgattacaccgaaatgaagaaggcgatcctgcatgtgtactgggaagagttccagaaggaccctgtgggcctgatgagccgggtggcccagcctgccagcaagaagatcgatcagaacaagctgaaacctgagatggacgagaagggcaacctgaccaccgccggctttgcctgctctcagtgtggccagcccctgttcgtgtacaagctggagcaggtgtctgagaagggcaaggcttacaccaactacttcggacggtgcaatgtggccgagcacgaaaagctgatcctgctggcccagctgaagcccgagaaggatagcgacgaagccgtgacatatagcctgggaaagtttgggcagagggccctggatttctacagcattcatgtgaccaaggagtccacccaccccgtgaagcccctggcccagatcgccggaaacagatacgcctccggacctgtgggaaaggccctgagcgacgcatgtatgggcacaatcgcctccttcctgtctaagtaccaggacatcatcatcgaacaccagaaggtggtgaagggcaaccagaagagactggagagcctgcgggagctggccggcaaggaaaacctggaataccctagcgtgaccctgccacctcagcctcacaccaaggagggcgttgatgcctacaacgaagtgatcgcccgggtgcgaatgtgggtgaacctgaacctgtggcagaagctgaagctaagcagagatgatgccaagcctctgctgagactgaagggattcccttcctttcctctggtcgagagacaggccaacgaagtggactggtgggacatggtgtgtaacgtgaagaagctgatcaacgagaaaaaggaggatggcaaggtgttttggcagaatctggctggctacaagagacaggaagccctgagaccatacctgagcagcgaggaagatcggaagaagggaaagaaattcgctcggtaccagctgggcgacctgctgctgcacctggaaaagaagcacggcgaggactggggaaaggtgtacgacgaggcctgggagcggattgacaagaaagtggaaggcctgagcaagcacatcaagctggaagaggaacggagaagcgaggacgcccagagcaaggccgccctgaccgactggctgcgggctaaggccagcttcgtgatcgagggcctgaaggaggccgacaaggacgagttctgcagatgcgagctgaagctgcagaagtggtacggggacctgcggggaaagcccttcgccatcgaagccgagaacagcatcctggacatcagcggcttcagcaagcagtacaactgtgccttcatctggcagaaggacggcgtgaagaagctgaacctgtacctgatcatcaactacttcaagggcggcaagctgcggttcaagaagatcaaacctgaagccttcgaagccaacagattctacaccgtgatcaacaaaaagagcggcgagatcgtgcccatggaggtgaacttcaacttcgacgaccccaacctgatcatcctgcctctggcctttggcaagagacagggcagagaattcatctggaacgacctgctgtccctggaaaccggcagcctgaagctggccaacggaagagtgatcgagaagacactgtacaacagaagaacccggcaggatgagcctgccctgttcgtggccctgaccttcgagcggcgggaggtcctggactcctccaatatcaaaccaatgaacctgatcggcgtggcaagaggcgaaaacatccccgccgtgatcgccctgaccgaccccgagggctgcccactgagccggtttaaggatagcctgggaaacccaacccacatcctgagaatcggcgagagctataaggagaagcagcggaccatccaggccaagaaggaggtggagcagcggagagccggcggctacagccggaagtacgccagcaaagccaagaatctggcagacgatatggtgagaaacaccgctagagatctgctgtactacgccgtgacccaggatgccatgctgatcttcgccaacctgagccggggcttcggccggcagggcaagcggaccttcatggccgagagacagtacacacggatggaggactggctgaccgccaagctggcctacgagggcctgagcaagacctacctgtccaagacactggcccagtacacctccaagacatgcagcaactgtgggtttaccatcaccagcgccgactacgacagggtgctggagaagctgaagaagacagcaacaggctggatgaccacaattaacggcaaggagctgaaggtggagggccagattacctactacaacagatacaagagacagaacgtagtcaaggacctgtccgtcgagctggatagactgagcgaagaatctgtgaacaacgacatctcctcctggacaaagggcagaagcggagaagctctgagcctcctgaagaaaagattctcccatagacccgtgcaggagaagttcgtgtgcctgaactgcggcttcgagacacacgcagccgagcaagccgccctgaacatcgccagatcctggctgttcctgcggagccaggagtacaagaaataccagacaaacaagacaaccggcaacaccgataagagagccttcgtcgagacctggcagtccttttaccggaagaagcttaaggaggtgtggaaacctgccgtgcggtctggcggatctggcggaggctccaccagccccaagaaaaagagaaaagtctaagctgccttctgcggggcttgccttctggccatgcccttcttctctcccttgcacctgtacctcttggtctttgaataaagcctgagtaggaaggctagcaaaaaaaaaaaaaaaaaaaaaaaaaaaaaaaaaaaaaaaaaaaaaaaaaaaaaaaaaaaaaaaaaaaaaaaaaaaaaaaa

SEQ ID NO: 12511 - RNA, 5785 nt, synthetic construct
  source 1..5785: mol_type = other RNA
aggaaataagagagaaaagaagagtaagaagaaatataagagccaccatggcccctaagaagaagcgtaaagtgagccggatggaacgcctcgtctacgaggtgcggcagaagtgcagaaacatcgaggacatctgcatctcctgcggatctctgaacgtgaccctggagcacccactgttcatcggcggcatgtgccagaactgtaaaaactgttttctggagtgtgcctatcaatacgacgatgacggctaccagagctactgcaccatctgttgcggcggaagagaggtgctgatgtgtggaaataacaactgctgccggtgcttctgcgtggaatgcgtggacctgctggtgggccccggcgccgcccaggccgctattaaggaagatccttggaactgctacatgtgcggccacaagggcacatacggcctgctgagacggagagaggactggcctagcagactgcagatgttcttcgccaataaccacgaccaggagttcgacccccctaaggtgtaccctcccgtccccgccgagaagagaaagcccatccgggtcctgagcctgttcgatggcatcgccaccggtctgctggtgctgaaggacctgggcatccaggtggataggtacattgcctccgaggtgtgcgaggactccatcaccgtgggaatggtgcgtcatcagggcaagatcatgtacgtgggcgacgtgcggagcgtgacacagaagcatatccaggagtggggccctttcgacctggtgatcggcggcagcccttgcaatgacctgagcatcgtgaacccagcccggaagggcctgtacgagggaaccggcagactgttcttcgagttttacagactgctgcacgacgcccggcctaaggaaggcgacgaccggcccttcttttggctgttcgagaatgtggtggccatgggagtcagcgacaagcgggatattagccggttcctggagagcaaccccgtgatgatcgatgccaaggaagtgagcgccgcccaccgggccagatacttctggggcaatctgcctggcatgaacagacccctggccagcaccgtgaacgacaagctggagctgcaggagtgcctggagcacggccggatcgccaagttcagcaaggtgagaaccatcaccacccgaagcaacagcatcaaacaaggcaaggaccagcactttcctgtgttcatgaacgagaaggaggacatcctgtggtgtaccgagatggagagagtgttcgggttcccagtccactacacagatgtcagcaacatgtctagactggccagacagagactgctgggaagaagctggtccgtccctgtgatcagacacctgttcgcccctctgaaggagtacttcgcctgcgtgagcagcggcaacagcaacgccaacagccggggccccagcttctctagcggcctggtgccactgtccctgagagggagccacatgggccccatggagatctacaaaaccgtgagcgcctggaagcggcagcctgtgcgcgtgctgagcctgtttcggaatatcgataaagtcctgaaaagcctgggattcctggagagcggctctggctccggcggtggcaccctgaagtacgtggaggatgtgacaaacgtggtcagacgggatgtggagaagtggggccccttcgatctggtgtacggcagcacccaacccctgggcagctcttgtgaccggtgccctggctggtacatgtttcagttccaccggatcctgcagtacgccctgccgagacaggagtcccagcggccattcttttggattttcatggacaacttgctgctgaccgaggatgaccaggaaactaccactcggttcctgcagaccgaagccgtgaccctgcaggacgtgagaggccgggactaccagaacgccatgcgggtgtggtccaacatccctggactgaaaagcaagcacgcacctctgacccctaaagaagaggagtacctgcaggcccaggtgcggagcagaagcaagctggacgcccctaaggtggatctgctggtgaagaattgcctcctgcccctgagagagtacttcaagtatttcagccagaatagtctgcccctgggaggcagcggcggcggcatggacgccgtgacctacgaggacgtgcacgtgaacttcagccaggaggagtgggccctgctggaccccagccagaagagcctgtacaaggacgtgatgctggagacctactggaacctgacctgcatcggctacaagtgggaggaccacaacatcgaggaccagcaccagagcagcggcaggcacggcaggtgcatcaactgccccagcgcctacggcaagaagcagtgcaccaacctgttcggcggcccaagcagcggcgcccctcctcccagcggcggcagcccagccggctccccaacctctaccgaggagggcacctctgagtccgccacccccgagagcggccctggcacctccaccgagcccagcgagggcagcgcacccggcagccctgccggcagccccacctccacagaggagggaaccagcaccgagcccagcgaaggcagcgccccaggcaccagcaccgagcctagtgagcaggagattaaacggatcaacaagatcagaagaagacttgtgaaagacagcaacaccaagaaggccggcaagacaggccccatgaaaaccctgctggttagagtgatgacacccgatctgagagagcggctggaaaacctgagaaagaagcctgaaaatatcccccagcccatcagcaatacatctagagccaacctgaataagctgctgaccgattacaccgaaatgaagaaggcgatcctgcatgtgtactgggaagagttccagaaggaccctgtgggcctgatgagccgggtggcccagcctgccagcaagaagatcgatcagaacaagctgaaacctgagatggacgagaagggcaacctgaccaccgccggctttgcctgctctcagtgtggccagcccctgttcgtgtacaagctggagcaggtgtctgagaagggcaaggcttacaccaactacttcggacggtgcaatgtggccgagcacgaaaagctgatcctgctggcccagctgaagcccgagaaggatagcgacgaagccgtgacatatagcctgggaaagtttgggcagagggccctggatttctacagcattcatgtgaccaaggagtccacccaccccgtgaagcccctggcccagatcgccggaaacagatacgcctccggacctgtgggaaaggccctgagcgacgcatgtatgggcacaatcgcctccttcctgtctaagtaccaggacatcatcatcgaacaccagaaggtggtgaagggcaaccagaagagactggagagcctgcgggagctggccggcaaggaaaacctggaataccctagcgtgaccctgccacctcagcctcacaccaaggagggcgttgatgcctacaacgaagtgatcgcccgggtgcgaatgtgggtgaacctgaacctgtggcagaagctgaagctaagcagagatgatgccaagcctctgctgagactgaagggattcccttcctttcctctggtcgagagacaggccaacgaagtggactggtgggacatggtgtgtaacgtgaagaagctgatcaacgagaaaaaggaggatggcaaggtgttttggcagaatctggctggctacaagagacaggaagccctgagaccatacctgagcagcgaggaagatcggaagaagggaaagaaattcgctcggtaccagctgggcgacctgctgctgcacctggaaaagaagcacggcgaggactggggaaaggtgtacgacgaggcctgggagcggattgacaagaaagtggaaggcctgagcaagcacatcaagctggaagaggaacggagaagcgaggacgcccagagcaaggccgccctgaccgactggctgcgggctaaggccagcttcgtgatcgagggcctgaaggaggccgacaaggacgagttctgcagatgcgagctgaagctgcagaagtggtacggggacctgcggggaaagcccttcgccatcgaagccgagaacagcatcctggacatcagcggcttcagcaagcagtacaactgtgccttcatctggcagaaggacggcgtgaagaagctgaacctgtacctgatcatcaactacttcaagggcggcaagctgcggttcaagaagatcaaacctgaagccttcgaagccaacagattctacaccgtgatcaacaaaaagagcggcgagatcgtgcccatggaggtgaacttcaacttcgacgaccccaacctgatcatcctgcctctggcctttggcaagagacagggcagagaattcatctggaacgacctgctgtccctggaaaccggcagcctgaagctggccaacggaagagtgatcgagaagacactgtacaacagaagaacccggcaggatgagcctgccctgttcgtggccctgaccttcgagcggcgggaggtcctggactcctccaatatcaaaccaatgaacctgatcggcgtggcaagaggcgaaaacatccccgccgtgatcgccctgaccgaccccgagggctgcccactgagccggtttaaggatagcctgggaaacccaacccacatcctgagaatcggcgagagctataaggagaagcagcggaccatccaggccaagaaggaggtggagcagcggagagccggcggctacagccggaagtacgccagcaaagccaagaatctggcagacgatatggtgagaaacaccgctagagatctgctgtactacgccgtgacccaggatgccatgctgatcttcgccaacctgagccggggcttcggccggcagggcaagcggaccttcatggccgagagacagtacacacggatggaggactggctgaccgccaagctggcctacgagggcctgagcaagacctacctgtccaagacactggcccagtacacctccaagacatgcagcaactgtgggtttaccatcaccagcgccgactacgacagggtgctggagaagctgaagaagacagcaacaggctggatgaccacaattaacggcaaggagctgaaggtggagggccagattacctactacaacagatacaagagacagaacgtagtcaaggacctgtccgtcgagctggatagactgagcgaagaatctgtgaacaacgacatctcctcctggacaaagggcagaagcggagaagctctgagcctcctgaagaaaagattctcccatagacccgtgcaggagaagttcgtgtgcctgaactgcggcttcgagacacacgcagccgagcaagccgccctgaacatcgccagatcctggctgttcctgcggagccaggagtacaagaaataccagacaaacaagacaaccggcaacaccgataagagagccttcgtcgagacctggcagtccttttaccggaagaagcttaaggaggtgtggaaacctgccgtgcggtctggcggatctggcggaggctccaccagccccaagaaaaagagaaaagtctaagctgccttctgcggggcttgccttctggccatgcccttcttctctcccttgcacctgtacctcttggtctttgaataaagcctgagtaggaaggctagcaaaaaaaaaaaaaaaaaaaaaaaaaaaaaaaaaaaaaaaaaaaaaaaaaaaaaaaaaaaaaaaaaaaaaaaaaaaaaaaa

SEQ ID NO: 12512 - RNA, 5785 nt, synthetic construct
  source 1..5785: mol_type = other RNA
aggaaataagagagaaaagaagagtaagaagaaatataagagccaccatggcccctaagaagaagcgtaaagtgagccggatggaacgcctcgtctacgaggtgcggcagaagtgcagaaacatcgaggacatctgcatctcctgcggatctctgaacgtgaccctggagcacccactgttcatcggcggcatgtgccagaactgtaaaaactgttttctggagtgtgcctatcaatacgacgatgacggctaccagagctactgcaccatctgttgcggcggaagagaggtgctgatgtgtggaaataacaactgctgccggtgcttctgcgtggaatgcgtggacctgctggtgggccccggcgccgcccaggccgctattaaggaagatccttggaactgctacatgtgcggccacaagggcacatacggcctgctgagacggagagaggactggcctagcagactgcagatgttcttcgccaataaccacgaccaggagttcgacccccctaaggtgtaccctcccgtccccgccgagaagagaaagcccatccgggtcctgagcctgttcgatggcatcgccaccggtctgctggtgctgaaggacctgggcatccaggtggataggtacattgcctccgaggtgtgcgaggactccatcaccgtgggaatggtgcgtcatcagggcaagatcatgtacgtgggcgacgtgcggagcgtgacacagaagcatatccaggagtggggccctttcgacctggtgatcggcggcagcccttgcaatgacctgagcatcgtgaacccagcccggaagggcctgtacgagggaaccggcagactgttcttcgagttttacagactgctgcacgacgcccggcctaaggaaggcgacgaccggcccttcttttggctgttcgagaatgtggtggccatgggagtcagcgacaagcgggatattagccggttcctggagagcaaccccgtgatgatcgatgccaaggaagtgagcgccgcccaccgggccagatacttctggggcaatctgcctggcatgaacagacccctggccagcaccgtgaacgacaagctggagctgcaggagtgcctggagcacggccggatcgccaagttcagcaaggtgagaaccatcaccacccgaagcaacagcatcaaacaaggcaaggaccagcactttcctgtgttcatgaacgagaaggaggacatcctgtggtgtaccgagatggagagagtgttcgggttcccagtccactacacagatgtcagcaacatgtctagactggccagacagagactgctgggaagaagctggtccgtccctgtgatcagacacctgttcgcccctctgaaggagtacttcgcctgcgtgagcagcggcaacagcaacgccaacagccggggccccagcttctctagcggcctggtgccactgtccctgagagggagccacatgggccccatggagatctacaaaaccgtgagcgcctggaagcggcagcctgtgcgcgtgctgagcctgtttcggaatatcgataaagtcctgaaaagcctgggattcctggagagcggctctggctccggcggtggcaccctgaagtacgtggaggatgtgacaaacgtggtcagacgggatgtggagaagtggggccccttcgatctggtgtacggcagcacccaacccctgggcagctcttgtgaccggtgccctggctggtacatgtttcagttccaccggatcctgcagtacgccctgccgagacaggagtcccagcggccattcttttggattttcatggacaacttgctgctgaccgaggatgaccaggaaactaccactcggttcctgcagaccgaagccgtgaccctgcaggacgtgagaggccgggactaccagaacgccatgcgggtgtggtccaacatccctggactgaaaagcaagcacgcacctctgacccctaaagaagaggagtacctgcaggcccaggtgcggagcagaagcaagctggacgcccctaaggtggatctgctggtgaagaattgcctcctgcccctgagagagtacttcaagtatttcagccagaatagtctgcccctgggaggcagcggcggcggcaacgagatggtgaccttcaaggacgtggccgtggtgttcagcggcgaggagctggagctgctggacagcgcccagtggaagctgtaccaggacgtgatgctggagaacttcaggaacctgctgagcgtgggcggcaggatccagaccgagctggagaccttccccgaggccggcccccacgaggagctgagctggcagcagatctgggagcagatcgccagcgacagcaccttcagccaggacggcggcccaagcagcggcgcccctcctcccagcggcggcagcccagccggctccccaacctctaccgaggagggcacctctgagtccgccacccccgagagcggccctggcacctccaccgagcccagcgagggcagcgcacccggcagccctgccggcagccccacctccacagaggagggaaccagcaccgagcccagcgaaggcagcgccccaggcaccagcaccgagcctagtgagcaggagattaaacggatcaacaagatcagaagaagacttgtgaaagacagcaacaccaagaaggccggcaagacaggccccatgaaaaccctgctggttagagtgatgacacccgatctgagagagcggctggaaaacctgagaaagaagcctgaaaatatcccccagcccatcagcaatacatctagagccaacctgaataagctgctgaccgattacaccgaaatgaagaaggcgatcctgcatgtgtactgggaagagttccagaaggaccctgtgggcctgatgagccgggtggcccagcctgccagcaagaagatcgatcagaacaagctgaaacctgagatggacgagaagggcaacctgaccaccgccggctttgcctgctctcagtgtggccagcccctgttcgtgtacaagctggagcaggtgtctgagaagggcaaggcttacaccaactacttcggacggtgcaatgtggccgagcacgaaaagctgatcctgctggcccagctgaagcccgagaaggatagcgacgaagccgtgacatatagcctgggaaagtttgggcagagggccctggatttctacagcattcatgtgaccaaggagtccacccaccccgtgaagcccctggcccagatcgccggaaacagatacgcctccggacctgtgggaaaggccctgagcgacgcatgtatgggcacaatcgcctccttcctgtctaagtaccaggacatcatcatcgaacaccagaaggtggtgaagggcaaccagaagagactggagagcctgcgggagctggccggcaaggaaaacctggaataccctagcgtgaccctgccacctcagcctcacaccaaggagggcgttgatgcctacaacgaagtgatcgcccgggtgcgaatgtgggtgaacctgaacctgtggcagaagctgaagctaagcagagatgatgccaagcctctgctgagactgaagggattcccttcctttcctctggtcgagagacaggccaacgaagtggactggtgggacatggtgtgtaacgtgaagaagctgatcaacgagaaaaaggaggatggcaaggtgttttggcagaatctggctggctacaagagacaggaagccctgagaccatacctgagcagcgaggaagatcggaagaagggaaagaaattcgctcggtaccagctgggcgacctgctgctgcacctggaaaagaagcacggcgaggactggggaaaggtgtacgacgaggcctgggagcggattgacaagaaagtggaaggcctgagcaagcacatcaagctggaagaggaacggagaagcgaggacgcccagagcaaggccgccctgaccgactggctgcgggctaaggccagcttcgtgatcgagggcctgaaggaggccgacaaggacgagttctgcagatgcgagctgaagctgcagaagtggtacggggacctgcggggaaagcccttcgccatcgaagccgagaacagcatcctggacatcagcggcttcagcaagcagtacaactgtgccttcatctggcagaaggacggcgtgaagaagctgaacctgtacctgatcatcaactacttcaagggcggcaagctgcggttcaagaagatcaaacctgaagccttcgaagccaacagattctacaccgtgatcaacaaaaagagcggcgagatcgtgcccatggaggtgaacttcaacttcgacgaccccaacctgatcatcctgcctctggcctttggcaagagacagggcagagaattcatctggaacgacctgctgtccctggaaaccggcagcctgaagctggccaacggaagagtgatcgagaagacactgtacaacagaagaacccggcaggatgagcctgccctgttcgtggccctgaccttcgagcggcgggaggtcctggactcctccaatatcaaaccaatgaacctgatcggcgtggcaagaggcgaaaacatccccgccgtgatcgccctgaccgaccccgagggctgcccactgagccggtttaaggatagcctgggaaacccaacccacatcctgagaatcggcgagagctataaggagaagcagcggaccatccaggccaagaaggaggtggagcagcggagagccggcggctacagccggaagtacgccagcaaagccaagaatctggcagacgatatggtgagaaacaccgctagagatctgctgtactacgccgtgacccaggatgccatgctgatcttcgccaacctgagccggggcttcggccggcagggcaagcggaccttcatggccgagagacagtacacacggatggaggactggctgaccgccaagctggcctacgagggcctgagcaagacctacctgtccaagacactggcccagtacacctccaagacatgcagcaactgtgggtttaccatcaccagcgccgactacgacagggtgctggagaagctgaagaagacagcaacaggctggatgaccacaattaacggcaaggagctgaaggtggagggccagattacctactacaacagatacaagagacagaacgtagtcaaggacctgtccgtcgagctggatagactgagcgaagaatctgtgaacaacgacatctcctcctggacaaagggcagaagcggagaagctctgagcctcctgaagaaaagattctcccatagacccgtgcaggagaagttcgtgtgcctgaactgcggcttcgagacacacgcagccgagcaagccgccctgaacatcgccagatcctggctgttcctgcggagccaggagtacaagaaataccagacaaacaagacaaccggcaacaccgataagagagccttcgtcgagacctggcagtccttttaccggaagaagcttaaggaggtgtggaaacctgccgtgcggtctggcggatctggcggaggctccaccagccccaagaaaaagagaaaagtctaagctgccttctgcggggcttgccttctggccatgcccttcttctctcccttgcacctgtacctcttggtctttgaataaagcctgagtaggaaggctagcaaaaaaaaaaaaaaaaaaaaaaaaaaaaaaaaaaaaaaaaaaaaaaaaaaaaaaaaaaaaaaaaaaaaaaaaaaaaaaaa

SEQ ID NO: 12513 - RNA, 5785 nt, synthetic construct
  source 1..5785: mol_type = other RNA
aggaaataagagagaaaagaagagtaagaagaaatataagagccaccatggcccctaagaagaagcgtaaagtgagccggatggaacgcctcgtctacgaggtgcggcagaagtgcagaaacatcgaggacatctgcatctcctgcggatctctgaacgtgaccctggagcacccactgttcatcggcggcatgtgccagaactgtaaaaactgttttctggagtgtgcctatcaatacgacgatgacggctaccagagctactgcaccatctgttgcggcggaagagaggtgctgatgtgtggaaataacaactgctgccggtgcttctgcgtggaatgcgtggacctgctggtgggccccggcgccgcccaggccgctattaaggaagatccttggaactgctacatgtgcggccacaagggcacatacggcctgctgagacggagagaggactggcctagcagactgcagatgttcttcgccaataaccacgaccaggagttcgacccccctaaggtgtaccctcccgtccccgccgagaagagaaagcccatccgggtcctgagcctgttcgatggcatcgccaccggtctgctggtgctgaaggacctgggcatccaggtggataggtacattgcctccgaggtgtgcgaggactccatcaccgtgggaatggtgcgtcatcagggcaagatcatgtacgtgggcgacgtgcggagcgtgacacagaagcatatccaggagtggggccctttcgacctggtgatcggcggcagcccttgcaatgacctgagcatcgtgaacccagcccggaagggcctgtacgagggaaccggcagactgttcttcgagttttacagactgctgcacgacgcccggcctaaggaaggcgacgaccggcccttcttttggctgttcgagaatgtggtggccatgggagtcagcgacaagcgggatattagccggttcctggagagcaaccccgtgatgatcgatgccaaggaagtgagcgccgcccaccgggccagatacttctggggcaatctgcctggcatgaacagacccctggccagcaccgtgaacgacaagctggagctgcaggagtgcctggagcacggccggatcgccaagttcagcaaggtgagaaccatcaccacccgaagcaacagcatcaaacaaggcaaggaccagcactttcctgtgttcatgaacgagaaggaggacatcctgtggtgtaccgagatggagagagtgttcgggttcccagtccactacacagatgtcagcaacatgtctagactggccagacagagactgctgggaagaagctggtccgtccctgtgatcagacacctgttcgcccctctgaaggagtacttcgcctgcgtgagcagcggcaacagcaacgccaacagccggggccccagcttctctagcggcctggtgccactgtccctgagagggagccacatgggccccatggagatctacaaaaccgtgagcgcctggaagcggcagcctgtgcgcgtgctgagcctgtttcggaatatcgataaagtcctgaaaagcctgggattcctggagagcggctctggctccggcggtggcaccctgaagtacgtggaggatgtgacaaacgtggtcagacgggatgtggagaagtggggccccttcgatctggtgtacggcagcacccaacccctgggcagctcttgtgaccggtgccctggctggtacatgtttcagttccaccggatcctgcagtacgccctgccgagacaggagtcccagcggccattcttttggattttcatggacaacttgctgctgaccgaggatgaccaggaaactaccactcggttcctgcagaccgaagccgtgaccctgcaggacgtgagaggccgggactaccagaacgccatgcgggtgtggtccaacatccctggactgaaaagcaagcacgcacctctgacccctaaagaagaggagtacctgcaggcccaggtgcggagcagaagcaagctggacgcccctaaggtggatctgctggtgaagaattgcctcctgcccctgagagagtacttcaagtatttcagccagaatagtctgcccctgggaggcagcggcggcggcccccaggccgccatgaccttccaggacgtggccgtggacttcaccagggaggagtggaggctgctggagcccccccagaaggagctgtactgggaggtgatgctggagaactacaggaacctggtgtgcctgggcctgaccgtgagcaagcccgacgtgatcagccagctggagcagggcgaggccccctggaggctggagggcggcagcgccaggggcaggtgcctggactggggcatgaggggcggcccaagcagcggcgcccctcctcccagcggcggcagcccagccggctccccaacctctaccgaggagggcacctctgagtccgccacccccgagagcggccctggcacctccaccgagcccagcgagggcagcgcacccggcagccctgccggcagccccacctccacagaggagggaaccagcaccgagcccagcgaaggcagcgccccaggcaccagcaccgagcctagtgagcaggagattaaacggatcaacaagatcagaagaagacttgtgaaagacagcaacaccaagaaggccggcaagacaggccccatgaaaaccctgctggttagagtgatgacacccgatctgagagagcggctggaaaacctgagaaagaagcctgaaaatatcccccagcccatcagcaatacatctagagccaacctgaataagctgctgaccgattacaccgaaatgaagaaggcgatcctgcatgtgtactgggaagagttccagaaggaccctgtgggcctgatgagccgggtggcccagcctgccagcaagaagatcgatcagaacaagctgaaacctgagatggacgagaagggcaacctgaccaccgccggctttgcctgctctcagtgtggccagcccctgttcgtgtacaagctggagcaggtgtctgagaagggcaaggcttacaccaactacttcggacggtgcaatgtggccgagcacgaaaagctgatcctgctggcccagctgaagcccgagaaggatagcgacgaagccgtgacatatagcctgggaaagtttgggcagagggccctggatttctacagcattcatgtgaccaaggagtccacccaccccgtgaagcccctggcccagatcgccggaaacagatacgcctccggacctgtgggaaaggccctgagcgacgcatgtatgggcacaatcgcctccttcctgtctaagtaccaggacatcatcatcgaacaccagaaggtggtgaagggcaaccagaagagactggagagcctgcgggagctggccggcaaggaaaacctggaataccctagcgtgaccctgccacctcagcctcacaccaaggagggcgttgatgcctacaacgaagtgatcgcccgggtgcgaatgtgggtgaacctgaacctgtggcagaagctgaagctaagcagagatgatgccaagcctctgctgagactgaagggattcccttcctttcctctggtcgagagacaggccaacgaagtggactggtgggacatggtgtgtaacgtgaagaagctgatcaacgagaaaaaggaggatggcaaggtgttttggcagaatctggctggctacaagagacaggaagccctgagaccatacctgagcagcgaggaagatcggaagaagggaaagaaattcgctcggtaccagctgggcgacctgctgctgcacctggaaaagaagcacggcgaggactggggaaaggtgtacgacgaggcctgggagcggattgacaagaaagtggaaggcctgagcaagcacatcaagctggaagaggaacggagaagcgaggacgcccagagcaaggccgccctgaccgactggctgcgggctaaggccagcttcgtgatcgagggcctgaaggaggccgacaaggacgagttctgcagatgcgagctgaagctgcagaagtggtacggggacctgcggggaaagcccttcgccatcgaagccgagaacagcatcctggacatcagcggcttcagcaagcagtacaactgtgccttcatctggcagaaggacggcgtgaagaagctgaacctgtacctgatcatcaactacttcaagggcggcaagctgcggttcaagaagatcaaacctgaagccttcgaagccaacagattctacaccgtgatcaacaaaaagagcggcgagatcgtgcccatggaggtgaacttcaacttcgacgaccccaacctgatcatcctgcctctggcctttggcaagagacagggcagagaattcatctggaacgacctgctgtccctggaaaccggcagcctgaagctggccaacggaagagtgatcgagaagacactgtacaacagaagaacccggcaggatgagcctgccctgttcgtggccctgaccttcgagcggcgggaggtcctggactcctccaatatcaaaccaatgaacctgatcggcgtggcaagaggcgaaaacatccccgccgtgatcgccctgaccgaccccgagggctgcccactgagccggtttaaggatagcctgggaaacccaacccacatcctgagaatcggcgagagctataaggagaagcagcggaccatccaggccaagaaggaggtggagcagcggagagccggcggctacagccggaagtacgccagcaaagccaagaatctggcagacgatatggtgagaaacaccgctagagatctgctgtactacgccgtgacccaggatgccatgctgatcttcgccaacctgagccggggcttcggccggcagggcaagcggaccttcatggccgagagacagtacacacggatggaggactggctgaccgccaagctggcctacgagggcctgagcaagacctacctgtccaagacactggcccagtacacctccaagacatgcagcaactgtgggtttaccatcaccagcgccgactacgacagggtgctggagaagctgaagaagacagcaacaggctggatgaccacaattaacggcaaggagctgaaggtggagggccagattacctactacaacagatacaagagacagaacgtagtcaaggacctgtccgtcgagctggatagactgagcgaagaatctgtgaacaacgacatctcctcctggacaaagggcagaagcggagaagctctgagcctcctgaagaaaagattctcccatagacccgtgcaggagaagttcgtgtgcctgaactgcggcttcgagacacacgcagccgagcaagccgccctgaacatcgccagatcctggctgttcctgcggagccaggagtacaagaaataccagacaaacaagacaaccggcaacaccgataagagagccttcgtcgagacctggcagtccttttaccggaagaagcttaaggaggtgtggaaacctgccgtgcggtctggcggatctggcggaggctccaccagccccaagaaaaagagaaaagtctaagctgccttctgcggggcttgccttctggccatgcccttcttctctcccttgcacctgtacctcttggtctttgaataaagcctgagtaggaaggctagcaaaaaaaaaaaaaaaaaaaaaaaaaaaaaaaaaaaaaaaaaaaaaaaaaaaaaaaaaaaaaaaaaaaaaaaaaaaaaaaa

SEQ ID NO: 12514 - RNA, 5785 nt, synthetic construct
  source 1..5785: mol_type = other RNA
aggaaataagagagaaaagaagagtaagaagaaatataagagccaccatggcccctaagaagaagcgtaaagtgagccggatggaacgcctcgtctacgaggtgcggcagaagtgcagaaacatcgaggacatctgcatctcctgcggatctctgaacgtgaccctggagcacccactgttcatcggcggcatgtgccagaactgtaaaaactgttttctggagtgtgcctatcaatacgacgatgacggctaccagagctactgcaccatctgttgcggcggaagagaggtgctgatgtgtggaaataacaactgctgccggtgcttctgcgtggaatgcgtggacctgctggtgggccccggcgccgcccaggccgctattaaggaagatccttggaactgctacatgtgcggccacaagggcacatacggcctgctgagacggagagaggactggcctagcagactgcagatgttcttcgccaataaccacgaccaggagttcgacccccctaaggtgtaccctcccgtccccgccgagaagagaaagcccatccgggtcctgagcctgttcgatggcatcgccaccggtctgctggtgctgaaggacctgggcatccaggtggataggtacattgcctccgaggtgtgcgaggactccatcaccgtgggaatggtgcgtcatcagggcaagatcatgtacgtgggcgacgtgcggagcgtgacacagaagcatatccaggagtggggccctttcgacctggtgatcggcggcagcccttgcaatgacctgagcatcgtgaacccagcccggaagggcctgtacgagggaaccggcagactgttcttcgagttttacagactgctgcacgacgcccggcctaaggaaggcgacgaccggcccttcttttggctgttcgagaatgtggtggccatgggagtcagcgacaagcgggatattagccggttcctggagagcaaccccgtgatgatcgatgccaaggaagtgagcgccgcccaccgggccagatacttctggggcaatctgcctggcatgaacagacccctggccagcaccgtgaacgacaagctggagctgcaggagtgcctggagcacggccggatcgccaagttcagcaaggtgagaaccatcaccacccgaagcaacagcatcaaacaaggcaaggaccagcactttcctgtgttcatgaacgagaaggaggacatcctgtggtgtaccgagatggagagagtgttcgggttcccagtccactacacagatgtcagcaacatgtctagactggccagacagagactgctgggaagaagctggtccgtccctgtgatcagacacctgttcgcccctctgaaggagtacttcgcctgcgtgagcagcggcaacagcaacgccaacagccggggccccagcttctctagcggcctggtgccactgtccctgagagggagccacatgggccccatggagatctacaaaaccgtgagcgcctggaagcggcagcctgtgcgcgtgctgagcctgtttcggaatatcgataaagtcctgaaaagcctgggattcctggagagcggctctggctccggcggtggcaccctgaagtacgtggaggatgtgacaaacgtggtcagacgggatgtggagaagtggggccccttcgatctggtgtacggcagcacccaacccctgggcagctcttgtgaccggtgccctggctggtacatgtttcagttccaccggatcctgcagtacgccctgccgagacaggagtcccagcggccattcttttggattttcatggacaacttgctgctgaccgaggatgaccaggaaactaccactcggttcctgcagaccgaagccgtgaccctgcaggacgtgagaggccgggactaccagaacgccatgcgggtgtggtccaacatccctggactgaaaagcaagcacgcacctctgacccctaaagaagaggagtacctgcaggcccaggtgcggagcagaagcaagctggacgcccctaaggtggatctgctggtgaagaattgcctcctgcccctgagagagtacttcaagtatttcagccagaatagtctgcccctgggaggcagcggcggcggcgccaagggcctgctgaccttcggcgacgtggccatcgagttcagccaggaggagtgggagtgcctgagccacacccagagggagctgtacagggacgtgatcctggagaactacggccacctgctgttcctgggcgtgatcgtgagcaagcccgacctggtgagcctgctggagcagaggaaggagccctggggcgagaagaggaacaagaccaggatccacgtgggcaagaaccccttcggcggcggcccaagcagcggcgcccctcctcccagcggcggcagcccagccggctccccaacctctaccgaggagggcacctctgagtccgccacccccgagagcggccctggcacctccaccgagcccagcgagggcagcgcacccggcagccctgccggcagccccacctccacagaggagggaaccagcaccgagcccagcgaaggcagcgccccaggcaccagcaccgagcctagtgagcaggagattaaacggatcaacaagatcagaagaagacttgtgaaagacagcaacaccaagaaggccggcaagacaggccccatgaaaaccctgctggttagagtgatgacacccgatctgagagagcggctggaaaacctgagaaagaagcctgaaaatatcccccagcccatcagcaatacatctagagccaacctgaataagctgctgaccgattacaccgaaatgaagaaggcgatcctgcatgtgtactgggaagagttccagaaggaccctgtgggcctgatgagccgggtggcccagcctgccagcaagaagatcgatcagaacaagctgaaacctgagatggacgagaagggcaacctgaccaccgccggctttgcctgctctcagtgtggccagcccctgttcgtgtacaagctggagcaggtgtctgagaagggcaaggcttacaccaactacttcggacggtgcaatgtggccgagcacgaaaagctgatcctgctggcccagctgaagcccgagaaggatagcgacgaagccgtgacatatagcctgggaaagtttgggcagagggccctggatttctacagcattcatgtgaccaaggagtccacccaccccgtgaagcccctggcccagatcgccggaaacagatacgcctccggacctgtgggaaaggccctgagcgacgcatgtatgggcacaatcgcctccttcctgtctaagtaccaggacatcatcatcgaacaccagaaggtggtgaagggcaaccagaagagactggagagcctgcgggagctggccggcaaggaaaacctggaataccctagcgtgaccctgccacctcagcctcacaccaaggagggcgttgatgcctacaacgaagtgatcgcccgggtgcgaatgtgggtgaacctgaacctgtggcagaagctgaagctaagcagagatgatgccaagcctctgctgagactgaagggattcccttcctttcctctggtcgagagacaggccaacgaagtggactggtgggacatggtgtgtaacgtgaagaagctgatcaacgagaaaaaggaggatggcaaggtgttttggcagaatctggctggctacaagagacaggaagccctgagaccatacctgagcagcgaggaagatcggaagaagggaaagaaattcgctcggtaccagctgggcgacctgctgctgcacctggaaaagaagcacggcgaggactggggaaaggtgtacgacgaggcctgggagcggattgacaagaaagtggaaggcctgagcaagcacatcaagctggaagaggaacggagaagcgaggacgcccagagcaaggccgccctgaccgactggctgcgggctaaggccagcttcgtgatcgagggcctgaaggaggccgacaaggacgagttctgcagatgcgagctgaagctgcagaagtggtacggggacctgcggggaaagcccttcgccatcgaagccgagaacagcatcctggacatcagcggcttcagcaagcagtacaactgtgccttcatctggcagaaggacggcgtgaagaagctgaacctgtacctgatcatcaactacttcaagggcggcaagctgcggttcaagaagatcaaacctgaagccttcgaagccaacagattctacaccgtgatcaacaaaaagagcggcgagatcgtgcccatggaggtgaacttcaacttcgacgaccccaacctgatcatcctgcctctggcctttggcaagagacagggcagagaattcatctggaacgacctgctgtccctggaaaccggcagcctgaagctggccaacggaagagtgatcgagaagacactgtacaacagaagaacccggcaggatgagcctgccctgttcgtggccctgaccttcgagcggcgggaggtcctggactcctccaatatcaaaccaatgaacctgatcggcgtggcaagaggcgaaaacatccccgccgtgatcgccctgaccgaccccgagggctgcccactgagccggtttaaggatagcctgggaaacccaacccacatcctgagaatcggcgagagctataaggagaagcagcggaccatccaggccaagaaggaggtggagcagcggagagccggcggctacagccggaagtacgccagcaaagccaagaatctggcagacgatatggtgagaaacaccgctagagatctgctgtactacgccgtgacccaggatgccatgctgatcttcgccaacctgagccggggcttcggccggcagggcaagcggaccttcatggccgagagacagtacacacggatggaggactggctgaccgccaagctggcctacgagggcctgagcaagacctacctgtccaagacactggcccagtacacctccaagacatgcagcaactgtgggtttaccatcaccagcgccgactacgacagggtgctggagaagctgaagaagacagcaacaggctggatgaccacaattaacggcaaggagctgaaggtggagggccagattacctactacaacagatacaagagacagaacgtagtcaaggacctgtccgtcgagctggatagactgagcgaagaatctgtgaacaacgacatctcctcctggacaaagggcagaagcggagaagctctgagcctcctgaagaaaagattctcccatagacccgtgcaggagaagttcgtgtgcctgaactgcggcttcgagacacacgcagccgagcaagccgccctgaacatcgccagatcctggctgttcctgcggagccaggagtacaagaaataccagacaaacaagacaaccggcaacaccgataagagagccttcgtcgagacctggcagtccttttaccggaagaagcttaaggaggtgtggaaacctgccgtgcggtctggcggatctggcggaggctccaccagccccaagaaaaagagaaaagtctaagctgccttctgcggggcttgccttctggccatgcccttcttctctcccttgcacctgtacctcttggtctttgaataaagcctgagtaggaaggctagcaaaaaaaaaaaaaaaaaaaaaaaaaaaaaaaaaaaaaaaaaaaaaaaaaaaaaaaaaaaaaaaaaaaaaaaaaaaaaaaa

SEQ ID NO: 12515 - RNA, 5785 nt, synthetic construct
  source 1..5785: mol_type = other RNA
aggaaataagagagaaaagaagagtaagaagaaatataagagccaccatggcccctaagaagaagcgtaaagtgagccggatggaacgcctcgtctacgaggtgcggcagaagtgcagaaacatcgaggacatctgcatctcctgcggatctctgaacgtgaccctggagcacccactgttcatcggcggcatgtgccagaactgtaaaaactgttttctggagtgtgcctatcaatacgacgatgacggctaccagagctactgcaccatctgttgcggcggaagagaggtgctgatgtgtggaaataacaactgctgccggtgcttctgcgtggaatgcgtggacctgctggtgggccccggcgccgcccaggccgctattaaggaagatccttggaactgctacatgtgcggccacaagggcacatacggcctgctgagacggagagaggactggcctagcagactgcagatgttcttcgccaataaccacgaccaggagttcgacccccctaaggtgtaccctcccgtccccgccgagaagagaaagcccatccgggtcctgagcctgttcgatggcatcgccaccggtctgctggtgctgaaggacctgggcatccaggtggataggtacattgcctccgaggtgtgcgaggactccatcaccgtgggaatggtgcgtcatcagggcaagatcatgtacgtgggcgacgtgcggagcgtgacacagaagcatatccaggagtggggccctttcgacctggtgatcggcggcagcccttgcaatgacctgagcatcgtgaacccagcccggaagggcctgtacgagggaaccggcagactgttcttcgagttttacagactgctgcacgacgcccggcctaaggaaggcgacgaccggcccttcttttggctgttcgagaatgtggtggccatgggagtcagcgacaagcgggatattagccggttcctggagagcaaccccgtgatgatcgatgccaaggaagtgagcgccgcccaccgggccagatacttctggggcaatctgcctggcatgaacagacccctggccagcaccgtgaacgacaagctggagctgcaggagtgcctggagcacggccggatcgccaagttcagcaaggtgagaaccatcaccacccgaagcaacagcatcaaacaaggcaaggaccagcactttcctgtgttcatgaacgagaaggaggacatcctgtggtgtaccgagatggagagagtgttcgggttcccagtccactacacagatgtcagcaacatgtctagactggccagacagagactgctgggaagaagctggtccgtccctgtgatcagacacctgttcgcccctctgaaggagtacttcgcctgcgtgagcagcggcaacagcaacgccaacagccggggccccagcttctctagcggcctggtgccactgtccctgagagggagccacatgggccccatggagatctacaaaaccgtgagcgcctggaagcggcagcctgtgcgcgtgctgagcctgtttcggaatatcgataaagtcctgaaaagcctgggattcctggagagcggctctggctccggcggtggcaccctgaagtacgtggaggatgtgacaaacgtggtcagacgggatgtggagaagtggggccccttcgatctggtgtacggcagcacccaacccctgggcagctcttgtgaccggtgccctggctggtacatgtttcagttccaccggatcctgcagtacgccctgccgagacaggagtcccagcggccattcttttggattttcatggacaacttgctgctgaccgaggatgaccaggaaactaccactcggttcctgcagaccgaagccgtgaccctgcaggacgtgagaggccgggactaccagaacgccatgcgggtgtggtccaacatccctggactgaaaagcaagcacgcacctctgacccctaaagaagaggagtacctgcaggcccaggtgcggagcagaagcaagctggacgcccctaaggtggatctgctggtgaagaattgcctcctgcccctgagagagtacttcaagtatttcagccagaatagtctgcccctgggaggcagcggcggcggcgaggaggtgcccgtggtgttcgaggacgtggccgtgtacttcaccagggaggagtggggcaccctggacaagaggcagaaggagctgtacagggacgtgatgaggatgaactacgagctgctggccagcctgggccccgccgccgccaagcccgacctgatcagcaagctggagaggagggccgccccctggatcaaggaccccaacggccccaagtggggcaagggcaggccccccggcaagggcggcccaagcagcggcgcccctcctcccagcggcggcagcccagccggctccccaacctctaccgaggagggcacctctgagtccgccacccccgagagcggccctggcacctccaccgagcccagcgagggcagcgcacccggcagccctgccggcagccccacctccacagaggagggaaccagcaccgagcccagcgaaggcagcgccccaggcaccagcaccgagcctagtgagcaggagattaaacggatcaacaagatcagaagaagacttgtgaaagacagcaacaccaagaaggccggcaagacaggccccatgaaaaccctgctggttagagtgatgacacccgatctgagagagcggctggaaaacctgagaaagaagcctgaaaatatcccccagcccatcagcaatacatctagagccaacctgaataagctgctgaccgattacaccgaaatgaagaaggcgatcctgcatgtgtactgggaagagttccagaaggaccctgtgggcctgatgagccgggtggcccagcctgccagcaagaagatcgatcagaacaagctgaaacctgagatggacgagaagggcaacctgaccaccgccggctttgcctgctctcagtgtggccagcccctgttcgtgtacaagctggagcaggtgtctgagaagggcaaggcttacaccaactacttcggacggtgcaatgtggccgagcacgaaaagctgatcctgctggcccagctgaagcccgagaaggatagcgacgaagccgtgacatatagcctgggaaagtttgggcagagggccctggatttctacagcattcatgtgaccaaggagtccacccaccccgtgaagcccctggcccagatcgccggaaacagatacgcctccggacctgtgggaaaggccctgagcgacgcatgtatgggcacaatcgcctccttcctgtctaagtaccaggacatcatcatcgaacaccagaaggtggtgaagggcaaccagaagagactggagagcctgcgggagctggccggcaaggaaaacctggaataccctagcgtgaccctgccacctcagcctcacaccaaggagggcgttgatgcctacaacgaagtgatcgcccgggtgcgaatgtgggtgaacctgaacctgtggcagaagctgaagctaagcagagatgatgccaagcctctgctgagactgaagggattcccttcctttcctctggtcgagagacaggccaacgaagtggactggtgggacatggtgtgtaacgtgaagaagctgatcaacgagaaaaaggaggatggcaaggtgttttggcagaatctggctggctacaagagacaggaagccctgagaccatacctgagcagcgaggaagatcggaagaagggaaagaaattcgctcggtaccagctgggcgacctgctgctgcacctggaaaagaagcacggcgaggactggggaaaggtgtacgacgaggcctgggagcggattgacaagaaagtggaaggcctgagcaagcacatcaagctggaagaggaacggagaagcgaggacgcccagagcaaggccgccctgaccgactggctgcgggctaaggccagcttcgtgatcgagggcctgaaggaggccgacaaggacgagttctgcagatgcgagctgaagctgcagaagtggtacggggacctgcggggaaagcccttcgccatcgaagccgagaacagcatcctggacatcagcggcttcagcaagcagtacaactgtgccttcatctggcagaaggacggcgtgaagaagctgaacctgtacctgatcatcaactacttcaagggcggcaagctgcggttcaagaagatcaaacctgaagccttcgaagccaacagattctacaccgtgatcaacaaaaagagcggcgagatcgtgcccatggaggtgaacttcaacttcgacgaccccaacctgatcatcctgcctctggcctttggcaagagacagggcagagaattcatctggaacgacctgctgtccctggaaaccggcagcctgaagctggccaacggaagagtgatcgagaagacactgtacaacagaagaacccggcaggatgagcctgccctgttcgtggccctgaccttcgagcggcgggaggtcctggactcctccaatatcaaaccaatgaacctgatcggcgtggcaagaggcgaaaacatccccgccgtgatcgccctgaccgaccccgagggctgcccactgagccggtttaaggatagcctgggaaacccaacccacatcctgagaatcggcgagagctataaggagaagcagcggaccatccaggccaagaaggaggtggagcagcggagagccggcggctacagccggaagtacgccagcaaagccaagaatctggcagacgatatggtgagaaacaccgctagagatctgctgtactacgccgtgacccaggatgccatgctgatcttcgccaacctgagccggggcttcggccggcagggcaagcggaccttcatggccgagagacagtacacacggatggaggactggctgaccgccaagctggcctacgagggcctgagcaagacctacctgtccaagacactggcccagtacacctccaagacatgcagcaactgtgggtttaccatcaccagcgccgactacgacagggtgctggagaagctgaagaagacagcaacaggctggatgaccacaattaacggcaaggagctgaaggtggagggccagattacctactacaacagatacaagagacagaacgtagtcaaggacctgtccgtcgagctggatagactgagcgaagaatctgtgaacaacgacatctcctcctggacaaagggcagaagcggagaagctctgagcctcctgaagaaaagattctcccatagacccgtgcaggagaagttcgtgtgcctgaactgcggcttcgagacacacgcagccgagcaagccgccctgaacatcgccagatcctggctgttcctgcggagccaggagtacaagaaataccagacaaacaagacaaccggcaacaccgataagagagccttcgtcgagacctggcagtccttttaccggaagaagcttaaggaggtgtggaaacctgccgtgcggtctggcggatctggcggaggctccaccagccccaagaaaaagagaaaagtctaagctgccttctgcggggcttgccttctggccatgcccttcttctctcccttgcacctgtacctcttggtctttgaataaagcctgagtaggaaggctagcaaaaaaaaaaaaaaaaaaaaaaaaaaaaaaaaaaaaaaaaaaaaaaaaaaaaaaaaaaaaaaaaaaaaaaaaaaaaaaaa

SEQ ID NO: 12516 - RNA, 5785 nt, synthetic construct
  source 1..5785: mol_type = other RNA
aggaaataagagagaaaagaagagtaagaagaaatataagagccaccatggcccctaagaagaagcgtaaagtgagccggatggaacgcctcgtctacgaggtgcggcagaagtgcagaaacatcgaggacatctgcatctcctgcggatctctgaacgtgaccctggagcacccactgttcatcggcggcatgtgccagaactgtaaaaactgttttctggagtgtgcctatcaatacgacgatgacggctaccagagctactgcaccatctgttgcggcggaagagaggtgctgatgtgtggaaataacaactgctgccggtgcttctgcgtggaatgcgtggacctgctggtgggccccggcgccgcccaggccgctattaaggaagatccttggaactgctacatgtgcggccacaagggcacatacggcctgctgagacggagagaggactggcctagcagactgcagatgttcttcgccaataaccacgaccaggagttcgacccccctaaggtgtaccctcccgtccccgccgagaagagaaagcccatccgggtcctgagcctgttcgatggcatcgccaccggtctgctggtgctgaaggacctgggcatccaggtggataggtacattgcctccgaggtgtgcgaggactccatcaccgtgggaatggtgcgtcatcagggcaagatcatgtacgtgggcgacgtgcggagcgtgacacagaagcatatccaggagtggggccctttcgacctggtgatcggcggcagcccttgcaatgacctgagcatcgtgaacccagcccggaagggcctgtacgagggaaccggcagactgttcttcgagttttacagactgctgcacgacgcccggcctaaggaaggcgacgaccggcccttcttttggctgttcgagaatgtggtggccatgggagtcagcgacaagcgggatattagccggttcctggagagcaaccccgtgatgatcgatgccaaggaagtgagcgccgcccaccgggccagatacttctggggcaatctgcctggcatgaacagacccctggccagcaccgtgaacgacaagctggagctgcaggagtgcctggagcacggccggatcgccaagttcagcaaggtgagaaccatcaccacccgaagcaacagcatcaaacaaggcaaggaccagcactttcctgtgttcatgaacgagaaggaggacatcctgtggtgtaccgagatggagagagtgttcgggttcccagtccactacacagatgtcagcaacatgtctagactggccagacagagactgctgggaagaagctggtccgtccctgtgatcagacacctgttcgcccctctgaaggagtacttcgcctgcgtgagcagcggcaacagcaacgccaacagccggggccccagcttctctagcggcctggtgccactgtccctgagagggagccacatgggccccatggagatctacaaaaccgtgagcgcctggaagcggcagcctgtgcgcgtgctgagcctgtttcggaatatcgataaagtcctgaaaagcctgggattcctggagagcggctctggctccggcggtggcaccctgaagtacgtggaggatgtgacaaacgtggtcagacgggatgtggagaagtggggccccttcgatctggtgtacggcagcacccaacccctgggcagctcttgtgaccggtgccctggctggtacatgtttcagttccaccggatcctgcagtacgccctgccgagacaggagtcccagcggccattcttttggattttcatggacaacttgctgctgaccgaggatgaccaggaaactaccactcggttcctgcagaccgaagccgtgaccctgcaggacgtgagaggccgggactaccagaacgccatgcgggtgtggtccaacatccctggactgaaaagcaagcacgcacctctgacccctaaagaagaggagtacctgcaggcccaggtgcggagcagaagcaagctggacgcccctaaggtggatctgctggtgaagaattgcctcctgcccctgagagagtacttcaagtatttcagccagaatagtctgcccctgggaggcagcggcggcggcccccccgagagcgtgaccttcgaggacgtggccgtgtacttcacccagaaggagtgggccagcctgatgcccgcccagaaggccctgtacagggacgtgatgctggagaactacgaggccgtggccttcctggcccccgccaccagcaagcccgccctgatcagccagctggagcagggcgtggagcccagcttcagccaggcccagggcgacctgagcatgagggacaggggcgccggcctgggcggcccaagcagcggcgcccctcctcccagcggcggcagcccagccggctccccaacctctaccgaggagggcacctctgagtccgccacccccgagagcggccctggcacctccaccgagcccagcgagggcagcgcacccggcagccctgccggcagccccacctccacagaggagggaaccagcaccgagcccagcgaaggcagcgccccaggcaccagcaccgagcctagtgagcaggagattaaacggatcaacaagatcagaagaagacttgtgaaagacagcaacaccaagaaggccggcaagacaggccccatgaaaaccctgctggttagagtgatgacacccgatctgagagagcggctggaaaacctgagaaagaagcctgaaaatatcccccagcccatcagcaatacatctagagccaacctgaataagctgctgaccgattacaccgaaatgaagaaggcgatcctgcatgtgtactgggaagagttccagaaggaccctgtgggcctgatgagccgggtggcccagcctgccagcaagaagatcgatcagaacaagctgaaacctgagatggacgagaagggcaacctgaccaccgccggctttgcctgctctcagtgtggccagcccctgttcgtgtacaagctggagcaggtgtctgagaagggcaaggcttacaccaactacttcggacggtgcaatgtggccgagcacgaaaagctgatcctgctggcccagctgaagcccgagaaggatagcgacgaagccgtgacatatagcctgggaaagtttgggcagagggccctggatttctacagcattcatgtgaccaaggagtccacccaccccgtgaagcccctggcccagatcgccggaaacagatacgcctccggacctgtgggaaaggccctgagcgacgcatgtatgggcacaatcgcctccttcctgtctaagtaccaggacatcatcatcgaacaccagaaggtggtgaagggcaaccagaagagactggagagcctgcgggagctggccggcaaggaaaacctggaataccctagcgtgaccctgccacctcagcctcacaccaaggagggcgttgatgcctacaacgaagtgatcgcccgggtgcgaatgtgggtgaacctgaacctgtggcagaagctgaagctaagcagagatgatgccaagcctctgctgagactgaagggattcccttcctttcctctggtcgagagacaggccaacgaagtggactggtgggacatggtgtgtaacgtgaagaagctgatcaacgagaaaaaggaggatggcaaggtgttttggcagaatctggctggctacaagagacaggaagccctgagaccatacctgagcagcgaggaagatcggaagaagggaaagaaattcgctcggtaccagctgggcgacctgctgctgcacctggaaaagaagcacggcgaggactggggaaaggtgtacgacgaggcctgggagcggattgacaagaaagtggaaggcctgagcaagcacatcaagctggaagaggaacggagaagcgaggacgcccagagcaaggccgccctgaccgactggctgcgggctaaggccagcttcgtgatcgagggcctgaaggaggccgacaaggacgagttctgcagatgcgagctgaagctgcagaagtggtacggggacctgcggggaaagcccttcgccatcgaagccgagaacagcatcctggacatcagcggcttcagcaagcagtacaactgtgccttcatctggcagaaggacggcgtgaagaagctgaacctgtacctgatcatcaactacttcaagggcggcaagctgcggttcaagaagatcaaacctgaagccttcgaagccaacagattctacaccgtgatcaacaaaaagagcggcgagatcgtgcccatggaggtgaacttcaacttcgacgaccccaacctgatcatcctgcctctggcctttggcaagagacagggcagagaattcatctggaacgacctgctgtccctggaaaccggcagcctgaagctggccaacggaagagtgatcgagaagacactgtacaacagaagaacccggcaggatgagcctgccctgttcgtggccctgaccttcgagcggcgggaggtcctggactcctccaatatcaaaccaatgaacctgatcggcgtggcaagaggcgaaaacatccccgccgtgatcgccctgaccgaccccgagggctgcccactgagccggtttaaggatagcctgggaaacccaacccacatcctgagaatcggcgagagctataaggagaagcagcggaccatccaggccaagaaggaggtggagcagcggagagccggcggctacagccggaagtacgccagcaaagccaagaatctggcagacgatatggtgagaaacaccgctagagatctgctgtactacgccgtgacccaggatgccatgctgatcttcgccaacctgagccggggcttcggccggcagggcaagcggaccttcatggccgagagacagtacacacggatggaggactggctgaccgccaagctggcctacgagggcctgagcaagacctacctgtccaagacactggcccagtacacctccaagacatgcagcaactgtgggtttaccatcaccagcgccgactacgacagggtgctggagaagctgaagaagacagcaacaggctggatgaccacaattaacggcaaggagctgaaggtggagggccagattacctactacaacagatacaagagacagaacgtagtcaaggacctgtccgtcgagctggatagactgagcgaagaatctgtgaacaacgacatctcctcctggacaaagggcagaagcggagaagctctgagcctcctgaagaaaagattctcccatagacccgtgcaggagaagttcgtgtgcctgaactgcggcttcgagacacacgcagccgagcaagccgccctgaacatcgccagatcctggctgttcctgcggagccaggagtacaagaaataccagacaaacaagacaaccggcaacaccgataagagagccttcgtcgagacctggcagtccttttaccggaagaagcttaaggaggtgtggaaacctgccgtgcggtctggcggatctggcggaggctccaccagccccaagaaaaagagaaaagtctaagctgccttctgcggggcttgccttctggccatgcccttcttctctcccttgcacctgtacctcttggtctttgaataaagcctgagtaggaaggctagcaaaaaaaaaaaaaaaaaaaaaaaaaaaaaaaaaaaaaaaaaaaaaaaaaaaaaaaaaaaaaaaaaaaaaaaaaaaaaaaa

SEQ ID NO: 12517 - RNA, 5785 nt, synthetic construct
  source 1..5785: mol_type = other RNA
aggaaataagagagaaaagaagagtaagaagaaatataagagccaccatggcccctaagaagaagcgtaaagtgagccggatggaacgcctcgtctacgaggtgcggcagaagtgcagaaacatcgaggacatctgcatctcctgcggatctctgaacgtgaccctggagcacccactgttcatcggcggcatgtgccagaactgtaaaaactgttttctggagtgtgcctatcaatacgacgatgacggctaccagagctactgcaccatctgttgcggcggaagagaggtgctgatgtgtggaaataacaactgctgccggtgcttctgcgtggaatgcgtggacctgctggtgggccccggcgccgcccaggccgctattaaggaagatccttggaactgctacatgtgcggccacaagggcacatacggcctgctgagacggagagaggactggcctagcagactgcagatgttcttcgccaataaccacgaccaggagttcgacccccctaaggtgtaccctcccgtccccgccgagaagagaaagcccatccgggtcctgagcctgttcgatggcatcgccaccggtctgctggtgctgaaggacctgggcatccaggtggataggtacattgcctccgaggtgtgcgaggactccatcaccgtgggaatggtgcgtcatcagggcaagatcatgtacgtgggcgacgtgcggagcgtgacacagaagcatatccaggagtggggccctttcgacctggtgatcggcggcagcccttgcaatgacctgagcatcgtgaacccagcccggaagggcctgtacgagggaaccggcagactgttcttcgagttttacagactgctgcacgacgcccggcctaaggaaggcgacgaccggcccttcttttggctgttcgagaatgtggtggccatgggagtcagcgacaagcgggatattagccggttcctggagagcaaccccgtgatgatcgatgccaaggaagtgagcgccgcccaccgggccagatacttctggggcaatctgcctggcatgaacagacccctggccagcaccgtgaacgacaagctggagctgcaggagtgcctggagcacggccggatcgccaagttcagcaaggtgagaaccatcaccacccgaagcaacagcatcaaacaaggcaaggaccagcactttcctgtgttcatgaacgagaaggaggacatcctgtggtgtaccgagatggagagagtgttcgggttcccagtccactacacagatgtcagcaacatgtctagactggccagacagagactgctgggaagaagctggtccgtccctgtgatcagacacctgttcgcccctctgaaggagtacttcgcctgcgtgagcagcggcaacagcaacgccaacagccggggccccagcttctctagcggcctggtgccactgtccctgagagggagccacatgggccccatggagatctacaaaaccgtgagcgcctggaagcggcagcctgtgcgcgtgctgagcctgtttcggaatatcgataaagtcctgaaaagcctgggattcctggagagcggctctggctccggcggtggcaccctgaagtacgtggaggatgtgacaaacgtggtcagacgggatgtggagaagtggggccccttcgatctggtgtacggcagcacccaacccctgggcagctcttgtgaccggtgccctggctggtacatgtttcagttccaccggatcctgcagtacgccctgccgagacaggagtcccagcggccattcttttggattttcatggacaacttgctgctgaccgaggatgaccaggaaactaccactcggttcctgcagaccgaagccgtgaccctgcaggacgtgagaggccgggactaccagaacgccatgcgggtgtggtccaacatccctggactgaaaagcaagcacgcacctctgacccctaaagaagaggagtacctgcaggcccaggtgcggagcagaagcaagctggacgcccctaaggtggatctgctggtgaagaattgcctcctgcccctgagagagtacttcaagtatttcagccagaatagtctgcccctgggaggcagcggcggcggcttccagggcagcatcagcttcaaggacgtgaccgtgggcttcacccaggaggagtggcagcacctggaccccagccagagggccctgtacagggacgtgatgctggagaactacagcaacctggtgagcgtgggctactgcgtgcacaagcccgaggtgatcagcaggctggagcagggcgaggagccctggaggctggaggaggagttccccagccagagcttccccgtgtggaccgccgacggcggcccaagcagcggcgcccctcctcccagcggcggcagcccagccggctccccaacctctaccgaggagggcacctctgagtccgccacccccgagagcggccctggcacctccaccgagcccagcgagggcagcgcacccggcagccctgccggcagccccacctccacagaggagggaaccagcaccgagcccagcgaaggcagcgccccaggcaccagcaccgagcctagtgagcaggagattaaacggatcaacaagatcagaagaagacttgtgaaagacagcaacaccaagaaggccggcaagacaggccccatgaaaaccctgctggttagagtgatgacacccgatctgagagagcggctggaaaacctgagaaagaagcctgaaaatatcccccagcccatcagcaatacatctagagccaacctgaataagctgctgaccgattacaccgaaatgaagaaggcgatcctgcatgtgtactgggaagagttccagaaggaccctgtgggcctgatgagccgggtggcccagcctgccagcaagaagatcgatcagaacaagctgaaacctgagatggacgagaagggcaacctgaccaccgccggctttgcctgctctcagtgtggccagcccctgttcgtgtacaagctggagcaggtgtctgagaagggcaaggcttacaccaactacttcggacggtgcaatgtggccgagcacgaaaagctgatcctgctggcccagctgaagcccgagaaggatagcgacgaagccgtgacatatagcctgggaaagtttgggcagagggccctggatttctacagcattcatgtgaccaaggagtccacccaccccgtgaagcccctggcccagatcgccggaaacagatacgcctccggacctgtgggaaaggccctgagcgacgcatgtatgggcacaatcgcctccttcctgtctaagtaccaggacatcatcatcgaacaccagaaggtggtgaagggcaaccagaagagactggagagcctgcgggagctggccggcaaggaaaacctggaataccctagcgtgaccctgccacctcagcctcacaccaaggagggcgttgatgcctacaacgaagtgatcgcccgggtgcgaatgtgggtgaacctgaacctgtggcagaagctgaagctaagcagagatgatgccaagcctctgctgagactgaagggattcccttcctttcctctggtcgagagacaggccaacgaagtggactggtgggacatggtgtgtaacgtgaagaagctgatcaacgagaaaaaggaggatggcaaggtgttttggcagaatctggctggctacaagagacaggaagccctgagaccatacctgagcagcgaggaagatcggaagaagggaaagaaattcgctcggtaccagctgggcgacctgctgctgcacctggaaaagaagcacggcgaggactggggaaaggtgtacgacgaggcctgggagcggattgacaagaaagtggaaggcctgagcaagcacatcaagctggaagaggaacggagaagcgaggacgcccagagcaaggccgccctgaccgactggctgcgggctaaggccagcttcgtgatcgagggcctgaaggaggccgacaaggacgagttctgcagatgcgagctgaagctgcagaagtggtacggggacctgcggggaaagcccttcgccatcgaagccgagaacagcatcctggacatcagcggcttcagcaagcagtacaactgtgccttcatctggcagaaggacggcgtgaagaagctgaacctgtacctgatcatcaactacttcaagggcggcaagctgcggttcaagaagatcaaacctgaagccttcgaagccaacagattctacaccgtgatcaacaaaaagagcggcgagatcgtgcccatggaggtgaacttcaacttcgacgaccccaacctgatcatcctgcctctggcctttggcaagagacagggcagagaattcatctggaacgacctgctgtccctggaaaccggcagcctgaagctggccaacggaagagtgatcgagaagacactgtacaacagaagaacccggcaggatgagcctgccctgttcgtggccctgaccttcgagcggcgggaggtcctggactcctccaatatcaaaccaatgaacctgatcggcgtggcaagaggcgaaaacatccccgccgtgatcgccctgaccgaccccgagggctgcccactgagccggtttaaggatagcctgggaaacccaacccacatcctgagaatcggcgagagctataaggagaagcagcggaccatccaggccaagaaggaggtggagcagcggagagccggcggctacagccggaagtacgccagcaaagccaagaatctggcagacgatatggtgagaaacaccgctagagatctgctgtactacgccgtgacccaggatgccatgctgatcttcgccaacctgagccggggcttcggccggcagggcaagcggaccttcatggccgagagacagtacacacggatggaggactggctgaccgccaagctggcctacgagggcctgagcaagacctacctgtccaagacactggcccagtacacctccaagacatgcagcaactgtgggtttaccatcaccagcgccgactacgacagggtgctggagaagctgaagaagacagcaacaggctggatgaccacaattaacggcaaggagctgaaggtggagggccagattacctactacaacagatacaagagacagaacgtagtcaaggacctgtccgtcgagctggatagactgagcgaagaatctgtgaacaacgacatctcctcctggacaaagggcagaagcggagaagctctgagcctcctgaagaaaagattctcccatagacccgtgcaggagaagttcgtgtgcctgaactgcggcttcgagacacacgcagccgagcaagccgccctgaacatcgccagatcctggctgttcctgcggagccaggagtacaagaaataccagacaaacaagacaaccggcaacaccgataagagagccttcgtcgagacctggcagtccttttaccggaagaagcttaaggaggtgtggaaacctgccgtgcggtctggcggatctggcggaggctccaccagccccaagaaaaagagaaaagtctaagctgccttctgcggggcttgccttctggccatgcccttcttctctcccttgcacctgtacctcttggtctttgaataaagcctgagtaggaaggctagcaaaaaaaaaaaaaaaaaaaaaaaaaaaaaaaaaaaaaaaaaaaaaaaaaaaaaaaaaaaaaaaaaaaaaaaaaaaaaaaa

SEQ ID NO: 12518 - RNA, 5785 nt, synthetic construct
  source 1..5785: mol_type = other RNA
aggaaataagagagaaaagaagagtaagaagaaatataagagccaccatggcccctaagaagaagcgtaaagtgagccggatggaacgcctcgtctacgaggtgcggcagaagtgcagaaacatcgaggacatctgcatctcctgcggatctctgaacgtgaccctggagcacccactgttcatcggcggcatgtgccagaactgtaaaaactgttttctggagtgtgcctatcaatacgacgatgacggctaccagagctactgcaccatctgttgcggcggaagagaggtgctgatgtgtggaaataacaactgctgccggtgcttctgcgtggaatgcgtggacctgctggtgggccccggcgccgcccaggccgctattaaggaagatccttggaactgctacatgtgcggccacaagggcacatacggcctgctgagacggagagaggactggcctagcagactgcagatgttcttcgccaataaccacgaccaggagttcgacccccctaaggtgtaccctcccgtccccgccgagaagagaaagcccatccgggtcctgagcctgttcgatggcatcgccaccggtctgctggtgctgaaggacctgggcatccaggtggataggtacattgcctccgaggtgtgcgaggactccatcaccgtgggaatggtgcgtcatcagggcaagatcatgtacgtgggcgacgtgcggagcgtgacacagaagcatatccaggagtggggccctttcgacctggtgatcggcggcagcccttgcaatgacctgagcatcgtgaacccagcccggaagggcctgtacgagggaaccggcagactgttcttcgagttttacagactgctgcacgacgcccggcctaaggaaggcgacgaccggcccttcttttggctgttcgagaatgtggtggccatgggagtcagcgacaagcgggatattagccggttcctggagagcaaccccgtgatgatcgatgccaaggaagtgagcgccgcccaccgggccagatacttctggggcaatctgcctggcatgaacagacccctggccagcaccgtgaacgacaagctggagctgcaggagtgcctggagcacggccggatcgccaagttcagcaaggtgagaaccatcaccacccgaagcaacagcatcaaacaaggcaaggaccagcactttcctgtgttcatgaacgagaaggaggacatcctgtggtgtaccgagatggagagagtgttcgggttcccagtccactacacagatgtcagcaacatgtctagactggccagacagagactgctgggaagaagctggtccgtccctgtgatcagacacctgttcgcccctctgaaggagtacttcgcctgcgtgagcagcggcaacagcaacgccaacagccggggccccagcttctctagcggcctggtgccactgtccctgagagggagccacatgggccccatggagatctacaaaaccgtgagcgcctggaagcggcagcctgtgcgcgtgctgagcctgtttcggaatatcgataaagtcctgaaaagcctgggattcctggagagcggctctggctccggcggtggcaccctgaagtacgtggaggatgtgacaaacgtggtcagacgggatgtggagaagtggggccccttcgatctggtgtacggcagcacccaacccctgggcagctcttgtgaccggtgccctggctggtacatgtttcagttccaccggatcctgcagtacgccctgccgagacaggagtcccagcggccattcttttggattttcatggacaacttgctgctgaccgaggatgaccaggaaactaccactcggttcctgcagaccgaagccgtgaccctgcaggacgtgagaggccgggactaccagaacgccatgcgggtgtggtccaacatccctggactgaaaagcaagcacgcacctctgacccctaaagaagaggagtacctgcaggcccaggtgcggagcagaagcaagctggacgcccctaaggtggatctgctggtgaagaattgcctcctgcccctgagagagtacttcaagtatttcagccagaatagtctgcccctgggaggcagcggcggcggcagccagggcctggtgaccttcggcgacgtggccgtggacttcagccaggaggagtgggagtggctggactgcgcccagaggaccctgtacaggagcgtgatgctggagaactacaggagcctggtgagcctgggcctgtgcgtgagcaagcccgagatgatcagcagcctggagcagaggaaggagccctggaccgtgaagaggaagtggaccaggggccagtgccccgacagcgaggccgtgggcggcccaagcagcggcgcccctcctcccagcggcggcagcccagccggctccccaacctctaccgaggagggcacctctgagtccgccacccccgagagcggccctggcacctccaccgagcccagcgagggcagcgcacccggcagccctgccggcagccccacctccacagaggagggaaccagcaccgagcccagcgaaggcagcgccccaggcaccagcaccgagcctagtgagcaggagattaaacggatcaacaagatcagaagaagacttgtgaaagacagcaacaccaagaaggccggcaagacaggccccatgaaaaccctgctggttagagtgatgacacccgatctgagagagcggctggaaaacctgagaaagaagcctgaaaatatcccccagcccatcagcaatacatctagagccaacctgaataagctgctgaccgattacaccgaaatgaagaaggcgatcctgcatgtgtactgggaagagttccagaaggaccctgtgggcctgatgagccgggtggcccagcctgccagcaagaagatcgatcagaacaagctgaaacctgagatggacgagaagggcaacctgaccaccgccggctttgcctgctctcagtgtggccagcccctgttcgtgtacaagctggagcaggtgtctgagaagggcaaggcttacaccaactacttcggacggtgcaatgtggccgagcacgaaaagctgatcctgctggcccagctgaagcccgagaaggatagcgacgaagccgtgacatatagcctgggaaagtttgggcagagggccctggatttctacagcattcatgtgaccaaggagtccacccaccccgtgaagcccctggcccagatcgccggaaacagatacgcctccggacctgtgggaaaggccctgagcgacgcatgtatgggcacaatcgcctccttcctgtctaagtaccaggacatcatcatcgaacaccagaaggtggtgaagggcaaccagaagagactggagagcctgcgggagctggccggcaaggaaaacctggaataccctagcgtgaccctgccacctcagcctcacaccaaggagggcgttgatgcctacaacgaagtgatcgcccgggtgcgaatgtgggtgaacctgaacctgtggcagaagctgaagctaagcagagatgatgccaagcctctgctgagactgaagggattcccttcctttcctctggtcgagagacaggccaacgaagtggactggtgggacatggtgtgtaacgtgaagaagctgatcaacgagaaaaaggaggatggcaaggtgttttggcagaatctggctggctacaagagacaggaagccctgagaccatacctgagcagcgaggaagatcggaagaagggaaagaaattcgctcggtaccagctgggcgacctgctgctgcacctggaaaagaagcacggcgaggactggggaaaggtgtacgacgaggcctgggagcggattgacaagaaagtggaaggcctgagcaagcacatcaagctggaagaggaacggagaagcgaggacgcccagagcaaggccgccctgaccgactggctgcgggctaaggccagcttcgtgatcgagggcctgaaggaggccgacaaggacgagttctgcagatgcgagctgaagctgcagaagtggtacggggacctgcggggaaagcccttcgccatcgaagccgagaacagcatcctggacatcagcggcttcagcaagcagtacaactgtgccttcatctggcagaaggacggcgtgaagaagctgaacctgtacctgatcatcaactacttcaagggcggcaagctgcggttcaagaagatcaaacctgaagccttcgaagccaacagattctacaccgtgatcaacaaaaagagcggcgagatcgtgcccatggaggtgaacttcaacttcgacgaccccaacctgatcatcctgcctctggcctttggcaagagacagggcagagaattcatctggaacgacctgctgtccctggaaaccggcagcctgaagctggccaacggaagagtgatcgagaagacactgtacaacagaagaacccggcaggatgagcctgccctgttcgtggccctgaccttcgagcggcgggaggtcctggactcctccaatatcaaaccaatgaacctgatcggcgtggcaagaggcgaaaacatccccgccgtgatcgccctgaccgaccccgagggctgcccactgagccggtttaaggatagcctgggaaacccaacccacatcctgagaatcggcgagagctataaggagaagcagcggaccatccaggccaagaaggaggtggagcagcggagagccggcggctacagccggaagtacgccagcaaagccaagaatctggcagacgatatggtgagaaacaccgctagagatctgctgtactacgccgtgacccaggatgccatgctgatcttcgccaacctgagccggggcttcggccggcagggcaagcggaccttcatggccgagagacagtacacacggatggaggactggctgaccgccaagctggcctacgagggcctgagcaagacctacctgtccaagacactggcccagtacacctccaagacatgcagcaactgtgggtttaccatcaccagcgccgactacgacagggtgctggagaagctgaagaagacagcaacaggctggatgaccacaattaacggcaaggagctgaaggtggagggccagattacctactacaacagatacaagagacagaacgtagtcaaggacctgtccgtcgagctggatagactgagcgaagaatctgtgaacaacgacatctcctcctggacaaagggcagaagcggagaagctctgagcctcctgaagaaaagattctcccatagacccgtgcaggagaagttcgtgtgcctgaactgcggcttcgagacacacgcagccgagcaagccgccctgaacatcgccagatcctggctgttcctgcggagccaggagtacaagaaataccagacaaacaagacaaccggcaacaccgataagagagccttcgtcgagacctggcagtccttttaccggaagaagcttaaggaggtgtggaaacctgccgtgcggtctggcggatctggcggaggctccaccagccccaagaaaaagagaaaagtctaagctgccttctgcggggcttgccttctggccatgcccttcttctctcccttgcacctgtacctcttggtctttgaataaagcctgagtaggaaggctagcaaaaaaaaaaaaaaaaaaaaaaaaaaaaaaaaaaaaaaaaaaaaaaaaaaaaaaaaaaaaaaaaaaaaaaaaaaaaaaaa

SEQ ID NO: 12519 - RNA, 5785 nt, synthetic construct
  source 1..5785: mol_type = other RNA
aggaaataagagagaaaagaagagtaagaagaaatataagagccaccatggcccctaagaagaagcgtaaagtgagccggatggaacgcctcgtctacgaggtgcggcagaagtgcagaaacatcgaggacatctgcatctcctgcggatctctgaacgtgaccctggagcacccactgttcatcggcggcatgtgccagaactgtaaaaactgttttctggagtgtgcctatcaatacgacgatgacggctaccagagctactgcaccatctgttgcggcggaagagaggtgctgatgtgtggaaataacaactgctgccggtgcttctgcgtggaatgcgtggacctgctggtgggccccggcgccgcccaggccgctattaaggaagatccttggaactgctacatgtgcggccacaagggcacatacggcctgctgagacggagagaggactggcctagcagactgcagatgttcttcgccaataaccacgaccaggagttcgacccccctaaggtgtaccctcccgtccccgccgagaagagaaagcccatccgggtcctgagcctgttcgatggcatcgccaccggtctgctggtgctgaaggacctgggcatccaggtggataggtacattgcctccgaggtgtgcgaggactccatcaccgtgggaatggtgcgtcatcagggcaagatcatgtacgtgggcgacgtgcggagcgtgacacagaagcatatccaggagtggggccctttcgacctggtgatcggcggcagcccttgcaatgacctgagcatcgtgaacccagcccggaagggcctgtacgagggaaccggcagactgttcttcgagttttacagactgctgcacgacgcccggcctaaggaaggcgacgaccggcccttcttttggctgttcgagaatgtggtggccatgggagtcagcgacaagcgggatattagccggttcctggagagcaaccccgtgatgatcgatgccaaggaagtgagcgccgcccaccgggccagatacttctggggcaatctgcctggcatgaacagacccctggccagcaccgtgaacgacaagctggagctgcaggagtgcctggagcacggccggatcgccaagttcagcaaggtgagaaccatcaccacccgaagcaacagcatcaaacaaggcaaggaccagcactttcctgtgttcatgaacgagaaggaggacatcctgtggtgtaccgagatggagagagtgttcgggttcccagtccactacacagatgtcagcaacatgtctagactggccagacagagactgctgggaagaagctggtccgtccctgtgatcagacacctgttcgcccctctgaaggagtacttcgcctgcgtgagcagcggcaacagcaacgccaacagccggggccccagcttctctagcggcctggtgccactgtccctgagagggagccacatgggccccatggagatctacaaaaccgtgagcgcctggaagcggcagcctgtgcgcgtgctgagcctgtttcggaatatcgataaagtcctgaaaagcctgggattcctggagagcggctctggctccggcggtggcaccctgaagtacgtggaggatgtgacaaacgtggtcagacgggatgtggagaagtggggccccttcgatctggtgtacggcagcacccaacccctgggcagctcttgtgaccggtgccctggctggtacatgtttcagttccaccggatcctgcagtacgccctgccgagacaggagtcccagcggccattcttttggattttcatggacaacttgctgctgaccgaggatgaccaggaaactaccactcggttcctgcagaccgaagccgtgaccctgcaggacgtgagaggccgggactaccagaacgccatgcgggtgtggtccaacatccctggactgaaaagcaagcacgcacctctgacccctaaagaagaggagtacctgcaggcccaggtgcggagcagaagcaagctggacgcccctaaggtggatctgctggtgaagaattgcctcctgcccctgagagagtacttcaagtatttcagccagaatagtctgcccctgggaggcagcggcggcggcatgatcgagtaccagatccccgtgagcttcaaggacgtggtggtgggcttcacccaggaggagtggcaccagctgagccccgcccagagggccctgtacagggacgtgatgctggagacctacagcaacctggtgagcgtgggctacgagggcaccaagcccgacgtgatcctgaggctggagcaggaggaggccccctggatcggcgaggccgcctgcctgggctgccactgctggggcaagggcggcccaagcagcggcgcccctcctcccagcggcggcagcccagccggctccccaacctctaccgaggagggcacctctgagtccgccacccccgagagcggccctggcacctccaccgagcccagcgagggcagcgcacccggcagccctgccggcagccccacctccacagaggagggaaccagcaccgagcccagcgaaggcagcgccccaggcaccagcaccgagcctagtgagcaggagattaaacggatcaacaagatcagaagaagacttgtgaaagacagcaacaccaagaaggccggcaagacaggccccatgaaaaccctgctggttagagtgatgacacccgatctgagagagcggctggaaaacctgagaaagaagcctgaaaatatcccccagcccatcagcaatacatctagagccaacctgaataagctgctgaccgattacaccgaaatgaagaaggcgatcctgcatgtgtactgggaagagttccagaaggaccctgtgggcctgatgagccgggtggcccagcctgccagcaagaagatcgatcagaacaagctgaaacctgagatggacgagaagggcaacctgaccaccgccggctttgcctgctctcagtgtggccagcccctgttcgtgtacaagctggagcaggtgtctgagaagggcaaggcttacaccaactacttcggacggtgcaatgtggccgagcacgaaaagctgatcctgctggcccagctgaagcccgagaaggatagcgacgaagccgtgacatatagcctgggaaagtttgggcagagggccctggatttctacagcattcatgtgaccaaggagtccacccaccccgtgaagcccctggcccagatcgccggaaacagatacgcctccggacctgtgggaaaggccctgagcgacgcatgtatgggcacaatcgcctccttcctgtctaagtaccaggacatcatcatcgaacaccagaaggtggtgaagggcaaccagaagagactggagagcctgcgggagctggccggcaaggaaaacctggaataccctagcgtgaccctgccacctcagcctcacaccaaggagggcgttgatgcctacaacgaagtgatcgcccgggtgcgaatgtgggtgaacctgaacctgtggcagaagctgaagctaagcagagatgatgccaagcctctgctgagactgaagggattcccttcctttcctctggtcgagagacaggccaacgaagtggactggtgggacatggtgtgtaacgtgaagaagctgatcaacgagaaaaaggaggatggcaaggtgttttggcagaatctggctggctacaagagacaggaagccctgagaccatacctgagcagcgaggaagatcggaagaagggaaagaaattcgctcggtaccagctgggcgacctgctgctgcacctggaaaagaagcacggcgaggactggggaaaggtgtacgacgaggcctgggagcggattgacaagaaagtggaaggcctgagcaagcacatcaagctggaagaggaacggagaagcgaggacgcccagagcaaggccgccctgaccgactggctgcgggctaaggccagcttcgtgatcgagggcctgaaggaggccgacaaggacgagttctgcagatgcgagctgaagctgcagaagtggtacggggacctgcggggaaagcccttcgccatcgaagccgagaacagcatcctggacatcagcggcttcagcaagcagtacaactgtgccttcatctggcagaaggacggcgtgaagaagctgaacctgtacctgatcatcaactacttcaagggcggcaagctgcggttcaagaagatcaaacctgaagccttcgaagccaacagattctacaccgtgatcaacaaaaagagcggcgagatcgtgcccatggaggtgaacttcaacttcgacgaccccaacctgatcatcctgcctctggcctttggcaagagacagggcagagaattcatctggaacgacctgctgtccctggaaaccggcagcctgaagctggccaacggaagagtgatcgagaagacactgtacaacagaagaacccggcaggatgagcctgccctgttcgtggccctgaccttcgagcggcgggaggtcctggactcctccaatatcaaaccaatgaacctgatcggcgtggcaagaggcgaaaacatccccgccgtgatcgccctgaccgaccccgagggctgcccactgagccggtttaaggatagcctgggaaacccaacccacatcctgagaatcggcgagagctataaggagaagcagcggaccatccaggccaagaaggaggtggagcagcggagagccggcggctacagccggaagtacgccagcaaagccaagaatctggcagacgatatggtgagaaacaccgctagagatctgctgtactacgccgtgacccaggatgccatgctgatcttcgccaacctgagccggggcttcggccggcagggcaagcggaccttcatggccgagagacagtacacacggatggaggactggctgaccgccaagctggcctacgagggcctgagcaagacctacctgtccaagacactggcccagtacacctccaagacatgcagcaactgtgggtttaccatcaccagcgccgactacgacagggtgctggagaagctgaagaagacagcaacaggctggatgaccacaattaacggcaaggagctgaaggtggagggccagattacctactacaacagatacaagagacagaacgtagtcaaggacctgtccgtcgagctggatagactgagcgaagaatctgtgaacaacgacatctcctcctggacaaagggcagaagcggagaagctctgagcctcctgaagaaaagattctcccatagacccgtgcaggagaagttcgtgtgcctgaactgcggcttcgagacacacgcagccgagcaagccgccctgaacatcgccagatcctggctgttcctgcggagccaggagtacaagaaataccagacaaacaagacaaccggcaacaccgataagagagccttcgtcgagacctggcagtccttttaccggaagaagcttaaggaggtgtggaaacctgccgtgcggtctggcggatctggcggaggctccaccagccccaagaaaaagagaaaagtctaagctgccttctgcggggcttgccttctggccatgcccttcttctctcccttgcacctgtacctcttggtctttgaataaagcctgagtaggaaggctagcaaaaaaaaaaaaaaaaaaaaaaaaaaaaaaaaaaaaaaaaaaaaaaaaaaaaaaaaaaaaaaaaaaaaaaaaaaaaaaaa

SEQ ID NO: 12520 - RNA, 5785 nt, synthetic construct
  source 1..5785: mol_type = other RNA
aggaaataagagagaaaagaagagtaagaagaaatataagagccaccatggcccctaagaagaagcgtaaagtgagccggatggaacgcctcgtctacgaggtgcggcagaagtgcagaaacatcgaggacatctgcatctcctgcggatctctgaacgtgaccctggagcacccactgttcatcggcggcatgtgccagaactgtaaaaactgttttctggagtgtgcctatcaatacgacgatgacggctaccagagctactgcaccatctgttgcggcggaagagaggtgctgatgtgtggaaataacaactgctgccggtgcttctgcgtggaatgcgtggacctgctggtgggccccggcgccgcccaggccgctattaaggaagatccttggaactgctacatgtgcggccacaagggcacatacggcctgctgagacggagagaggactggcctagcagactgcagatgttcttcgccaataaccacgaccaggagttcgacccccctaaggtgtaccctcccgtccccgccgagaagagaaagcccatccgggtcctgagcctgttcgatggcatcgccaccggtctgctggtgctgaaggacctgggcatccaggtggataggtacattgcctccgaggtgtgcgaggactccatcaccgtgggaatggtgcgtcatcagggcaagatcatgtacgtgggcgacgtgcggagcgtgacacagaagcatatccaggagtggggccctttcgacctggtgatcggcggcagcccttgcaatgacctgagcatcgtgaacccagcccggaagggcctgtacgagggaaccggcagactgttcttcgagttttacagactgctgcacgacgcccggcctaaggaaggcgacgaccggcccttcttttggctgttcgagaatgtggtggccatgggagtcagcgacaagcgggatattagccggttcctggagagcaaccccgtgatgatcgatgccaaggaagtgagcgccgcccaccgggccagatacttctggggcaatctgcctggcatgaacagacccctggccagcaccgtgaacgacaagctggagctgcaggagtgcctggagcacggccggatcgccaagttcagcaaggtgagaaccatcaccacccgaagcaacagcatcaaacaaggcaaggaccagcactttcctgtgttcatgaacgagaaggaggacatcctgtggtgtaccgagatggagagagtgttcgggttcccagtccactacacagatgtcagcaacatgtctagactggccagacagagactgctgggaagaagctggtccgtccctgtgatcagacacctgttcgcccctctgaaggagtacttcgcctgcgtgagcagcggcaacagcaacgccaacagccggggccccagcttctctagcggcctggtgccactgtccctgagagggagccacatgggccccatggagatctacaaaaccgtgagcgcctggaagcggcagcctgtgcgcgtgctgagcctgtttcggaatatcgataaagtcctgaaaagcctgggattcctggagagcggctctggctccggcggtggcaccctgaagtacgtggaggatgtgacaaacgtggtcagacgggatgtggagaagtggggccccttcgatctggtgtacggcagcacccaacccctgggcagctcttgtgaccggtgccctggctggtacatgtttcagttccaccggatcctgcagtacgccctgccgagacaggagtcccagcggccattcttttggattttcatggacaacttgctgctgaccgaggatgaccaggaaactaccactcggttcctgcagaccgaagccgtgaccctgcaggacgtgagaggccgggactaccagaacgccatgcgggtgtggtccaacatccctggactgaaaagcaagcacgcacctctgacccctaaagaagaggagtacctgcaggcccaggtgcggagcagaagcaagctggacgcccctaaggtggatctgctggtgaagaattgcctcctgcccctgagagagtacttcaagtatttcagccagaatagtctgcccctgggaggcagcggcggcggctacgaggagatggtgaccttcgaggacgtggccgtgcacttcaccaagaccgagtggaccggcctgagccccgcccagagggccctgtacaggagcgtgatgctggagaacttcggcaacctgaccgccctgggctaccccgtgcccaagcccgccctgatcagcctgctggagggcggcgacatggcctggggcctggaggcccaggacgaccccctggccgagatgaccaagaacgtgtgcggcggcccaagcagcggcgcccctcctcccagcggcggcagcccagccggctccccaacctctaccgaggagggcacctctgagtccgccacccccgagagcggccctggcacctccaccgagcccagcgagggcagcgcacccggcagccctgccggcagccccacctccacagaggagggaaccagcaccgagcccagcgaaggcagcgccccaggcaccagcaccgagcctagtgagcaggagattaaacggatcaacaagatcagaagaagacttgtgaaagacagcaacaccaagaaggccggcaagacaggccccatgaaaaccctgctggttagagtgatgacacccgatctgagagagcggctggaaaacctgagaaagaagcctgaaaatatcccccagcccatcagcaatacatctagagccaacctgaataagctgctgaccgattacaccgaaatgaagaaggcgatcctgcatgtgtactgggaagagttccagaaggaccctgtgggcctgatgagccgggtggcccagcctgccagcaagaagatcgatcagaacaagctgaaacctgagatggacgagaagggcaacctgaccaccgccggctttgcctgctctcagtgtggccagcccctgttcgtgtacaagctggagcaggtgtctgagaagggcaaggcttacaccaactacttcggacggtgcaatgtggccgagcacgaaaagctgatcctgctggcccagctgaagcccgagaaggatagcgacgaagccgtgacatatagcctgggaaagtttgggcagagggccctggatttctacagcattcatgtgaccaaggagtccacccaccccgtgaagcccctggcccagatcgccggaaacagatacgcctccggacctgtgggaaaggccctgagcgacgcatgtatgggcacaatcgcctccttcctgtctaagtaccaggacatcatcatcgaacaccagaaggtggtgaagggcaaccagaagagactggagagcctgcgggagctggccggcaaggaaaacctggaataccctagcgtgaccctgccacctcagcctcacaccaaggagggcgttgatgcctacaacgaagtgatcgcccgggtgcgaatgtgggtgaacctgaacctgtggcagaagctgaagctaagcagagatgatgccaagcctctgctgagactgaagggattcccttcctttcctctggtcgagagacaggccaacgaagtggactggtgggacatggtgtgtaacgtgaagaagctgatcaacgagaaaaaggaggatggcaaggtgttttggcagaatctggctggctacaagagacaggaagccctgagaccatacctgagcagcgaggaagatcggaagaagggaaagaaattcgctcggtaccagctgggcgacctgctgctgcacctggaaaagaagcacggcgaggactggggaaaggtgtacgacgaggcctgggagcggattgacaagaaagtggaaggcctgagcaagcacatcaagctggaagaggaacggagaagcgaggacgcccagagcaaggccgccctgaccgactggctgcgggctaaggccagcttcgtgatcgagggcctgaaggaggccgacaaggacgagttctgcagatgcgagctgaagctgcagaagtggtacggggacctgcggggaaagcccttcgccatcgaagccgagaacagcatcctggacatcagcggcttcagcaagcagtacaactgtgccttcatctggcagaaggacggcgtgaagaagctgaacctgtacctgatcatcaactacttcaagggcggcaagctgcggttcaagaagatcaaacctgaagccttcgaagccaacagattctacaccgtgatcaacaaaaagagcggcgagatcgtgcccatggaggtgaacttcaacttcgacgaccccaacctgatcatcctgcctctggcctttggcaagagacagggcagagaattcatctggaacgacctgctgtccctggaaaccggcagcctgaagctggccaacggaagagtgatcgagaagacactgtacaacagaagaacccggcaggatgagcctgccctgttcgtggccctgaccttcgagcggcgggaggtcctggactcctccaatatcaaaccaatgaacctgatcggcgtggcaagaggcgaaaacatccccgccgtgatcgccctgaccgaccccgagggctgcccactgagccggtttaaggatagcctgggaaacccaacccacatcctgagaatcggcgagagctataaggagaagcagcggaccatccaggccaagaaggaggtggagcagcggagagccggcggctacagccggaagtacgccagcaaagccaagaatctggcagacgatatggtgagaaacaccgctagagatctgctgtactacgccgtgacccaggatgccatgctgatcttcgccaacctgagccggggcttcggccggcagggcaagcggaccttcatggccgagagacagtacacacggatggaggactggctgaccgccaagctggcctacgagggcctgagcaagacctacctgtccaagacactggcccagtacacctccaagacatgcagcaactgtgggtttaccatcaccagcgccgactacgacagggtgctggagaagctgaagaagacagcaacaggctggatgaccacaattaacggcaaggagctgaaggtggagggccagattacctactacaacagatacaagagacagaacgtagtcaaggacctgtccgtcgagctggatagactgagcgaagaatctgtgaacaacgacatctcctcctggacaaagggcagaagcggagaagctctgagcctcctgaagaaaagattctcccatagacccgtgcaggagaagttcgtgtgcctgaactgcggcttcgagacacacgcagccgagcaagccgccctgaacatcgccagatcctggctgttcctgcggagccaggagtacaagaaataccagacaaacaagacaaccggcaacaccgataagagagccttcgtcgagacctggcagtccttttaccggaagaagcttaaggaggtgtggaaacctgccgtgcggtctggcggatctggcggaggctccaccagccccaagaaaaagagaaaagtctaagctgccttctgcggggcttgccttctggccatgcccttcttctctcccttgcacctgtacctcttggtctttgaataaagcctgagtaggaaggctagcaaaaaaaaaaaaaaaaaaaaaaaaaaaaaaaaaaaaaaaaaaaaaaaaaaaaaaaaaaaaaaaaaaaaaaaaaaaaaaaa

SEQ ID NO: 12521 - RNA, 5785 nt, synthetic construct
  source 1..5785: mol_type = other RNA
aggaaataagagagaaaagaagagtaagaagaaatataagagccaccatggcccctaagaagaagcgtaaagtgagccggatggaacgcctcgtctacgaggtgcggcagaagtgcagaaacatcgaggacatctgcatctcctgcggatctctgaacgtgaccctggagcacccactgttcatcggcggcatgtgccagaactgtaaaaactgttttctggagtgtgcctatcaatacgacgatgacggctaccagagctactgcaccatctgttgcggcggaagagaggtgctgatgtgtggaaataacaactgctgccggtgcttctgcgtggaatgcgtggacctgctggtgggccccggcgccgcccaggccgctattaaggaagatccttggaactgctacatgtgcggccacaagggcacatacggcctgctgagacggagagaggactggcctagcagactgcagatgttcttcgccaataaccacgaccaggagttcgacccccctaaggtgtaccctcccgtccccgccgagaagagaaagcccatccgggtcctgagcctgttcgatggcatcgccaccggtctgctggtgctgaaggacctgggcatccaggtggataggtacattgcctccgaggtgtgcgaggactccatcaccgtgggaatggtgcgtcatcagggcaagatcatgtacgtgggcgacgtgcggagcgtgacacagaagcatatccaggagtggggccctttcgacctggtgatcggcggcagcccttgcaatgacctgagcatcgtgaacccagcccggaagggcctgtacgagggaaccggcagactgttcttcgagttttacagactgctgcacgacgcccggcctaaggaaggcgacgaccggcccttcttttggctgttcgagaatgtggtggccatgggagtcagcgacaagcgggatattagccggttcctggagagcaaccccgtgatgatcgatgccaaggaagtgagcgccgcccaccgggccagatacttctggggcaatctgcctggcatgaacagacccctggccagcaccgtgaacgacaagctggagctgcaggagtgcctggagcacggccggatcgccaagttcagcaaggtgagaaccatcaccacccgaagcaacagcatcaaacaaggcaaggaccagcactttcctgtgttcatgaacgagaaggaggacatcctgtggtgtaccgagatggagagagtgttcgggttcccagtccactacacagatgtcagcaacatgtctagactggccagacagagactgctgggaagaagctggtccgtccctgtgatcagacacctgttcgcccctctgaaggagtacttcgcctgcgtgagcagcggcaacagcaacgccaacagccggggccccagcttctctagcggcctggtgccactgtccctgagagggagccacatgggccccatggagatctacaaaaccgtgagcgcctggaagcggcagcctgtgcgcgtgctgagcctgtttcggaatatcgataaagtcctgaaaagcctgggattcctggagagcggctctggctccggcggtggcaccctgaagtacgtggaggatgtgacaaacgtggtcagacgggatgtggagaagtggggccccttcgatctggtgtacggcagcacccaacccctgggcagctcttgtgaccggtgccctggctggtacatgtttcagttccaccggatcctgcagtacgccctgccgagacaggagtcccagcggccattcttttggattttcatggacaacttgctgctgaccgaggatgaccaggaaactaccactcggttcctgcagaccgaagccgtgaccctgcaggacgtgagaggccgggactaccagaacgccatgcgggtgtggtccaacatccctggactgaaaagcaagcacgcacctctgacccctaaagaagaggagtacctgcaggcccaggtgcggagcagaagcaagctggacgcccctaaggtggatctgctggtgaagaattgcctcctgcccctgagagagtacttcaagtatttcagccagaatagtctgcccctgggaggcagcggcggcggcagccccaccctggtgaccttcaaggacatccacgtgaacttcaccagggaggagtggaacctgctggacgccgcccagcagatcatgtacaaggacgtgatgctggagaactacaagaacctggtgagcgtgggccaccagctgcccaagcccgacgtgatcctgcagctggagaagggcgaggagccctggctggtggagaggggcgtgaggcaggacaccaggcccgactgggacaccgccggcggcccaagcagcggcgcccctcctcccagcggcggcagcccagccggctccccaacctctaccgaggagggcacctctgagtccgccacccccgagagcggccctggcacctccaccgagcccagcgagggcagcgcacccggcagccctgccggcagccccacctccacagaggagggaaccagcaccgagcccagcgaaggcagcgccccaggcaccagcaccgagcctagtgagcaggagattaaacggatcaacaagatcagaagaagacttgtgaaagacagcaacaccaagaaggccggcaagacaggccccatgaaaaccctgctggttagagtgatgacacccgatctgagagagcggctggaaaacctgagaaagaagcctgaaaatatcccccagcccatcagcaatacatctagagccaacctgaataagctgctgaccgattacaccgaaatgaagaaggcgatcctgcatgtgtactgggaagagttccagaaggaccctgtgggcctgatgagccgggtggcccagcctgccagcaagaagatcgatcagaacaagctgaaacctgagatggacgagaagggcaacctgaccaccgccggctttgcctgctctcagtgtggccagcccctgttcgtgtacaagctggagcaggtgtctgagaagggcaaggcttacaccaactacttcggacggtgcaatgtggccgagcacgaaaagctgatcctgctggcccagctgaagcccgagaaggatagcgacgaagccgtgacatatagcctgggaaagtttgggcagagggccctggatttctacagcattcatgtgaccaaggagtccacccaccccgtgaagcccctggcccagatcgccggaaacagatacgcctccggacctgtgggaaaggccctgagcgacgcatgtatgggcacaatcgcctccttcctgtctaagtaccaggacatcatcatcgaacaccagaaggtggtgaagggcaaccagaagagactggagagcctgcgggagctggccggcaaggaaaacctggaataccctagcgtgaccctgccacctcagcctcacaccaaggagggcgttgatgcctacaacgaagtgatcgcccgggtgcgaatgtgggtgaacctgaacctgtggcagaagctgaagctaagcagagatgatgccaagcctctgctgagactgaagggattcccttcctttcctctggtcgagagacaggccaacgaagtggactggtgggacatggtgtgtaacgtgaagaagctgatcaacgagaaaaaggaggatggcaaggtgttttggcagaatctggctggctacaagagacaggaagccctgagaccatacctgagcagcgaggaagatcggaagaagggaaagaaattcgctcggtaccagctgggcgacctgctgctgcacctggaaaagaagcacggcgaggactggggaaaggtgtacgacgaggcctgggagcggattgacaagaaagtggaaggcctgagcaagcacatcaagctggaagaggaacggagaagcgaggacgcccagagcaaggccgccctgaccgactggctgcgggctaaggccagcttcgtgatcgagggcctgaaggaggccgacaaggacgagttctgcagatgcgagctgaagctgcagaagtggtacggggacctgcggggaaagcccttcgccatcgaagccgagaacagcatcctggacatcagcggcttcagcaagcagtacaactgtgccttcatctggcagaaggacggcgtgaagaagctgaacctgtacctgatcatcaactacttcaagggcggcaagctgcggttcaagaagatcaaacctgaagccttcgaagccaacagattctacaccgtgatcaacaaaaagagcggcgagatcgtgcccatggaggtgaacttcaacttcgacgaccccaacctgatcatcctgcctctggcctttggcaagagacagggcagagaattcatctggaacgacctgctgtccctggaaaccggcagcctgaagctggccaacggaagagtgatcgagaagacactgtacaacagaagaacccggcaggatgagcctgccctgttcgtggccctgaccttcgagcggcgggaggtcctggactcctccaatatcaaaccaatgaacctgatcggcgtggcaagaggcgaaaacatccccgccgtgatcgccctgaccgaccccgagggctgcccactgagccggtttaaggatagcctgggaaacccaacccacatcctgagaatcggcgagagctataaggagaagcagcggaccatccaggccaagaaggaggtggagcagcggagagccggcggctacagccggaagtacgccagcaaagccaagaatctggcagacgatatggtgagaaacaccgctagagatctgctgtactacgccgtgacccaggatgccatgctgatcttcgccaacctgagccggggcttcggccggcagggcaagcggaccttcatggccgagagacagtacacacggatggaggactggctgaccgccaagctggcctacgagggcctgagcaagacctacctgtccaagacactggcccagtacacctccaagacatgcagcaactgtgggtttaccatcaccagcgccgactacgacagggtgctggagaagctgaagaagacagcaacaggctggatgaccacaattaacggcaaggagctgaaggtggagggccagattacctactacaacagatacaagagacagaacgtagtcaaggacctgtccgtcgagctggatagactgagcgaagaatctgtgaacaacgacatctcctcctggacaaagggcagaagcggagaagctctgagcctcctgaagaaaagattctcccatagacccgtgcaggagaagttcgtgtgcctgaactgcggcttcgagacacacgcagccgagcaagccgccctgaacatcgccagatcctggctgttcctgcggagccaggagtacaagaaataccagacaaacaagacaaccggcaacaccgataagagagccttcgtcgagacctggcagtccttttaccggaagaagcttaaggaggtgtggaaacctgccgtgcggtctggcggatctggcggaggctccaccagccccaagaaaaagagaaaagtctaagctgccttctgcggggcttgccttctggccatgcccttcttctctcccttgcacctgtacctcttggtctttgaataaagcctgagtaggaaggctagcaaaaaaaaaaaaaaaaaaaaaaaaaaaaaaaaaaaaaaaaaaaaaaaaaaaaaaaaaaaaaaaaaaaaaaaaaaaaaaaa

SEQ ID NO: 12522 - RNA, 5785 nt, synthetic construct
  source 1..5785: mol_type = other RNA
aggaaataagagagaaaagaagagtaagaagaaatataagagccaccatggcccctaagaagaagcgtaaagtgagccggatggaacgcctcgtctacgaggtgcggcagaagtgcagaaacatcgaggacatctgcatctcctgcggatctctgaacgtgaccctggagcacccactgttcatcggcggcatgtgccagaactgtaaaaactgttttctggagtgtgcctatcaatacgacgatgacggctaccagagctactgcaccatctgttgcggcggaagagaggtgctgatgtgtggaaataacaactgctgccggtgcttctgcgtggaatgcgtggacctgctggtgggccccggcgccgcccaggccgctattaaggaagatccttggaactgctacatgtgcggccacaagggcacatacggcctgctgagacggagagaggactggcctagcagactgcagatgttcttcgccaataaccacgaccaggagttcgacccccctaaggtgtaccctcccgtccccgccgagaagagaaagcccatccgggtcctgagcctgttcgatggcatcgccaccggtctgctggtgctgaaggacctgggcatccaggtggataggtacattgcctccgaggtgtgcgaggactccatcaccgtgggaatggtgcgtcatcagggcaagatcatgtacgtgggcgacgtgcggagcgtgacacagaagcatatccaggagtggggccctttcgacctggtgatcggcggcagcccttgcaatgacctgagcatcgtgaacccagcccggaagggcctgtacgagggaaccggcagactgttcttcgagttttacagactgctgcacgacgcccggcctaaggaaggcgacgaccggcccttcttttggctgttcgagaatgtggtggccatgggagtcagcgacaagcgggatattagccggttcctggagagcaaccccgtgatgatcgatgccaaggaagtgagcgccgcccaccgggccagatacttctggggcaatctgcctggcatgaacagacccctggccagcaccgtgaacgacaagctggagctgcaggagtgcctggagcacggccggatcgccaagttcagcaaggtgagaaccatcaccacccgaagcaacagcatcaaacaaggcaaggaccagcactttcctgtgttcatgaacgagaaggaggacatcctgtggtgtaccgagatggagagagtgttcgggttcccagtccactacacagatgtcagcaacatgtctagactggccagacagagactgctgggaagaagctggtccgtccctgtgatcagacacctgttcgcccctctgaaggagtacttcgcctgcgtgagcagcggcaacagcaacgccaacagccggggccccagcttctctagcggcctggtgccactgtccctgagagggagccacatgggccccatggagatctacaaaaccgtgagcgcctggaagcggcagcctgtgcgcgtgctgagcctgtttcggaatatcgataaagtcctgaaaagcctgggattcctggagagcggctctggctccggcggtggcaccctgaagtacgtggaggatgtgacaaacgtggtcagacgggatgtggagaagtggggccccttcgatctggtgtacggcagcacccaacccctgggcagctcttgtgaccggtgccctggctggtacatgtttcagttccaccggatcctgcagtacgccctgccgagacaggagtcccagcggccattcttttggattttcatggacaacttgctgctgaccgaggatgaccaggaaactaccactcggttcctgcagaccgaagccgtgaccctgcaggacgtgagaggccgggactaccagaacgccatgcgggtgtggtccaacatccctggactgaaaagcaagcacgcacctctgacccctaaagaagaggagtacctgcaggcccaggtgcggagcagaagcaagctggacgcccctaaggtggatctgctggtgaagaattgcctcctgcccctgagagagtacttcaagtatttcagccagaatagtctgcccctgggaggcagcggcggcggcgccagggagagcgtgatgttcagcgacgtgagcatcgacttcagcctggaggagtgggagttcctgaacctggagcagagggacctgtacagggacgtgatgctggagaactacagcaacctggtgagcctgggctgcttcatcagcaagcccgacgtgatcagcctgctggagcagggcaaggagccctggaacgtggtgaggaagggcaggaggcagtaccccgacctggagaccaactacggcggcccaagcagcggcgcccctcctcccagcggcggcagcccagccggctccccaacctctaccgaggagggcacctctgagtccgccacccccgagagcggccctggcacctccaccgagcccagcgagggcagcgcacccggcagccctgccggcagccccacctccacagaggagggaaccagcaccgagcccagcgaaggcagcgccccaggcaccagcaccgagcctagtgagcaggagattaaacggatcaacaagatcagaagaagacttgtgaaagacagcaacaccaagaaggccggcaagacaggccccatgaaaaccctgctggttagagtgatgacacccgatctgagagagcggctggaaaacctgagaaagaagcctgaaaatatcccccagcccatcagcaatacatctagagccaacctgaataagctgctgaccgattacaccgaaatgaagaaggcgatcctgcatgtgtactgggaagagttccagaaggaccctgtgggcctgatgagccgggtggcccagcctgccagcaagaagatcgatcagaacaagctgaaacctgagatggacgagaagggcaacctgaccaccgccggctttgcctgctctcagtgtggccagcccctgttcgtgtacaagctggagcaggtgtctgagaagggcaaggcttacaccaactacttcggacggtgcaatgtggccgagcacgaaaagctgatcctgctggcccagctgaagcccgagaaggatagcgacgaagccgtgacatatagcctgggaaagtttgggcagagggccctggatttctacagcattcatgtgaccaaggagtccacccaccccgtgaagcccctggcccagatcgccggaaacagatacgcctccggacctgtgggaaaggccctgagcgacgcatgtatgggcacaatcgcctccttcctgtctaagtaccaggacatcatcatcgaacaccagaaggtggtgaagggcaaccagaagagactggagagcctgcgggagctggccggcaaggaaaacctggaataccctagcgtgaccctgccacctcagcctcacaccaaggagggcgttgatgcctacaacgaagtgatcgcccgggtgcgaatgtgggtgaacctgaacctgtggcagaagctgaagctaagcagagatgatgccaagcctctgctgagactgaagggattcccttcctttcctctggtcgagagacaggccaacgaagtggactggtgggacatggtgtgtaacgtgaagaagctgatcaacgagaaaaaggaggatggcaaggtgttttggcagaatctggctggctacaagagacaggaagccctgagaccatacctgagcagcgaggaagatcggaagaagggaaagaaattcgctcggtaccagctgggcgacctgctgctgcacctggaaaagaagcacggcgaggactggggaaaggtgtacgacgaggcctgggagcggattgacaagaaagtggaaggcctgagcaagcacatcaagctggaagaggaacggagaagcgaggacgcccagagcaaggccgccctgaccgactggctgcgggctaaggccagcttcgtgatcgagggcctgaaggaggccgacaaggacgagttctgcagatgcgagctgaagctgcagaagtggtacggggacctgcggggaaagcccttcgccatcgaagccgagaacagcatcctggacatcagcggcttcagcaagcagtacaactgtgccttcatctggcagaaggacggcgtgaagaagctgaacctgtacctgatcatcaactacttcaagggcggcaagctgcggttcaagaagatcaaacctgaagccttcgaagccaacagattctacaccgtgatcaacaaaaagagcggcgagatcgtgcccatggaggtgaacttcaacttcgacgaccccaacctgatcatcctgcctctggcctttggcaagagacagggcagagaattcatctggaacgacctgctgtccctggaaaccggcagcctgaagctggccaacggaagagtgatcgagaagacactgtacaacagaagaacccggcaggatgagcctgccctgttcgtggccctgaccttcgagcggcgggaggtcctggactcctccaatatcaaaccaatgaacctgatcggcgtggcaagaggcgaaaacatccccgccgtgatcgccctgaccgaccccgagggctgcccactgagccggtttaaggatagcctgggaaacccaacccacatcctgagaatcggcgagagctataaggagaagcagcggaccatccaggccaagaaggaggtggagcagcggagagccggcggctacagccggaagtacgccagcaaagccaagaatctggcagacgatatggtgagaaacaccgctagagatctgctgtactacgccgtgacccaggatgccatgctgatcttcgccaacctgagccggggcttcggccggcagggcaagcggaccttcatggccgagagacagtacacacggatggaggactggctgaccgccaagctggcctacgagggcctgagcaagacctacctgtccaagacactggcccagtacacctccaagacatgcagcaactgtgggtttaccatcaccagcgccgactacgacagggtgctggagaagctgaagaagacagcaacaggctggatgaccacaattaacggcaaggagctgaaggtggagggccagattacctactacaacagatacaagagacagaacgtagtcaaggacctgtccgtcgagctggatagactgagcgaagaatctgtgaacaacgacatctcctcctggacaaagggcagaagcggagaagctctgagcctcctgaagaaaagattctcccatagacccgtgcaggagaagttcgtgtgcctgaactgcggcttcgagacacacgcagccgagcaagccgccctgaacatcgccagatcctggctgttcctgcggagccaggagtacaagaaataccagacaaacaagacaaccggcaacaccgataagagagccttcgtcgagacctggcagtccttttaccggaagaagcttaaggaggtgtggaaacctgccgtgcggtctggcggatctggcggaggctccaccagccccaagaaaaagagaaaagtctaagctgccttctgcggggcttgccttctggccatgcccttcttctctcccttgcacctgtacctcttggtctttgaataaagcctgagtaggaaggctagcaaaaaaaaaaaaaaaaaaaaaaaaaaaaaaaaaaaaaaaaaaaaaaaaaaaaaaaaaaaaaaaaaaaaaaaaaaaaaaaa

SEQ ID NO: 12523 - RNA, 5785 nt, synthetic construct
  source 1..5785: mol_type = other RNA
aggaaataagagagaaaagaagagtaagaagaaatataagagccaccatggcccctaagaagaagcgtaaagtgagccggatggaacgcctcgtctacgaggtgcggcagaagtgcagaaacatcgaggacatctgcatctcctgcggatctctgaacgtgaccctggagcacccactgttcatcggcggcatgtgccagaactgtaaaaactgttttctggagtgtgcctatcaatacgacgatgacggctaccagagctactgcaccatctgttgcggcggaagagaggtgctgatgtgtggaaataacaactgctgccggtgcttctgcgtggaatgcgtggacctgctggtgggccccggcgccgcccaggccgctattaaggaagatccttggaactgctacatgtgcggccacaagggcacatacggcctgctgagacggagagaggactggcctagcagactgcagatgttcttcgccaataaccacgaccaggagttcgacccccctaaggtgtaccctcccgtccccgccgagaagagaaagcccatccgggtcctgagcctgttcgatggcatcgccaccggtctgctggtgctgaaggacctgggcatccaggtggataggtacattgcctccgaggtgtgcgaggactccatcaccgtgggaatggtgcgtcatcagggcaagatcatgtacgtgggcgacgtgcggagcgtgacacagaagcatatccaggagtggggccctttcgacctggtgatcggcggcagcccttgcaatgacctgagcatcgtgaacccagcccggaagggcctgtacgagggaaccggcagactgttcttcgagttttacagactgctgcacgacgcccggcctaaggaaggcgacgaccggcccttcttttggctgttcgagaatgtggtggccatgggagtcagcgacaagcgggatattagccggttcctggagagcaaccccgtgatgatcgatgccaaggaagtgagcgccgcccaccgggccagatacttctggggcaatctgcctggcatgaacagacccctggccagcaccgtgaacgacaagctggagctgcaggagtgcctggagcacggccggatcgccaagttcagcaaggtgagaaccatcaccacccgaagcaacagcatcaaacaaggcaaggaccagcactttcctgtgttcatgaacgagaaggaggacatcctgtggtgtaccgagatggagagagtgttcgggttcccagtccactacacagatgtcagcaacatgtctagactggccagacagagactgctgggaagaagctggtccgtccctgtgatcagacacctgttcgcccctctgaaggagtacttcgcctgcgtgagcagcggcaacagcaacgccaacagccggggccccagcttctctagcggcctggtgccactgtccctgagagggagccacatgggccccatggagatctacaaaaccgtgagcgcctggaagcggcagcctgtgcgcgtgctgagcctgtttcggaatatcgataaagtcctgaaaagcctgggattcctggagagcggctctggctccggcggtggcaccctgaagtacgtggaggatgtgacaaacgtggtcagacgggatgtggagaagtggggccccttcgatctggtgtacggcagcacccaacccctgggcagctcttgtgaccggtgccctggctggtacatgtttcagttccaccggatcctgcagtacgccctgccgagacaggagtcccagcggccattcttttggattttcatggacaacttgctgctgaccgaggatgaccaggaaactaccactcggttcctgcagaccgaagccgtgaccctgcaggacgtgagaggccgggactaccagaacgccatgcgggtgtggtccaacatccctggactgaaaagcaagcacgcacctctgacccctaaagaagaggagtacctgcaggcccaggtgcggagcagaagcaagctggacgcccctaaggtggatctgctggtgaagaattgcctcctgcccctgagagagtacttcaagtatttcagccagaatagtctgcccctgggaggcagcggcggcggctgccaggagaccctgaccttcaaggacgtggccgtggacttcaccagggaggagtggggccacctgggccccgcccagagggacctgtacaaggaggtgatgctggacaactacaggaacctggtgagcctgggcctgcaggtgagcaagcccgacgtgatcttccagctggagaggggcgagagccccagcatgctggagggcaaggacagcagcgacccctgccccgagttcctgagccagggcggcccaagcagcggcgcccctcctcccagcggcggcagcccagccggctccccaacctctaccgaggagggcacctctgagtccgccacccccgagagcggccctggcacctccaccgagcccagcgagggcagcgcacccggcagccctgccggcagccccacctccacagaggagggaaccagcaccgagcccagcgaaggcagcgccccaggcaccagcaccgagcctagtgagcaggagattaaacggatcaacaagatcagaagaagacttgtgaaagacagcaacaccaagaaggccggcaagacaggccccatgaaaaccctgctggttagagtgatgacacccgatctgagagagcggctggaaaacctgagaaagaagcctgaaaatatcccccagcccatcagcaatacatctagagccaacctgaataagctgctgaccgattacaccgaaatgaagaaggcgatcctgcatgtgtactgggaagagttccagaaggaccctgtgggcctgatgagccgggtggcccagcctgccagcaagaagatcgatcagaacaagctgaaacctgagatggacgagaagggcaacctgaccaccgccggctttgcctgctctcagtgtggccagcccctgttcgtgtacaagctggagcaggtgtctgagaagggcaaggcttacaccaactacttcggacggtgcaatgtggccgagcacgaaaagctgatcctgctggcccagctgaagcccgagaaggatagcgacgaagccgtgacatatagcctgggaaagtttgggcagagggccctggatttctacagcattcatgtgaccaaggagtccacccaccccgtgaagcccctggcccagatcgccggaaacagatacgcctccggacctgtgggaaaggccctgagcgacgcatgtatgggcacaatcgcctccttcctgtctaagtaccaggacatcatcatcgaacaccagaaggtggtgaagggcaaccagaagagactggagagcctgcgggagctggccggcaaggaaaacctggaataccctagcgtgaccctgccacctcagcctcacaccaaggagggcgttgatgcctacaacgaagtgatcgcccgggtgcgaatgtgggtgaacctgaacctgtggcagaagctgaagctaagcagagatgatgccaagcctctgctgagactgaagggattcccttcctttcctctggtcgagagacaggccaacgaagtggactggtgggacatggtgtgtaacgtgaagaagctgatcaacgagaaaaaggaggatggcaaggtgttttggcagaatctggctggctacaagagacaggaagccctgagaccatacctgagcagcgaggaagatcggaagaagggaaagaaattcgctcggtaccagctgggcgacctgctgctgcacctggaaaagaagcacggcgaggactggggaaaggtgtacgacgaggcctgggagcggattgacaagaaagtggaaggcctgagcaagcacatcaagctggaagaggaacggagaagcgaggacgcccagagcaaggccgccctgaccgactggctgcgggctaaggccagcttcgtgatcgagggcctgaaggaggccgacaaggacgagttctgcagatgcgagctgaagctgcagaagtggtacggggacctgcggggaaagcccttcgccatcgaagccgagaacagcatcctggacatcagcggcttcagcaagcagtacaactgtgccttcatctggcagaaggacggcgtgaagaagctgaacctgtacctgatcatcaactacttcaagggcggcaagctgcggttcaagaagatcaaacctgaagccttcgaagccaacagattctacaccgtgatcaacaaaaagagcggcgagatcgtgcccatggaggtgaacttcaacttcgacgaccccaacctgatcatcctgcctctggcctttggcaagagacagggcagagaattcatctggaacgacctgctgtccctggaaaccggcagcctgaagctggccaacggaagagtgatcgagaagacactgtacaacagaagaacccggcaggatgagcctgccctgttcgtggccctgaccttcgagcggcgggaggtcctggactcctccaatatcaaaccaatgaacctgatcggcgtggcaagaggcgaaaacatccccgccgtgatcgccctgaccgaccccgagggctgcccactgagccggtttaaggatagcctgggaaacccaacccacatcctgagaatcggcgagagctataaggagaagcagcggaccatccaggccaagaaggaggtggagcagcggagagccggcggctacagccggaagtacgccagcaaagccaagaatctggcagacgatatggtgagaaacaccgctagagatctgctgtactacgccgtgacccaggatgccatgctgatcttcgccaacctgagccggggcttcggccggcagggcaagcggaccttcatggccgagagacagtacacacggatggaggactggctgaccgccaagctggcctacgagggcctgagcaagacctacctgtccaagacactggcccagtacacctccaagacatgcagcaactgtgggtttaccatcaccagcgccgactacgacagggtgctggagaagctgaagaagacagcaacaggctggatgaccacaattaacggcaaggagctgaaggtggagggccagattacctactacaacagatacaagagacagaacgtagtcaaggacctgtccgtcgagctggatagactgagcgaagaatctgtgaacaacgacatctcctcctggacaaagggcagaagcggagaagctctgagcctcctgaagaaaagattctcccatagacccgtgcaggagaagttcgtgtgcctgaactgcggcttcgagacacacgcagccgagcaagccgccctgaacatcgccagatcctggctgttcctgcggagccaggagtacaagaaataccagacaaacaagacaaccggcaacaccgataagagagccttcgtcgagacctggcagtccttttaccggaagaagcttaaggaggtgtggaaacctgccgtgcggtctggcggatctggcggaggctccaccagccccaagaaaaagagaaaagtctaagctgccttctgcggggcttgccttctggccatgcccttcttctctcccttgcacctgtacctcttggtctttgaataaagcctgagtaggaaggctagcaaaaaaaaaaaaaaaaaaaaaaaaaaaaaaaaaaaaaaaaaaaaaaaaaaaaaaaaaaaaaaaaaaaaaaaaaaaaaaaa

SEQ ID NO: 12524 - RNA, 5785 nt, synthetic construct
  source 1..5785: mol_type = other RNA
aggaaataagagagaaaagaagagtaagaagaaatataagagccaccatggcccctaagaagaagcgtaaagtgagccggatggaacgcctcgtctacgaggtgcggcagaagtgcagaaacatcgaggacatctgcatctcctgcggatctctgaacgtgaccctggagcacccactgttcatcggcggcatgtgccagaactgtaaaaactgttttctggagtgtgcctatcaatacgacgatgacggctaccagagctactgcaccatctgttgcggcggaagagaggtgctgatgtgtggaaataacaactgctgccggtgcttctgcgtggaatgcgtggacctgctggtgggccccggcgccgcccaggccgctattaaggaagatccttggaactgctacatgtgcggccacaagggcacatacggcctgctgagacggagagaggactggcctagcagactgcagatgttcttcgccaataaccacgaccaggagttcgacccccctaaggtgtaccctcccgtccccgccgagaagagaaagcccatccgggtcctgagcctgttcgatggcatcgccaccggtctgctggtgctgaaggacctgggcatccaggtggataggtacattgcctccgaggtgtgcgaggactccatcaccgtgggaatggtgcgtcatcagggcaagatcatgtacgtgggcgacgtgcggagcgtgacacagaagcatatccaggagtggggccctttcgacctggtgatcggcggcagcccttgcaatgacctgagcatcgtgaacccagcccggaagggcctgtacgagggaaccggcagactgttcttcgagttttacagactgctgcacgacgcccggcctaaggaaggcgacgaccggcccttcttttggctgttcgagaatgtggtggccatgggagtcagcgacaagcgggatattagccggttcctggagagcaaccccgtgatgatcgatgccaaggaagtgagcgccgcccaccgggccagatacttctggggcaatctgcctggcatgaacagacccctggccagcaccgtgaacgacaagctggagctgcaggagtgcctggagcacggccggatcgccaagttcagcaaggtgagaaccatcaccacccgaagcaacagcatcaaacaaggcaaggaccagcactttcctgtgttcatgaacgagaaggaggacatcctgtggtgtaccgagatggagagagtgttcgggttcccagtccactacacagatgtcagcaacatgtctagactggccagacagagactgctgggaagaagctggtccgtccctgtgatcagacacctgttcgcccctctgaaggagtacttcgcctgcgtgagcagcggcaacagcaacgccaacagccggggccccagcttctctagcggcctggtgccactgtccctgagagggagccacatgggccccatggagatctacaaaaccgtgagcgcctggaagcggcagcctgtgcgcgtgctgagcctgtttcggaatatcgataaagtcctgaaaagcctgggattcctggagagcggctctggctccggcggtggcaccctgaagtacgtggaggatgtgacaaacgtggtcagacgggatgtggagaagtggggccccttcgatctggtgtacggcagcacccaacccctgggcagctcttgtgaccggtgccctggctggtacatgtttcagttccaccggatcctgcagtacgccctgccgagacaggagtcccagcggccattcttttggattttcatggacaacttgctgctgaccgaggatgaccaggaaactaccactcggttcctgcagaccgaagccgtgaccctgcaggacgtgagaggccgggactaccagaacgccatgcgggtgtggtccaacatccctggactgaaaagcaagcacgcacctctgacccctaaagaagaggagtacctgcaggcccaggtgcggagcagaagcaagctggacgcccctaaggtggatctgctggtgaagaattgcctcctgcccctgagagagtacttcaagtatttcagccagaatagtctgcccctgggaggcagcggcggcggcaagcccggcgtgctgaccttcgccgacgtggccgtgtacttcagcagcgaggagtggggctgcctgaggcccgcccagagggccctgtacagggacgtgatgagggagacctacggccacctgggcgccctgggctgcgccggccccaagcccgccctgatcagctggctggagaggaacaccgacgactgggagcccgccgccctggacccccaggagtgccccaagagggtgaccgtgcagggcggcccaagcagcggcgcccctcctcccagcggcggcagcccagccggctccccaacctctaccgaggagggcacctctgagtccgccacccccgagagcggccctggcacctccaccgagcccagcgagggcagcgcacccggcagccctgccggcagccccacctccacagaggagggaaccagcaccgagcccagcgaaggcagcgccccaggcaccagcaccgagcctagtgagcaggagattaaacggatcaacaagatcagaagaagacttgtgaaagacagcaacaccaagaaggccggcaagacaggccccatgaaaaccctgctggttagagtgatgacacccgatctgagagagcggctggaaaacctgagaaagaagcctgaaaatatcccccagcccatcagcaatacatctagagccaacctgaataagctgctgaccgattacaccgaaatgaagaaggcgatcctgcatgtgtactgggaagagttccagaaggaccctgtgggcctgatgagccgggtggcccagcctgccagcaagaagatcgatcagaacaagctgaaacctgagatggacgagaagggcaacctgaccaccgccggctttgcctgctctcagtgtggccagcccctgttcgtgtacaagctggagcaggtgtctgagaagggcaaggcttacaccaactacttcggacggtgcaatgtggccgagcacgaaaagctgatcctgctggcccagctgaagcccgagaaggatagcgacgaagccgtgacatatagcctgggaaagtttgggcagagggccctggatttctacagcattcatgtgaccaaggagtccacccaccccgtgaagcccctggcccagatcgccggaaacagatacgcctccggacctgtgggaaaggccctgagcgacgcatgtatgggcacaatcgcctccttcctgtctaagtaccaggacatcatcatcgaacaccagaaggtggtgaagggcaaccagaagagactggagagcctgcgggagctggccggcaaggaaaacctggaataccctagcgtgaccctgccacctcagcctcacaccaaggagggcgttgatgcctacaacgaagtgatcgcccgggtgcgaatgtgggtgaacctgaacctgtggcagaagctgaagctaagcagagatgatgccaagcctctgctgagactgaagggattcccttcctttcctctggtcgagagacaggccaacgaagtggactggtgggacatggtgtgtaacgtgaagaagctgatcaacgagaaaaaggaggatggcaaggtgttttggcagaatctggctggctacaagagacaggaagccctgagaccatacctgagcagcgaggaagatcggaagaagggaaagaaattcgctcggtaccagctgggcgacctgctgctgcacctggaaaagaagcacggcgaggactggggaaaggtgtacgacgaggcctgggagcggattgacaagaaagtggaaggcctgagcaagcacatcaagctggaagaggaacggagaagcgaggacgcccagagcaaggccgccctgaccgactggctgcgggctaaggccagcttcgtgatcgagggcctgaaggaggccgacaaggacgagttctgcagatgcgagctgaagctgcagaagtggtacggggacctgcggggaaagcccttcgccatcgaagccgagaacagcatcctggacatcagcggcttcagcaagcagtacaactgtgccttcatctggcagaaggacggcgtgaagaagctgaacctgtacctgatcatcaactacttcaagggcggcaagctgcggttcaagaagatcaaacctgaagccttcgaagccaacagattctacaccgtgatcaacaaaaagagcggcgagatcgtgcccatggaggtgaacttcaacttcgacgaccccaacctgatcatcctgcctctggcctttggcaagagacagggcagagaattcatctggaacgacctgctgtccctggaaaccggcagcctgaagctggccaacggaagagtgatcgagaagacactgtacaacagaagaacccggcaggatgagcctgccctgttcgtggccctgaccttcgagcggcgggaggtcctggactcctccaatatcaaaccaatgaacctgatcggcgtggcaagaggcgaaaacatccccgccgtgatcgccctgaccgaccccgagggctgcccactgagccggtttaaggatagcctgggaaacccaacccacatcctgagaatcggcgagagctataaggagaagcagcggaccatccaggccaagaaggaggtggagcagcggagagccggcggctacagccggaagtacgccagcaaagccaagaatctggcagacgatatggtgagaaacaccgctagagatctgctgtactacgccgtgacccaggatgccatgctgatcttcgccaacctgagccggggcttcggccggcagggcaagcggaccttcatggccgagagacagtacacacggatggaggactggctgaccgccaagctggcctacgagggcctgagcaagacctacctgtccaagacactggcccagtacacctccaagacatgcagcaactgtgggtttaccatcaccagcgccgactacgacagggtgctggagaagctgaagaagacagcaacaggctggatgaccacaattaacggcaaggagctgaaggtggagggccagattacctactacaacagatacaagagacagaacgtagtcaaggacctgtccgtcgagctggatagactgagcgaagaatctgtgaacaacgacatctcctcctggacaaagggcagaagcggagaagctctgagcctcctgaagaaaagattctcccatagacccgtgcaggagaagttcgtgtgcctgaactgcggcttcgagacacacgcagccgagcaagccgccctgaacatcgccagatcctggctgttcctgcggagccaggagtacaagaaataccagacaaacaagacaaccggcaacaccgataagagagccttcgtcgagacctggcagtccttttaccggaagaagcttaaggaggtgtggaaacctgccgtgcggtctggcggatctggcggaggctccaccagccccaagaaaaagagaaaagtctaagctgccttctgcggggcttgccttctggccatgcccttcttctctcccttgcacctgtacctcttggtctttgaataaagcctgagtaggaaggctagcaaaaaaaaaaaaaaaaaaaaaaaaaaaaaaaaaaaaaaaaaaaaaaaaaaaaaaaaaaaaaaaaaaaaaaaaaaaaaaaa

SEQ ID NO: 12525 - RNA, 5785 nt, synthetic construct
  source 1..5785: mol_type = other RNA
aggaaataagagagaaaagaagagtaagaagaaatataagagccaccatggcccctaagaagaagcgtaaagtgagccggatggaacgcctcgtctacgaggtgcggcagaagtgcagaaacatcgaggacatctgcatctcctgcggatctctgaacgtgaccctggagcacccactgttcatcggcggcatgtgccagaactgtaaaaactgttttctggagtgtgcctatcaatacgacgatgacggctaccagagctactgcaccatctgttgcggcggaagagaggtgctgatgtgtggaaataacaactgctgccggtgcttctgcgtggaatgcgtggacctgctggtgggccccggcgccgcccaggccgctattaaggaagatccttggaactgctacatgtgcggccacaagggcacatacggcctgctgagacggagagaggactggcctagcagactgcagatgttcttcgccaataaccacgaccaggagttcgacccccctaaggtgtaccctcccgtccccgccgagaagagaaagcccatccgggtcctgagcctgttcgatggcatcgccaccggtctgctggtgctgaaggacctgggcatccaggtggataggtacattgcctccgaggtgtgcgaggactccatcaccgtgggaatggtgcgtcatcagggcaagatcatgtacgtgggcgacgtgcggagcgtgacacagaagcatatccaggagtggggccctttcgacctggtgatcggcggcagcccttgcaatgacctgagcatcgtgaacccagcccggaagggcctgtacgagggaaccggcagactgttcttcgagttttacagactgctgcacgacgcccggcctaaggaaggcgacgaccggcccttcttttggctgttcgagaatgtggtggccatgggagtcagcgacaagcgggatattagccggttcctggagagcaaccccgtgatgatcgatgccaaggaagtgagcgccgcccaccgggccagatacttctggggcaatctgcctggcatgaacagacccctggccagcaccgtgaacgacaagctggagctgcaggagtgcctggagcacggccggatcgccaagttcagcaaggtgagaaccatcaccacccgaagcaacagcatcaaacaaggcaaggaccagcactttcctgtgttcatgaacgagaaggaggacatcctgtggtgtaccgagatggagagagtgttcgggttcccagtccactacacagatgtcagcaacatgtctagactggccagacagagactgctgggaagaagctggtccgtccctgtgatcagacacctgttcgcccctctgaaggagtacttcgcctgcgtgagcagcggcaacagcaacgccaacagccggggccccagcttctctagcggcctggtgccactgtccctgagagggagccacatgggccccatggagatctacaaaaccgtgagcgcctggaagcggcagcctgtgcgcgtgctgagcctgtttcggaatatcgataaagtcctgaaaagcctgggattcctggagagcggctctggctccggcggtggcaccctgaagtacgtggaggatgtgacaaacgtggtcagacgggatgtggagaagtggggccccttcgatctggtgtacggcagcacccaacccctgggcagctcttgtgaccggtgccctggctggtacatgtttcagttccaccggatcctgcagtacgccctgccgagacaggagtcccagcggccattcttttggattttcatggacaacttgctgctgaccgaggatgaccaggaaactaccactcggttcctgcagaccgaagccgtgaccctgcaggacgtgagaggccgggactaccagaacgccatgcgggtgtggtccaacatccctggactgaaaagcaagcacgcacctctgacccctaaagaagaggagtacctgcaggcccaggtgcggagcagaagcaagctggacgcccctaaggtggatctgctggtgaagaattgcctcctgcccctgagagagtacttcaagtatttcagccagaatagtctgcccctgggaggcagcggcggcggccagccccaggaggccgtgaccttcaaggacgtggaggtgaccttcagccaggacgagtggggctggctggacgccagccagaggaacctgtacagggacgtgatgctggagaactacggcaacgtgaccagcctggtgggccccttcaccaagcccgccctgatcagctggctggaggccagggagccctggggcctgaacgtgcagggcgcccaccccaagggcagccccagcgccgcccccggcggcccaagcagcggcgcccctcctcccagcggcggcagcccagccggctccccaacctctaccgaggagggcacctctgagtccgccacccccgagagcggccctggcacctccaccgagcccagcgagggcagcgcacccggcagccctgccggcagccccacctccacagaggagggaaccagcaccgagcccagcgaaggcagcgccccaggcaccagcaccgagcctagtgagcaggagattaaacggatcaacaagatcagaagaagacttgtgaaagacagcaacaccaagaaggccggcaagacaggccccatgaaaaccctgctggttagagtgatgacacccgatctgagagagcggctggaaaacctgagaaagaagcctgaaaatatcccccagcccatcagcaatacatctagagccaacctgaataagctgctgaccgattacaccgaaatgaagaaggcgatcctgcatgtgtactgggaagagttccagaaggaccctgtgggcctgatgagccgggtggcccagcctgccagcaagaagatcgatcagaacaagctgaaacctgagatggacgagaagggcaacctgaccaccgccggctttgcctgctctcagtgtggccagcccctgttcgtgtacaagctggagcaggtgtctgagaagggcaaggcttacaccaactacttcggacggtgcaatgtggccgagcacgaaaagctgatcctgctggcccagctgaagcccgagaaggatagcgacgaagccgtgacatatagcctgggaaagtttgggcagagggccctggatttctacagcattcatgtgaccaaggagtccacccaccccgtgaagcccctggcccagatcgccggaaacagatacgcctccggacctgtgggaaaggccctgagcgacgcatgtatgggcacaatcgcctccttcctgtctaagtaccaggacatcatcatcgaacaccagaaggtggtgaagggcaaccagaagagactggagagcctgcgggagctggccggcaaggaaaacctggaataccctagcgtgaccctgccacctcagcctcacaccaaggagggcgttgatgcctacaacgaagtgatcgcccgggtgcgaatgtgggtgaacctgaacctgtggcagaagctgaagctaagcagagatgatgccaagcctctgctgagactgaagggattcccttcctttcctctggtcgagagacaggccaacgaagtggactggtgggacatggtgtgtaacgtgaagaagctgatcaacgagaaaaaggaggatggcaaggtgttttggcagaatctggctggctacaagagacaggaagccctgagaccatacctgagcagcgaggaagatcggaagaagggaaagaaattcgctcggtaccagctgggcgacctgctgctgcacctggaaaagaagcacggcgaggactggggaaaggtgtacgacgaggcctgggagcggattgacaagaaagtggaaggcctgagcaagcacatcaagctggaagaggaacggagaagcgaggacgcccagagcaaggccgccctgaccgactggctgcgggctaaggccagcttcgtgatcgagggcctgaaggaggccgacaaggacgagttctgcagatgcgagctgaagctgcagaagtggtacggggacctgcggggaaagcccttcgccatcgaagccgagaacagcatcctggacatcagcggcttcagcaagcagtacaactgtgccttcatctggcagaaggacggcgtgaagaagctgaacctgtacctgatcatcaactacttcaagggcggcaagctgcggttcaagaagatcaaacctgaagccttcgaagccaacagattctacaccgtgatcaacaaaaagagcggcgagatcgtgcccatggaggtgaacttcaacttcgacgaccccaacctgatcatcctgcctctggcctttggcaagagacagggcagagaattcatctggaacgacctgctgtccctggaaaccggcagcctgaagctggccaacggaagagtgatcgagaagacactgtacaacagaagaacccggcaggatgagcctgccctgttcgtggccctgaccttcgagcggcgggaggtcctggactcctccaatatcaaaccaatgaacctgatcggcgtggcaagaggcgaaaacatccccgccgtgatcgccctgaccgaccccgagggctgcccactgagccggtttaaggatagcctgggaaacccaacccacatcctgagaatcggcgagagctataaggagaagcagcggaccatccaggccaagaaggaggtggagcagcggagagccggcggctacagccggaagtacgccagcaaagccaagaatctggcagacgatatggtgagaaacaccgctagagatctgctgtactacgccgtgacccaggatgccatgctgatcttcgccaacctgagccggggcttcggccggcagggcaagcggaccttcatggccgagagacagtacacacggatggaggactggctgaccgccaagctggcctacgagggcctgagcaagacctacctgtccaagacactggcccagtacacctccaagacatgcagcaactgtgggtttaccatcaccagcgccgactacgacagggtgctggagaagctgaagaagacagcaacaggctggatgaccacaattaacggcaaggagctgaaggtggagggccagattacctactacaacagatacaagagacagaacgtagtcaaggacctgtccgtcgagctggatagactgagcgaagaatctgtgaacaacgacatctcctcctggacaaagggcagaagcggagaagctctgagcctcctgaagaaaagattctcccatagacccgtgcaggagaagttcgtgtgcctgaactgcggcttcgagacacacgcagccgagcaagccgccctgaacatcgccagatcctggctgttcctgcggagccaggagtacaagaaataccagacaaacaagacaaccggcaacaccgataagagagccttcgtcgagacctggcagtccttttaccggaagaagcttaaggaggtgtggaaacctgccgtgcggtctggcggatctggcggaggctccaccagccccaagaaaaagagaaaagtctaagctgccttctgcggggcttgccttctggccatgcccttcttctctcccttgcacctgtacctcttggtctttgaataaagcctgagtaggaaggctagcaaaaaaaaaaaaaaaaaaaaaaaaaaaaaaaaaaaaaaaaaaaaaaaaaaaaaaaaaaaaaaaaaaaaaaaaaaaaaaaa

SEQ ID NO: 12526 - RNA, 5785 nt, synthetic construct
  source 1..5785: mol_type = other RNA
aggaaataagagagaaaagaagagtaagaagaaatataagagccaccatggcccctaagaagaagcgtaaagtgagccggatggaacgcctcgtctacgaggtgcggcagaagtgcagaaacatcgaggacatctgcatctcctgcggatctctgaacgtgaccctggagcacccactgttcatcggcggcatgtgccagaactgtaaaaactgttttctggagtgtgcctatcaatacgacgatgacggctaccagagctactgcaccatctgttgcggcggaagagaggtgctgatgtgtggaaataacaactgctgccggtgcttctgcgtggaatgcgtggacctgctggtgggccccggcgccgcccaggccgctattaaggaagatccttggaactgctacatgtgcggccacaagggcacatacggcctgctgagacggagagaggactggcctagcagactgcagatgttcttcgccaataaccacgaccaggagttcgacccccctaaggtgtaccctcccgtccccgccgagaagagaaagcccatccgggtcctgagcctgttcgatggcatcgccaccggtctgctggtgctgaaggacctgggcatccaggtggataggtacattgcctccgaggtgtgcgaggactccatcaccgtgggaatggtgcgtcatcagggcaagatcatgtacgtgggcgacgtgcggagcgtgacacagaagcatatccaggagtggggccctttcgacctggtgatcggcggcagcccttgcaatgacctgagcatcgtgaacccagcccggaagggcctgtacgagggaaccggcagactgttcttcgagttttacagactgctgcacgacgcccggcctaaggaaggcgacgaccggcccttcttttggctgttcgagaatgtggtggccatgggagtcagcgacaagcgggatattagccggttcctggagagcaaccccgtgatgatcgatgccaaggaagtgagcgccgcccaccgggccagatacttctggggcaatctgcctggcatgaacagacccctggccagcaccgtgaacgacaagctggagctgcaggagtgcctggagcacggccggatcgccaagttcagcaaggtgagaaccatcaccacccgaagcaacagcatcaaacaaggcaaggaccagcactttcctgtgttcatgaacgagaaggaggacatcctgtggtgtaccgagatggagagagtgttcgggttcccagtccactacacagatgtcagcaacatgtctagactggccagacagagactgctgggaagaagctggtccgtccctgtgatcagacacctgttcgcccctctgaaggagtacttcgcctgcgtgagcagcggcaacagcaacgccaacagccggggccccagcttctctagcggcctggtgccactgtccctgagagggagccacatgggccccatggagatctacaaaaccgtgagcgcctggaagcggcagcctgtgcgcgtgctgagcctgtttcggaatatcgataaagtcctgaaaagcctgggattcctggagagcggctctggctccggcggtggcaccctgaagtacgtggaggatgtgacaaacgtggtcagacgggatgtggagaagtggggccccttcgatctggtgtacggcagcacccaacccctgggcagctcttgtgaccggtgccctggctggtacatgtttcagttccaccggatcctgcagtacgccctgccgagacaggagtcccagcggccattcttttggattttcatggacaacttgctgctgaccgaggatgaccaggaaactaccactcggttcctgcagaccgaagccgtgaccctgcaggacgtgagaggccgggactaccagaacgccatgcgggtgtggtccaacatccctggactgaaaagcaagcacgcacctctgacccctaaagaagaggagtacctgcaggcccaggtgcggagcagaagcaagctggacgcccctaaggtggatctgctggtgaagaattgcctcctgcccctgagagagtacttcaagtatttcagccagaatagtctgcccctgggaggcagcggcggcggcagccaggagcccgtgaccttcgaggacgtggccgtgtacttcacccagaaccagtgggccagcctggaccccatgcagagggccctgtacctggaggtgatgctggagaactacgccaacatcaccagcctggccctgcccttccccaagcccgacctgatcctgcagctggagcagggcgaggccccctggggcctggacccctggacccccctggacggcgaggccctgggcggcgtgcacggcggcccaagcagcggcgcccctcctcccagcggcggcagcccagccggctccccaacctctaccgaggagggcacctctgagtccgccacccccgagagcggccctggcacctccaccgagcccagcgagggcagcgcacccggcagccctgccggcagccccacctccacagaggagggaaccagcaccgagcccagcgaaggcagcgccccaggcaccagcaccgagcctagtgagcaggagattaaacggatcaacaagatcagaagaagacttgtgaaagacagcaacaccaagaaggccggcaagacaggccccatgaaaaccctgctggttagagtgatgacacccgatctgagagagcggctggaaaacctgagaaagaagcctgaaaatatcccccagcccatcagcaatacatctagagccaacctgaataagctgctgaccgattacaccgaaatgaagaaggcgatcctgcatgtgtactgggaagagttccagaaggaccctgtgggcctgatgagccgggtggcccagcctgccagcaagaagatcgatcagaacaagctgaaacctgagatggacgagaagggcaacctgaccaccgccggctttgcctgctctcagtgtggccagcccctgttcgtgtacaagctggagcaggtgtctgagaagggcaaggcttacaccaactacttcggacggtgcaatgtggccgagcacgaaaagctgatcctgctggcccagctgaagcccgagaaggatagcgacgaagccgtgacatatagcctgggaaagtttgggcagagggccctggatttctacagcattcatgtgaccaaggagtccacccaccccgtgaagcccctggcccagatcgccggaaacagatacgcctccggacctgtgggaaaggccctgagcgacgcatgtatgggcacaatcgcctccttcctgtctaagtaccaggacatcatcatcgaacaccagaaggtggtgaagggcaaccagaagagactggagagcctgcgggagctggccggcaaggaaaacctggaataccctagcgtgaccctgccacctcagcctcacaccaaggagggcgttgatgcctacaacgaagtgatcgcccgggtgcgaatgtgggtgaacctgaacctgtggcagaagctgaagctaagcagagatgatgccaagcctctgctgagactgaagggattcccttcctttcctctggtcgagagacaggccaacgaagtggactggtgggacatggtgtgtaacgtgaagaagctgatcaacgagaaaaaggaggatggcaaggtgttttggcagaatctggctggctacaagagacaggaagccctgagaccatacctgagcagcgaggaagatcggaagaagggaaagaaattcgctcggtaccagctgggcgacctgctgctgcacctggaaaagaagcacggcgaggactggggaaaggtgtacgacgaggcctgggagcggattgacaagaaagtggaaggcctgagcaagcacatcaagctggaagaggaacggagaagcgaggacgcccagagcaaggccgccctgaccgactggctgcgggctaaggccagcttcgtgatcgagggcctgaaggaggccgacaaggacgagttctgcagatgcgagctgaagctgcagaagtggtacggggacctgcggggaaagcccttcgccatcgaagccgagaacagcatcctggacatcagcggcttcagcaagcagtacaactgtgccttcatctggcagaaggacggcgtgaagaagctgaacctgtacctgatcatcaactacttcaagggcggcaagctgcggttcaagaagatcaaacctgaagccttcgaagccaacagattctacaccgtgatcaacaaaaagagcggcgagatcgtgcccatggaggtgaacttcaacttcgacgaccccaacctgatcatcctgcctctggcctttggcaagagacagggcagagaattcatctggaacgacctgctgtccctggaaaccggcagcctgaagctggccaacggaagagtgatcgagaagacactgtacaacagaagaacccggcaggatgagcctgccctgttcgtggccctgaccttcgagcggcgggaggtcctggactcctccaatatcaaaccaatgaacctgatcggcgtggcaagaggcgaaaacatccccgccgtgatcgccctgaccgaccccgagggctgcccactgagccggtttaaggatagcctgggaaacccaacccacatcctgagaatcggcgagagctataaggagaagcagcggaccatccaggccaagaaggaggtggagcagcggagagccggcggctacagccggaagtacgccagcaaagccaagaatctggcagacgatatggtgagaaacaccgctagagatctgctgtactacgccgtgacccaggatgccatgctgatcttcgccaacctgagccggggcttcggccggcagggcaagcggaccttcatggccgagagacagtacacacggatggaggactggctgaccgccaagctggcctacgagggcctgagcaagacctacctgtccaagacactggcccagtacacctccaagacatgcagcaactgtgggtttaccatcaccagcgccgactacgacagggtgctggagaagctgaagaagacagcaacaggctggatgaccacaattaacggcaaggagctgaaggtggagggccagattacctactacaacagatacaagagacagaacgtagtcaaggacctgtccgtcgagctggatagactgagcgaagaatctgtgaacaacgacatctcctcctggacaaagggcagaagcggagaagctctgagcctcctgaagaaaagattctcccatagacccgtgcaggagaagttcgtgtgcctgaactgcggcttcgagacacacgcagccgagcaagccgccctgaacatcgccagatcctggctgttcctgcggagccaggagtacaagaaataccagacaaacaagacaaccggcaacaccgataagagagccttcgtcgagacctggcagtccttttaccggaagaagcttaaggaggtgtggaaacctgccgtgcggtctggcggatctggcggaggctccaccagccccaagaaaaagagaaaagtctaagctgccttctgcggggcttgccttctggccatgcccttcttctctcccttgcacctgtacctcttggtctttgaataaagcctgagtaggaaggctagcaaaaaaaaaaaaaaaaaaaaaaaaaaaaaaaaaaaaaaaaaaaaaaaaaaaaaaaaaaaaaaaaaaaaaaaaaaaaaaaa

SEQ ID NO: 12527 - RNA, 5785 nt, synthetic construct
  source 1..5785: mol_type = other RNA
aggaaataagagagaaaagaagagtaagaagaaatataagagccaccatggcccctaagaagaagcgtaaagtgagccggatggaacgcctcgtctacgaggtgcggcagaagtgcagaaacatcgaggacatctgcatctcctgcggatctctgaacgtgaccctggagcacccactgttcatcggcggcatgtgccagaactgtaaaaactgttttctggagtgtgcctatcaatacgacgatgacggctaccagagctactgcaccatctgttgcggcggaagagaggtgctgatgtgtggaaataacaactgctgccggtgcttctgcgtggaatgcgtggacctgctggtgggccccggcgccgcccaggccgctattaaggaagatccttggaactgctacatgtgcggccacaagggcacatacggcctgctgagacggagagaggactggcctagcagactgcagatgttcttcgccaataaccacgaccaggagttcgacccccctaaggtgtaccctcccgtccccgccgagaagagaaagcccatccgggtcctgagcctgttcgatggcatcgccaccggtctgctggtgctgaaggacctgggcatccaggtggataggtacattgcctccgaggtgtgcgaggactccatcaccgtgggaatggtgcgtcatcagggcaagatcatgtacgtgggcgacgtgcggagcgtgacacagaagcatatccaggagtggggccctttcgacctggtgatcggcggcagcccttgcaatgacctgagcatcgtgaacccagcccggaagggcctgtacgagggaaccggcagactgttcttcgagttttacagactgctgcacgacgcccggcctaaggaaggcgacgaccggcccttcttttggctgttcgagaatgtggtggccatgggagtcagcgacaagcgggatattagccggttcctggagagcaaccccgtgatgatcgatgccaaggaagtgagcgccgcccaccgggccagatacttctggggcaatctgcctggcatgaacagacccctggccagcaccgtgaacgacaagctggagctgcaggagtgcctggagcacggccggatcgccaagttcagcaaggtgagaaccatcaccacccgaagcaacagcatcaaacaaggcaaggaccagcactttcctgtgttcatgaacgagaaggaggacatcctgtggtgtaccgagatggagagagtgttcgggttcccagtccactacacagatgtcagcaacatgtctagactggccagacagagactgctgggaagaagctggtccgtccctgtgatcagacacctgttcgcccctctgaaggagtacttcgcctgcgtgagcagcggcaacagcaacgccaacagccggggccccagcttctctagcggcctggtgccactgtccctgagagggagccacatgggccccatggagatctacaaaaccgtgagcgcctggaagcggcagcctgtgcgcgtgctgagcctgtttcggaatatcgataaagtcctgaaaagcctgggattcctggagagcggctctggctccggcggtggcaccctgaagtacgtggaggatgtgacaaacgtggtcagacgggatgtggagaagtggggccccttcgatctggtgtacggcagcacccaacccctgggcagctcttgtgaccggtgccctggctggtacatgtttcagttccaccggatcctgcagtacgccctgccgagacaggagtcccagcggccattcttttggattttcatggacaacttgctgctgaccgaggatgaccaggaaactaccactcggttcctgcagaccgaagccgtgaccctgcaggacgtgagaggccgggactaccagaacgccatgcgggtgtggtccaacatccctggactgaaaagcaagcacgcacctctgacccctaaagaagaggagtacctgcaggcccaggtgcggagcagaagcaagctggacgcccctaaggtggatctgctggtgaagaattgcctcctgcccctgagagagtacttcaagtatttcagccagaatagtctgcccctgggaggcagcggcggcggcgcccagatgctggtgaccttcaaggacgtggccgtgaccttcacccaggaggagtggaggcagctggacctgacccagaggaccctgtacagggaggtgatgctggagacctgcggcctgctggtgagcctgggccacagggtgcccaagcccgagctggtgcacctgctggagcacggccaggagctgtggaccgtgaagaccggcctgagccagcccacctgcgccggcgacaggacccagggcggcccaagcagcggcgcccctcctcccagcggcggcagcccagccggctccccaacctctaccgaggagggcacctctgagtccgccacccccgagagcggccctggcacctccaccgagcccagcgagggcagcgcacccggcagccctgccggcagccccacctccacagaggagggaaccagcaccgagcccagcgaaggcagcgccccaggcaccagcaccgagcctagtgagcaggagattaaacggatcaacaagatcagaagaagacttgtgaaagacagcaacaccaagaaggccggcaagacaggccccatgaaaaccctgctggttagagtgatgacacccgatctgagagagcggctggaaaacctgagaaagaagcctgaaaatatcccccagcccatcagcaatacatctagagccaacctgaataagctgctgaccgattacaccgaaatgaagaaggcgatcctgcatgtgtactgggaagagttccagaaggaccctgtgggcctgatgagccgggtggcccagcctgccagcaagaagatcgatcagaacaagctgaaacctgagatggacgagaagggcaacctgaccaccgccggctttgcctgctctcagtgtggccagcccctgttcgtgtacaagctggagcaggtgtctgagaagggcaaggcttacaccaactacttcggacggtgcaatgtggccgagcacgaaaagctgatcctgctggcccagctgaagcccgagaaggatagcgacgaagccgtgacatatagcctgggaaagtttgggcagagggccctggatttctacagcattcatgtgaccaaggagtccacccaccccgtgaagcccctggcccagatcgccggaaacagatacgcctccggacctgtgggaaaggccctgagcgacgcatgtatgggcacaatcgcctccttcctgtctaagtaccaggacatcatcatcgaacaccagaaggtggtgaagggcaaccagaagagactggagagcctgcgggagctggccggcaaggaaaacctggaataccctagcgtgaccctgccacctcagcctcacaccaaggagggcgttgatgcctacaacgaagtgatcgcccgggtgcgaatgtgggtgaacctgaacctgtggcagaagctgaagctaagcagagatgatgccaagcctctgctgagactgaagggattcccttcctttcctctggtcgagagacaggccaacgaagtggactggtgggacatggtgtgtaacgtgaagaagctgatcaacgagaaaaaggaggatggcaaggtgttttggcagaatctggctggctacaagagacaggaagccctgagaccatacctgagcagcgaggaagatcggaagaagggaaagaaattcgctcggtaccagctgggcgacctgctgctgcacctggaaaagaagcacggcgaggactggggaaaggtgtacgacgaggcctgggagcggattgacaagaaagtggaaggcctgagcaagcacatcaagctggaagaggaacggagaagcgaggacgcccagagcaaggccgccctgaccgactggctgcgggctaaggccagcttcgtgatcgagggcctgaaggaggccgacaaggacgagttctgcagatgcgagctgaagctgcagaagtggtacggggacctgcggggaaagcccttcgccatcgaagccgagaacagcatcctggacatcagcggcttcagcaagcagtacaactgtgccttcatctggcagaaggacggcgtgaagaagctgaacctgtacctgatcatcaactacttcaagggcggcaagctgcggttcaagaagatcaaacctgaagccttcgaagccaacagattctacaccgtgatcaacaaaaagagcggcgagatcgtgcccatggaggtgaacttcaacttcgacgaccccaacctgatcatcctgcctctggcctttggcaagagacagggcagagaattcatctggaacgacctgctgtccctggaaaccggcagcctgaagctggccaacggaagagtgatcgagaagacactgtacaacagaagaacccggcaggatgagcctgccctgttcgtggccctgaccttcgagcggcgggaggtcctggactcctccaatatcaaaccaatgaacctgatcggcgtggcaagaggcgaaaacatccccgccgtgatcgccctgaccgaccccgagggctgcccactgagccggtttaaggatagcctgggaaacccaacccacatcctgagaatcggcgagagctataaggagaagcagcggaccatccaggccaagaaggaggtggagcagcggagagccggcggctacagccggaagtacgccagcaaagccaagaatctggcagacgatatggtgagaaacaccgctagagatctgctgtactacgccgtgacccaggatgccatgctgatcttcgccaacctgagccggggcttcggccggcagggcaagcggaccttcatggccgagagacagtacacacggatggaggactggctgaccgccaagctggcctacgagggcctgagcaagacctacctgtccaagacactggcccagtacacctccaagacatgcagcaactgtgggtttaccatcaccagcgccgactacgacagggtgctggagaagctgaagaagacagcaacaggctggatgaccacaattaacggcaaggagctgaaggtggagggccagattacctactacaacagatacaagagacagaacgtagtcaaggacctgtccgtcgagctggatagactgagcgaagaatctgtgaacaacgacatctcctcctggacaaagggcagaagcggagaagctctgagcctcctgaagaaaagattctcccatagacccgtgcaggagaagttcgtgtgcctgaactgcggcttcgagacacacgcagccgagcaagccgccctgaacatcgccagatcctggctgttcctgcggagccaggagtacaagaaataccagacaaacaagacaaccggcaacaccgataagagagccttcgtcgagacctggcagtccttttaccggaagaagcttaaggaggtgtggaaacctgccgtgcggtctggcggatctggcggaggctccaccagccccaagaaaaagagaaaagtctaagctgccttctgcggggcttgccttctggccatgcccttcttctctcccttgcacctgtacctcttggtctttgaataaagcctgagtaggaaggctagcaaaaaaaaaaaaaaaaaaaaaaaaaaaaaaaaaaaaaaaaaaaaaaaaaaaaaaaaaaaaaaaaaaaaaaaaaaaaaaaa

SEQ ID NO: 12528 - RNA, 5785 nt, synthetic construct
  source 1..5785: mol_type = other RNA
aggaaataagagagaaaagaagagtaagaagaaatataagagccaccatggcccctaagaagaagcgtaaagtgagccggatggaacgcctcgtctacgaggtgcggcagaagtgcagaaacatcgaggacatctgcatctcctgcggatctctgaacgtgaccctggagcacccactgttcatcggcggcatgtgccagaactgtaaaaactgttttctggagtgtgcctatcaatacgacgatgacggctaccagagctactgcaccatctgttgcggcggaagagaggtgctgatgtgtggaaataacaactgctgccggtgcttctgcgtggaatgcgtggacctgctggtgggccccggcgccgcccaggccgctattaaggaagatccttggaactgctacatgtgcggccacaagggcacatacggcctgctgagacggagagaggactggcctagcagactgcagatgttcttcgccaataaccacgaccaggagttcgacccccctaaggtgtaccctcccgtccccgccgagaagagaaagcccatccgggtcctgagcctgttcgatggcatcgccaccggtctgctggtgctgaaggacctgggcatccaggtggataggtacattgcctccgaggtgtgcgaggactccatcaccgtgggaatggtgcgtcatcagggcaagatcatgtacgtgggcgacgtgcggagcgtgacacagaagcatatccaggagtggggccctttcgacctggtgatcggcggcagcccttgcaatgacctgagcatcgtgaacccagcccggaagggcctgtacgagggaaccggcagactgttcttcgagttttacagactgctgcacgacgcccggcctaaggaaggcgacgaccggcccttcttttggctgttcgagaatgtggtggccatgggagtcagcgacaagcgggatattagccggttcctggagagcaaccccgtgatgatcgatgccaaggaagtgagcgccgcccaccgggccagatacttctggggcaatctgcctggcatgaacagacccctggccagcaccgtgaacgacaagctggagctgcaggagtgcctggagcacggccggatcgccaagttcagcaaggtgagaaccatcaccacccgaagcaacagcatcaaacaaggcaaggaccagcactttcctgtgttcatgaacgagaaggaggacatcctgtggtgtaccgagatggagagagtgttcgggttcccagtccactacacagatgtcagcaacatgtctagactggccagacagagactgctgggaagaagctggtccgtccctgtgatcagacacctgttcgcccctctgaaggagtacttcgcctgcgtgagcagcggcaacagcaacgccaacagccggggccccagcttctctagcggcctggtgccactgtccctgagagggagccacatgggccccatggagatctacaaaaccgtgagcgcctggaagcggcagcctgtgcgcgtgctgagcctgtttcggaatatcgataaagtcctgaaaagcctgggattcctggagagcggctctggctccggcggtggcaccctgaagtacgtggaggatgtgacaaacgtggtcagacgggatgtggagaagtggggccccttcgatctggtgtacggcagcacccaacccctgggcagctcttgtgaccggtgccctggctggtacatgtttcagttccaccggatcctgcagtacgccctgccgagacaggagtcccagcggccattcttttggattttcatggacaacttgctgctgaccgaggatgaccaggaaactaccactcggttcctgcagaccgaagccgtgaccctgcaggacgtgagaggccgggactaccagaacgccatgcgggtgtggtccaacatccctggactgaaaagcaagcacgcacctctgacccctaaagaagaggagtacctgcaggcccaggtgcggagcagaagcaagctggacgcccctaaggtggatctgctggtgaagaattgcctcctgcccctgagagagtacttcaagtatttcagccagaatagtctgcccctgggaggcagcggcggcggcagcggcagccaggacgccgtgacctacgaggacgtgcacgtgaacttcacccccgaggagtgggccctgctggacagcagccagaagagcctgtacaaggaggtgatgctggagacctacaggaacctgaccagcatcggctacaagtgggaggacctgaacatcgaggagcactgccagagcagcaggaggctgaagaggtacatcatcggccacagcaggtacaagccctgcgacagggagggcggcccaagcagcggcgcccctcctcccagcggcggcagcccagccggctccccaacctctaccgaggagggcacctctgagtccgccacccccgagagcggccctggcacctccaccgagcccagcgagggcagcgcacccggcagccctgccggcagccccacctccacagaggagggaaccagcaccgagcccagcgaaggcagcgccccaggcaccagcaccgagcctagtgagcaggagattaaacggatcaacaagatcagaagaagacttgtgaaagacagcaacaccaagaaggccggcaagacaggccccatgaaaaccctgctggttagagtgatgacacccgatctgagagagcggctggaaaacctgagaaagaagcctgaaaatatcccccagcccatcagcaatacatctagagccaacctgaataagctgctgaccgattacaccgaaatgaagaaggcgatcctgcatgtgtactgggaagagttccagaaggaccctgtgggcctgatgagccgggtggcccagcctgccagcaagaagatcgatcagaacaagctgaaacctgagatggacgagaagggcaacctgaccaccgccggctttgcctgctctcagtgtggccagcccctgttcgtgtacaagctggagcaggtgtctgagaagggcaaggcttacaccaactacttcggacggtgcaatgtggccgagcacgaaaagctgatcctgctggcccagctgaagcccgagaaggatagcgacgaagccgtgacatatagcctgggaaagtttgggcagagggccctggatttctacagcattcatgtgaccaaggagtccacccaccccgtgaagcccctggcccagatcgccggaaacagatacgcctccggacctgtgggaaaggccctgagcgacgcatgtatgggcacaatcgcctccttcctgtctaagtaccaggacatcatcatcgaacaccagaaggtggtgaagggcaaccagaagagactggagagcctgcgggagctggccggcaaggaaaacctggaataccctagcgtgaccctgccacctcagcctcacaccaaggagggcgttgatgcctacaacgaagtgatcgcccgggtgcgaatgtgggtgaacctgaacctgtggcagaagctgaagctaagcagagatgatgccaagcctctgctgagactgaagggattcccttcctttcctctggtcgagagacaggccaacgaagtggactggtgggacatggtgtgtaacgtgaagaagctgatcaacgagaaaaaggaggatggcaaggtgttttggcagaatctggctggctacaagagacaggaagccctgagaccatacctgagcagcgaggaagatcggaagaagggaaagaaattcgctcggtaccagctgggcgacctgctgctgcacctggaaaagaagcacggcgaggactggggaaaggtgtacgacgaggcctgggagcggattgacaagaaagtggaaggcctgagcaagcacatcaagctggaagaggaacggagaagcgaggacgcccagagcaaggccgccctgaccgactggctgcgggctaaggccagcttcgtgatcgagggcctgaaggaggccgacaaggacgagttctgcagatgcgagctgaagctgcagaagtggtacggggacctgcggggaaagcccttcgccatcgaagccgagaacagcatcctggacatcagcggcttcagcaagcagtacaactgtgccttcatctggcagaaggacggcgtgaagaagctgaacctgtacctgatcatcaactacttcaagggcggcaagctgcggttcaagaagatcaaacctgaagccttcgaagccaacagattctacaccgtgatcaacaaaaagagcggcgagatcgtgcccatggaggtgaacttcaacttcgacgaccccaacctgatcatcctgcctctggcctttggcaagagacagggcagagaattcatctggaacgacctgctgtccctggaaaccggcagcctgaagctggccaacggaagagtgatcgagaagacactgtacaacagaagaacccggcaggatgagcctgccctgttcgtggccctgaccttcgagcggcgggaggtcctggactcctccaatatcaaaccaatgaacctgatcggcgtggcaagaggcgaaaacatccccgccgtgatcgccctgaccgaccccgagggctgcccactgagccggtttaaggatagcctgggaaacccaacccacatcctgagaatcggcgagagctataaggagaagcagcggaccatccaggccaagaaggaggtggagcagcggagagccggcggctacagccggaagtacgccagcaaagccaagaatctggcagacgatatggtgagaaacaccgctagagatctgctgtactacgccgtgacccaggatgccatgctgatcttcgccaacctgagccggggcttcggccggcagggcaagcggaccttcatggccgagagacagtacacacggatggaggactggctgaccgccaagctggcctacgagggcctgagcaagacctacctgtccaagacactggcccagtacacctccaagacatgcagcaactgtgggtttaccatcaccagcgccgactacgacagggtgctggagaagctgaagaagacagcaacaggctggatgaccacaattaacggcaaggagctgaaggtggagggccagattacctactacaacagatacaagagacagaacgtagtcaaggacctgtccgtcgagctggatagactgagcgaagaatctgtgaacaacgacatctcctcctggacaaagggcagaagcggagaagctctgagcctcctgaagaaaagattctcccatagacccgtgcaggagaagttcgtgtgcctgaactgcggcttcgagacacacgcagccgagcaagccgccctgaacatcgccagatcctggctgttcctgcggagccaggagtacaagaaataccagacaaacaagacaaccggcaacaccgataagagagccttcgtcgagacctggcagtccttttaccggaagaagcttaaggaggtgtggaaacctgccgtgcggtctggcggatctggcggaggctccaccagccccaagaaaaagagaaaagtctaagctgccttctgcggggcttgccttctggccatgcccttcttctctcccttgcacctgtacctcttggtctttgaataaagcctgagtaggaaggctagcaaaaaaaaaaaaaaaaaaaaaaaaaaaaaaaaaaaaaaaaaaaaaaaaaaaaaaaaaaaaaaaaaaaaaaaaaaaaaaaa

SEQ ID NO: 12529 - RNA, 5785 nt, synthetic construct
  source 1..5785: mol_type = other RNA
aggaaataagagagaaaagaagagtaagaagaaatataagagccaccatggcccctaagaagaagcgtaaagtgagccggatggaacgcctcgtctacgaggtgcggcagaagtgcagaaacatcgaggacatctgcatctcctgcggatctctgaacgtgaccctggagcacccactgttcatcggcggcatgtgccagaactgtaaaaactgttttctggagtgtgcctatcaatacgacgatgacggctaccagagctactgcaccatctgttgcggcggaagagaggtgctgatgtgtggaaataacaactgctgccggtgcttctgcgtggaatgcgtggacctgctggtgggccccggcgccgcccaggccgctattaaggaagatccttggaactgctacatgtgcggccacaagggcacatacggcctgctgagacggagagaggactggcctagcagactgcagatgttcttcgccaataaccacgaccaggagttcgacccccctaaggtgtaccctcccgtccccgccgagaagagaaagcccatccgggtcctgagcctgttcgatggcatcgccaccggtctgctggtgctgaaggacctgggcatccaggtggataggtacattgcctccgaggtgtgcgaggactccatcaccgtgggaatggtgcgtcatcagggcaagatcatgtacgtgggcgacgtgcggagcgtgacacagaagcatatccaggagtggggccctttcgacctggtgatcggcggcagcccttgcaatgacctgagcatcgtgaacccagcccggaagggcctgtacgagggaaccggcagactgttcttcgagttttacagactgctgcacgacgcccggcctaaggaaggcgacgaccggcccttcttttggctgttcgagaatgtggtggccatgggagtcagcgacaagcgggatattagccggttcctggagagcaaccccgtgatgatcgatgccaaggaagtgagcgccgcccaccgggccagatacttctggggcaatctgcctggcatgaacagacccctggccagcaccgtgaacgacaagctggagctgcaggagtgcctggagcacggccggatcgccaagttcagcaaggtgagaaccatcaccacccgaagcaacagcatcaaacaaggcaaggaccagcactttcctgtgttcatgaacgagaaggaggacatcctgtggtgtaccgagatggagagagtgttcgggttcccagtccactacacagatgtcagcaacatgtctagactggccagacagagactgctgggaagaagctggtccgtccctgtgatcagacacctgttcgcccctctgaaggagtacttcgcctgcgtgagcagcggcaacagcaacgccaacagccggggccccagcttctctagcggcctggtgccactgtccctgagagggagccacatgggccccatggagatctacaaaaccgtgagcgcctggaagcggcagcctgtgcgcgtgctgagcctgtttcggaatatcgataaagtcctgaaaagcctgggattcctggagagcggctctggctccggcggtggcaccctgaagtacgtggaggatgtgacaaacgtggtcagacgggatgtggagaagtggggccccttcgatctggtgtacggcagcacccaacccctgggcagctcttgtgaccggtgccctggctggtacatgtttcagttccaccggatcctgcagtacgccctgccgagacaggagtcccagcggccattcttttggattttcatggacaacttgctgctgaccgaggatgaccaggaaactaccactcggttcctgcagaccgaagccgtgaccctgcaggacgtgagaggccgggactaccagaacgccatgcgggtgtggtccaacatccctggactgaaaagcaagcacgcacctctgacccctaaagaagaggagtacctgcaggcccaggtgcggagcagaagcaagctggacgcccctaaggtggatctgctggtgaagaattgcctcctgcccctgagagagtacttcaagtatttcagccagaatagtctgcccctgggaggcagcggcggcggcccccaggagagcgtggccttcgacgacgtggccgtgtacttcaccaagaaggagtgggccatcatggtgcccgaccagagggccctgtacagggacgtgatgctggagaactacgaggccgtggccttcgtggtgccccccaccagcaagcccgccctgatcagccacctggagcagggcaaggagccctgcttcacccagccccagggcgtgctgagcaggagggactggagggccggcttcggcggcccaagcagcggcgcccctcctcccagcggcggcagcccagccggctccccaacctctaccgaggagggcacctctgagtccgccacccccgagagcggccctggcacctccaccgagcccagcgagggcagcgcacccggcagccctgccggcagccccacctccacagaggagggaaccagcaccgagcccagcgaaggcagcgccccaggcaccagcaccgagcctagtgagcaggagattaaacggatcaacaagatcagaagaagacttgtgaaagacagcaacaccaagaaggccggcaagacaggccccatgaaaaccctgctggttagagtgatgacacccgatctgagagagcggctggaaaacctgagaaagaagcctgaaaatatcccccagcccatcagcaatacatctagagccaacctgaataagctgctgaccgattacaccgaaatgaagaaggcgatcctgcatgtgtactgggaagagttccagaaggaccctgtgggcctgatgagccgggtggcccagcctgccagcaagaagatcgatcagaacaagctgaaacctgagatggacgagaagggcaacctgaccaccgccggctttgcctgctctcagtgtggccagcccctgttcgtgtacaagctggagcaggtgtctgagaagggcaaggcttacaccaactacttcggacggtgcaatgtggccgagcacgaaaagctgatcctgctggcccagctgaagcccgagaaggatagcgacgaagccgtgacatatagcctgggaaagtttgggcagagggccctggatttctacagcattcatgtgaccaaggagtccacccaccccgtgaagcccctggcccagatcgccggaaacagatacgcctccggacctgtgggaaaggccctgagcgacgcatgtatgggcacaatcgcctccttcctgtctaagtaccaggacatcatcatcgaacaccagaaggtggtgaagggcaaccagaagagactggagagcctgcgggagctggccggcaaggaaaacctggaataccctagcgtgaccctgccacctcagcctcacaccaaggagggcgttgatgcctacaacgaagtgatcgcccgggtgcgaatgtgggtgaacctgaacctgtggcagaagctgaagctaagcagagatgatgccaagcctctgctgagactgaagggattcccttcctttcctctggtcgagagacaggccaacgaagtggactggtgggacatggtgtgtaacgtgaagaagctgatcaacgagaaaaaggaggatggcaaggtgttttggcagaatctggctggctacaagagacaggaagccctgagaccatacctgagcagcgaggaagatcggaagaagggaaagaaattcgctcggtaccagctgggcgacctgctgctgcacctggaaaagaagcacggcgaggactggggaaaggtgtacgacgaggcctgggagcggattgacaagaaagtggaaggcctgagcaagcacatcaagctggaagaggaacggagaagcgaggacgcccagagcaaggccgccctgaccgactggctgcgggctaaggccagcttcgtgatcgagggcctgaaggaggccgacaaggacgagttctgcagatgcgagctgaagctgcagaagtggtacggggacctgcggggaaagcccttcgccatcgaagccgagaacagcatcctggacatcagcggcttcagcaagcagtacaactgtgccttcatctggcagaaggacggcgtgaagaagctgaacctgtacctgatcatcaactacttcaagggcggcaagctgcggttcaagaagatcaaacctgaagccttcgaagccaacagattctacaccgtgatcaacaaaaagagcggcgagatcgtgcccatggaggtgaacttcaacttcgacgaccccaacctgatcatcctgcctctggcctttggcaagagacagggcagagaattcatctggaacgacctgctgtccctggaaaccggcagcctgaagctggccaacggaagagtgatcgagaagacactgtacaacagaagaacccggcaggatgagcctgccctgttcgtggccctgaccttcgagcggcgggaggtcctggactcctccaatatcaaaccaatgaacctgatcggcgtggcaagaggcgaaaacatccccgccgtgatcgccctgaccgaccccgagggctgcccactgagccggtttaaggatagcctgggaaacccaacccacatcctgagaatcggcgagagctataaggagaagcagcggaccatccaggccaagaaggaggtggagcagcggagagccggcggctacagccggaagtacgccagcaaagccaagaatctggcagacgatatggtgagaaacaccgctagagatctgctgtactacgccgtgacccaggatgccatgctgatcttcgccaacctgagccggggcttcggccggcagggcaagcggaccttcatggccgagagacagtacacacggatggaggactggctgaccgccaagctggcctacgagggcctgagcaagacctacctgtccaagacactggcccagtacacctccaagacatgcagcaactgtgggtttaccatcaccagcgccgactacgacagggtgctggagaagctgaagaagacagcaacaggctggatgaccacaattaacggcaaggagctgaaggtggagggccagattacctactacaacagatacaagagacagaacgtagtcaaggacctgtccgtcgagctggatagactgagcgaagaatctgtgaacaacgacatctcctcctggacaaagggcagaagcggagaagctctgagcctcctgaagaaaagattctcccatagacccgtgcaggagaagttcgtgtgcctgaactgcggcttcgagacacacgcagccgagcaagccgccctgaacatcgccagatcctggctgttcctgcggagccaggagtacaagaaataccagacaaacaagacaaccggcaacaccgataagagagccttcgtcgagacctggcagtccttttaccggaagaagcttaaggaggtgtggaaacctgccgtgcggtctggcggatctggcggaggctccaccagccccaagaaaaagagaaaagtctaagctgccttctgcggggcttgccttctggccatgcccttcttctctcccttgcacctgtacctcttggtctttgaataaagcctgagtaggaaggctagcaaaaaaaaaaaaaaaaaaaaaaaaaaaaaaaaaaaaaaaaaaaaaaaaaaaaaaaaaaaaaaaaaaaaaaaaaaaaaaaa

SEQ ID NO: 12530 - RNA, 5785 nt, synthetic construct
  source 1..5785: mol_type = other RNA
aggaaataagagagaaaagaagagtaagaagaaatataagagccaccatggcccctaagaagaagcgtaaagtgagccggatggaacgcctcgtctacgaggtgcggcagaagtgcagaaacatcgaggacatctgcatctcctgcggatctctgaacgtgaccctggagcacccactgttcatcggcggcatgtgccagaactgtaaaaactgttttctggagtgtgcctatcaatacgacgatgacggctaccagagctactgcaccatctgttgcggcggaagagaggtgctgatgtgtggaaataacaactgctgccggtgcttctgcgtggaatgcgtggacctgctggtgggccccggcgccgcccaggccgctattaaggaagatccttggaactgctacatgtgcggccacaagggcacatacggcctgctgagacggagagaggactggcctagcagactgcagatgttcttcgccaataaccacgaccaggagttcgacccccctaaggtgtaccctcccgtccccgccgagaagagaaagcccatccgggtcctgagcctgttcgatggcatcgccaccggtctgctggtgctgaaggacctgggcatccaggtggataggtacattgcctccgaggtgtgcgaggactccatcaccgtgggaatggtgcgtcatcagggcaagatcatgtacgtgggcgacgtgcggagcgtgacacagaagcatatccaggagtggggccctttcgacctggtgatcggcggcagcccttgcaatgacctgagcatcgtgaacccagcccggaagggcctgtacgagggaaccggcagactgttcttcgagttttacagactgctgcacgacgcccggcctaaggaaggcgacgaccggcccttcttttggctgttcgagaatgtggtggccatgggagtcagcgacaagcgggatattagccggttcctggagagcaaccccgtgatgatcgatgccaaggaagtgagcgccgcccaccgggccagatacttctggggcaatctgcctggcatgaacagacccctggccagcaccgtgaacgacaagctggagctgcaggagtgcctggagcacggccggatcgccaagttcagcaaggtgagaaccatcaccacccgaagcaacagcatcaaacaaggcaaggaccagcactttcctgtgttcatgaacgagaaggaggacatcctgtggtgtaccgagatggagagagtgttcgggttcccagtccactacacagatgtcagcaacatgtctagactggccagacagagactgctgggaagaagctggtccgtccctgtgatcagacacctgttcgcccctctgaaggagtacttcgcctgcgtgagcagcggcaacagcaacgccaacagccggggccccagcttctctagcggcctggtgccactgtccctgagagggagccacatgggccccatggagatctacaaaaccgtgagcgcctggaagcggcagcctgtgcgcgtgctgagcctgtttcggaatatcgataaagtcctgaaaagcctgggattcctggagagcggctctggctccggcggtggcaccctgaagtacgtggaggatgtgacaaacgtggtcagacgggatgtggagaagtggggccccttcgatctggtgtacggcagcacccaacccctgggcagctcttgtgaccggtgccctggctggtacatgtttcagttccaccggatcctgcagtacgccctgccgagacaggagtcccagcggccattcttttggattttcatggacaacttgctgctgaccgaggatgaccaggaaactaccactcggttcctgcagaccgaagccgtgaccctgcaggacgtgagaggccgggactaccagaacgccatgcgggtgtggtccaacatccctggactgaaaagcaagcacgcacctctgacccctaaagaagaggagtacctgcaggcccaggtgcggagcagaagcaagctggacgcccctaaggtggatctgctggtgaagaattgcctcctgcccctgagagagtacttcaagtatttcagccagaatagtctgcccctgggaggcagcggcggcggcgagatgggcctgctgaccttcagggacatcgccatcgagttcagcctggccgagtggcagtgcctggaccacgcccagaggaacctgtacagggacgtgatgctggagaactacaggaacctggtgagcctgggcgtggccgtgagcaagcccgacctgatcacctgcctggagcacaacaaggagcccaggaacatcaagaggaacgagatggtgagcaagcaccccgtgacctgcagccacggcggcccaagcagcggcgcccctcctcccagcggcggcagcccagccggctccccaacctctaccgaggagggcacctctgagtccgccacccccgagagcggccctggcacctccaccgagcccagcgagggcagcgcacccggcagccctgccggcagccccacctccacagaggagggaaccagcaccgagcccagcgaaggcagcgccccaggcaccagcaccgagcctagtgagcaggagattaaacggatcaacaagatcagaagaagacttgtgaaagacagcaacaccaagaaggccggcaagacaggccccatgaaaaccctgctggttagagtgatgacacccgatctgagagagcggctggaaaacctgagaaagaagcctgaaaatatcccccagcccatcagcaatacatctagagccaacctgaataagctgctgaccgattacaccgaaatgaagaaggcgatcctgcatgtgtactgggaagagttccagaaggaccctgtgggcctgatgagccgggtggcccagcctgccagcaagaagatcgatcagaacaagctgaaacctgagatggacgagaagggcaacctgaccaccgccggctttgcctgctctcagtgtggccagcccctgttcgtgtacaagctggagcaggtgtctgagaagggcaaggcttacaccaactacttcggacggtgcaatgtggccgagcacgaaaagctgatcctgctggcccagctgaagcccgagaaggatagcgacgaagccgtgacatatagcctgggaaagtttgggcagagggccctggatttctacagcattcatgtgaccaaggagtccacccaccccgtgaagcccctggcccagatcgccggaaacagatacgcctccggacctgtgggaaaggccctgagcgacgcatgtatgggcacaatcgcctccttcctgtctaagtaccaggacatcatcatcgaacaccagaaggtggtgaagggcaaccagaagagactggagagcctgcgggagctggccggcaaggaaaacctggaataccctagcgtgaccctgccacctcagcctcacaccaaggagggcgttgatgcctacaacgaagtgatcgcccgggtgcgaatgtgggtgaacctgaacctgtggcagaagctgaagctaagcagagatgatgccaagcctctgctgagactgaagggattcccttcctttcctctggtcgagagacaggccaacgaagtggactggtgggacatggtgtgtaacgtgaagaagctgatcaacgagaaaaaggaggatggcaaggtgttttggcagaatctggctggctacaagagacaggaagccctgagaccatacctgagcagcgaggaagatcggaagaagggaaagaaattcgctcggtaccagctgggcgacctgctgctgcacctggaaaagaagcacggcgaggactggggaaaggtgtacgacgaggcctgggagcggattgacaagaaagtggaaggcctgagcaagcacatcaagctggaagaggaacggagaagcgaggacgcccagagcaaggccgccctgaccgactggctgcgggctaaggccagcttcgtgatcgagggcctgaaggaggccgacaaggacgagttctgcagatgcgagctgaagctgcagaagtggtacggggacctgcggggaaagcccttcgccatcgaagccgagaacagcatcctggacatcagcggcttcagcaagcagtacaactgtgccttcatctggcagaaggacggcgtgaagaagctgaacctgtacctgatcatcaactacttcaagggcggcaagctgcggttcaagaagatcaaacctgaagccttcgaagccaacagattctacaccgtgatcaacaaaaagagcggcgagatcgtgcccatggaggtgaacttcaacttcgacgaccccaacctgatcatcctgcctctggcctttggcaagagacagggcagagaattcatctggaacgacctgctgtccctggaaaccggcagcctgaagctggccaacggaagagtgatcgagaagacactgtacaacagaagaacccggcaggatgagcctgccctgttcgtggccctgaccttcgagcggcgggaggtcctggactcctccaatatcaaaccaatgaacctgatcggcgtggcaagaggcgaaaacatccccgccgtgatcgccctgaccgaccccgagggctgcccactgagccggtttaaggatagcctgggaaacccaacccacatcctgagaatcggcgagagctataaggagaagcagcggaccatccaggccaagaaggaggtggagcagcggagagccggcggctacagccggaagtacgccagcaaagccaagaatctggcagacgatatggtgagaaacaccgctagagatctgctgtactacgccgtgacccaggatgccatgctgatcttcgccaacctgagccggggcttcggccggcagggcaagcggaccttcatggccgagagacagtacacacggatggaggactggctgaccgccaagctggcctacgagggcctgagcaagacctacctgtccaagacactggcccagtacacctccaagacatgcagcaactgtgggtttaccatcaccagcgccgactacgacagggtgctggagaagctgaagaagacagcaacaggctggatgaccacaattaacggcaaggagctgaaggtggagggccagattacctactacaacagatacaagagacagaacgtagtcaaggacctgtccgtcgagctggatagactgagcgaagaatctgtgaacaacgacatctcctcctggacaaagggcagaagcggagaagctctgagcctcctgaagaaaagattctcccatagacccgtgcaggagaagttcgtgtgcctgaactgcggcttcgagacacacgcagccgagcaagccgccctgaacatcgccagatcctggctgttcctgcggagccaggagtacaagaaataccagacaaacaagacaaccggcaacaccgataagagagccttcgtcgagacctggcagtccttttaccggaagaagcttaaggaggtgtggaaacctgccgtgcggtctggcggatctggcggaggctccaccagccccaagaaaaagagaaaagtctaagctgccttctgcggggcttgccttctggccatgcccttcttctctcccttgcacctgtacctcttggtctttgaataaagcctgagtaggaaggctagcaaaaaaaaaaaaaaaaaaaaaaaaaaaaaaaaaaaaaaaaaaaaaaaaaaaaaaaaaaaaaaaaaaaaaaaaaaaaaaaa

SEQ ID NO: 12531 - RNA, 5785 nt, synthetic construct
  source 1..5785: mol_type = other RNA
aggaaataagagagaaaagaagagtaagaagaaatataagagccaccatggcccctaagaagaagcgtaaagtgagccggatggaacgcctcgtctacgaggtgcggcagaagtgcagaaacatcgaggacatctgcatctcctgcggatctctgaacgtgaccctggagcacccactgttcatcggcggcatgtgccagaactgtaaaaactgttttctggagtgtgcctatcaatacgacgatgacggctaccagagctactgcaccatctgttgcggcggaagagaggtgctgatgtgtggaaataacaactgctgccggtgcttctgcgtggaatgcgtggacctgctggtgggccccggcgccgcccaggccgctattaaggaagatccttggaactgctacatgtgcggccacaagggcacatacggcctgctgagacggagagaggactggcctagcagactgcagatgttcttcgccaataaccacgaccaggagttcgacccccctaaggtgtaccctcccgtccccgccgagaagagaaagcccatccgggtcctgagcctgttcgatggcatcgccaccggtctgctggtgctgaaggacctgggcatccaggtggataggtacattgcctccgaggtgtgcgaggactccatcaccgtgggaatggtgcgtcatcagggcaagatcatgtacgtgggcgacgtgcggagcgtgacacagaagcatatccaggagtggggccctttcgacctggtgatcggcggcagcccttgcaatgacctgagcatcgtgaacccagcccggaagggcctgtacgagggaaccggcagactgttcttcgagttttacagactgctgcacgacgcccggcctaaggaaggcgacgaccggcccttcttttggctgttcgagaatgtggtggccatgggagtcagcgacaagcgggatattagccggttcctggagagcaaccccgtgatgatcgatgccaaggaagtgagcgccgcccaccgggccagatacttctggggcaatctgcctggcatgaacagacccctggccagcaccgtgaacgacaagctggagctgcaggagtgcctggagcacggccggatcgccaagttcagcaaggtgagaaccatcaccacccgaagcaacagcatcaaacaaggcaaggaccagcactttcctgtgttcatgaacgagaaggaggacatcctgtggtgtaccgagatggagagagtgttcgggttcccagtccactacacagatgtcagcaacatgtctagactggccagacagagactgctgggaagaagctggtccgtccctgtgatcagacacctgttcgcccctctgaaggagtacttcgcctgcgtgagcagcggcaacagcaacgccaacagccggggccccagcttctctagcggcctggtgccactgtccctgagagggagccacatgggccccatggagatctacaaaaccgtgagcgcctggaagcggcagcctgtgcgcgtgctgagcctgtttcggaatatcgataaagtcctgaaaagcctgggattcctggagagcggctctggctccggcggtggcaccctgaagtacgtggaggatgtgacaaacgtggtcagacgggatgtggagaagtggggccccttcgatctggtgtacggcagcacccaacccctgggcagctcttgtgaccggtgccctggctggtacatgtttcagttccaccggatcctgcagtacgccctgccgagacaggagtcccagcggccattcttttggattttcatggacaacttgctgctgaccgaggatgaccaggaaactaccactcggttcctgcagaccgaagccgtgaccctgcaggacgtgagaggccgggactaccagaacgccatgcgggtgtggtccaacatccctggactgaaaagcaagcacgcacctctgacccctaaagaagaggagtacctgcaggcccaggtgcggagcagaagcaagctggacgcccctaaggtggatctgctggtgaagaattgcctcctgcccctgagagagtacttcaagtatttcagccagaatagtctgcccctgggaggcagcggcggcggcatggccgacctggtgatgttcagggacgtgaccgtggacttcagccaggaggagtgggagtgcctgaacagcaaccagaggaacctgtacagggacgtgatcctggagaactacagcaacctggtgagcctgggcggctgcagcatcagcaagcccgacgtgatcaccctgctggagcagggcaaggagccctggatggtggtgagggacgagaagaggaggtggaggctggacctggagagcggcggcccaagcagcggcgcccctcctcccagcggcggcagcccagccggctccccaacctctaccgaggagggcacctctgagtccgccacccccgagagcggccctggcacctccaccgagcccagcgagggcagcgcacccggcagccctgccggcagccccacctccacagaggagggaaccagcaccgagcccagcgaaggcagcgccccaggcaccagcaccgagcctagtgagcaggagattaaacggatcaacaagatcagaagaagacttgtgaaagacagcaacaccaagaaggccggcaagacaggccccatgaaaaccctgctggttagagtgatgacacccgatctgagagagcggctggaaaacctgagaaagaagcctgaaaatatcccccagcccatcagcaatacatctagagccaacctgaataagctgctgaccgattacaccgaaatgaagaaggcgatcctgcatgtgtactgggaagagttccagaaggaccctgtgggcctgatgagccgggtggcccagcctgccagcaagaagatcgatcagaacaagctgaaacctgagatggacgagaagggcaacctgaccaccgccggctttgcctgctctcagtgtggccagcccctgttcgtgtacaagctggagcaggtgtctgagaagggcaaggcttacaccaactacttcggacggtgcaatgtggccgagcacgaaaagctgatcctgctggcccagctgaagcccgagaaggatagcgacgaagccgtgacatatagcctgggaaagtttgggcagagggccctggatttctacagcattcatgtgaccaaggagtccacccaccccgtgaagcccctggcccagatcgccggaaacagatacgcctccggacctgtgggaaaggccctgagcgacgcatgtatgggcacaatcgcctccttcctgtctaagtaccaggacatcatcatcgaacaccagaaggtggtgaagggcaaccagaagagactggagagcctgcgggagctggccggcaaggaaaacctggaataccctagcgtgaccctgccacctcagcctcacaccaaggagggcgttgatgcctacaacgaagtgatcgcccgggtgcgaatgtgggtgaacctgaacctgtggcagaagctgaagctaagcagagatgatgccaagcctctgctgagactgaagggattcccttcctttcctctggtcgagagacaggccaacgaagtggactggtgggacatggtgtgtaacgtgaagaagctgatcaacgagaaaaaggaggatggcaaggtgttttggcagaatctggctggctacaagagacaggaagccctgagaccatacctgagcagcgaggaagatcggaagaagggaaagaaattcgctcggtaccagctgggcgacctgctgctgcacctggaaaagaagcacggcgaggactggggaaaggtgtacgacgaggcctgggagcggattgacaagaaagtggaaggcctgagcaagcacatcaagctggaagaggaacggagaagcgaggacgcccagagcaaggccgccctgaccgactggctgcgggctaaggccagcttcgtgatcgagggcctgaaggaggccgacaaggacgagttctgcagatgcgagctgaagctgcagaagtggtacggggacctgcggggaaagcccttcgccatcgaagccgagaacagcatcctggacatcagcggcttcagcaagcagtacaactgtgccttcatctggcagaaggacggcgtgaagaagctgaacctgtacctgatcatcaactacttcaagggcggcaagctgcggttcaagaagatcaaacctgaagccttcgaagccaacagattctacaccgtgatcaacaaaaagagcggcgagatcgtgcccatggaggtgaacttcaacttcgacgaccccaacctgatcatcctgcctctggcctttggcaagagacagggcagagaattcatctggaacgacctgctgtccctggaaaccggcagcctgaagctggccaacggaagagtgatcgagaagacactgtacaacagaagaacccggcaggatgagcctgccctgttcgtggccctgaccttcgagcggcgggaggtcctggactcctccaatatcaaaccaatgaacctgatcggcgtggcaagaggcgaaaacatccccgccgtgatcgccctgaccgaccccgagggctgcccactgagccggtttaaggatagcctgggaaacccaacccacatcctgagaatcggcgagagctataaggagaagcagcggaccatccaggccaagaaggaggtggagcagcggagagccggcggctacagccggaagtacgccagcaaagccaagaatctggcagacgatatggtgagaaacaccgctagagatctgctgtactacgccgtgacccaggatgccatgctgatcttcgccaacctgagccggggcttcggccggcagggcaagcggaccttcatggccgagagacagtacacacggatggaggactggctgaccgccaagctggcctacgagggcctgagcaagacctacctgtccaagacactggcccagtacacctccaagacatgcagcaactgtgggtttaccatcaccagcgccgactacgacagggtgctggagaagctgaagaagacagcaacaggctggatgaccacaattaacggcaaggagctgaaggtggagggccagattacctactacaacagatacaagagacagaacgtagtcaaggacctgtccgtcgagctggatagactgagcgaagaatctgtgaacaacgacatctcctcctggacaaagggcagaagcggagaagctctgagcctcctgaagaaaagattctcccatagacccgtgcaggagaagttcgtgtgcctgaactgcggcttcgagacacacgcagccgagcaagccgccctgaacatcgccagatcctggctgttcctgcggagccaggagtacaagaaataccagacaaacaagacaaccggcaacaccgataagagagccttcgtcgagacctggcagtccttttaccggaagaagcttaaggaggtgtggaaacctgccgtgcggtctggcggatctggcggaggctccaccagccccaagaaaaagagaaaagtctaagctgccttctgcggggcttgccttctggccatgcccttcttctctcccttgcacctgtacctcttggtctttgaataaagcctgagtaggaaggctagcaaaaaaaaaaaaaaaaaaaaaaaaaaaaaaaaaaaaaaaaaaaaaaaaaaaaaaaaaaaaaaaaaaaaaaaaaaaaaaaa

SEQ ID NO: 12532 - RNA, 5785 nt, synthetic construct
  source 1..5785: mol_type = other RNA
aggaaataagagagaaaagaagagtaagaagaaatataagagccaccatggcccctaagaagaagcgtaaagtgagccggatggaacgcctcgtctacgaggtgcggcagaagtgcagaaacatcgaggacatctgcatctcctgcggatctctgaacgtgaccctggagcacccactgttcatcggcggcatgtgccagaactgtaaaaactgttttctggagtgtgcctatcaatacgacgatgacggctaccagagctactgcaccatctgttgcggcggaagagaggtgctgatgtgtggaaataacaactgctgccggtgcttctgcgtggaatgcgtggacctgctggtgggccccggcgccgcccaggccgctattaaggaagatccttggaactgctacatgtgcggccacaagggcacatacggcctgctgagacggagagaggactggcctagcagactgcagatgttcttcgccaataaccacgaccaggagttcgacccccctaaggtgtaccctcccgtccccgccgagaagagaaagcccatccgggtcctgagcctgttcgatggcatcgccaccggtctgctggtgctgaaggacctgggcatccaggtggataggtacattgcctccgaggtgtgcgaggactccatcaccgtgggaatggtgcgtcatcagggcaagatcatgtacgtgggcgacgtgcggagcgtgacacagaagcatatccaggagtggggccctttcgacctggtgatcggcggcagcccttgcaatgacctgagcatcgtgaacccagcccggaagggcctgtacgagggaaccggcagactgttcttcgagttttacagactgctgcacgacgcccggcctaaggaaggcgacgaccggcccttcttttggctgttcgagaatgtggtggccatgggagtcagcgacaagcgggatattagccggttcctggagagcaaccccgtgatgatcgatgccaaggaagtgagcgccgcccaccgggccagatacttctggggcaatctgcctggcatgaacagacccctggccagcaccgtgaacgacaagctggagctgcaggagtgcctggagcacggccggatcgccaagttcagcaaggtgagaaccatcaccacccgaagcaacagcatcaaacaaggcaaggaccagcactttcctgtgttcatgaacgagaaggaggacatcctgtggtgtaccgagatggagagagtgttcgggttcccagtccactacacagatgtcagcaacatgtctagactggccagacagagactgctgggaagaagctggtccgtccctgtgatcagacacctgttcgcccctctgaaggagtacttcgcctgcgtgagcagcggcaacagcaacgccaacagccggggccccagcttctctagcggcctggtgccactgtccctgagagggagccacatgggccccatggagatctacaaaaccgtgagcgcctggaagcggcagcctgtgcgcgtgctgagcctgtttcggaatatcgataaagtcctgaaaagcctgggattcctggagagcggctctggctccggcggtggcaccctgaagtacgtggaggatgtgacaaacgtggtcagacgggatgtggagaagtggggccccttcgatctggtgtacggcagcacccaacccctgggcagctcttgtgaccggtgccctggctggtacatgtttcagttccaccggatcctgcagtacgccctgccgagacaggagtcccagcggccattcttttggattttcatggacaacttgctgctgaccgaggatgaccaggaaactaccactcggttcctgcagaccgaagccgtgaccctgcaggacgtgagaggccgggactaccagaacgccatgcgggtgtggtccaacatccctggactgaaaagcaagcacgcacctctgacccctaaagaagaggagtacctgcaggcccaggtgcggagcagaagcaagctggacgcccctaaggtggatctgctggtgaagaattgcctcctgcccctgagagagtacttcaagtatttcagccagaatagtctgcccctgggaggcagcggcggcggcagcgacgaggccttcagcttcgaggacctgagcgtggacttcacccagaaggagtggcagctgctgaaccccggccagaaggacctgtacaaggacgtgatgctggagaactacagcagcctggtgagcctgggctacgagatcatgaagcccgacgtgatcttcaagctggagcagggcgaggagccctggatcggcgacggcgaggtgcccagcagcggctgccccgccgacatgagctacggcggcccaagcagcggcgcccctcctcccagcggcggcagcccagccggctccccaacctctaccgaggagggcacctctgagtccgccacccccgagagcggccctggcacctccaccgagcccagcgagggcagcgcacccggcagccctgccggcagccccacctccacagaggagggaaccagcaccgagcccagcgaaggcagcgccccaggcaccagcaccgagcctagtgagcaggagattaaacggatcaacaagatcagaagaagacttgtgaaagacagcaacaccaagaaggccggcaagacaggccccatgaaaaccctgctggttagagtgatgacacccgatctgagagagcggctggaaaacctgagaaagaagcctgaaaatatcccccagcccatcagcaatacatctagagccaacctgaataagctgctgaccgattacaccgaaatgaagaaggcgatcctgcatgtgtactgggaagagttccagaaggaccctgtgggcctgatgagccgggtggcccagcctgccagcaagaagatcgatcagaacaagctgaaacctgagatggacgagaagggcaacctgaccaccgccggctttgcctgctctcagtgtggccagcccctgttcgtgtacaagctggagcaggtgtctgagaagggcaaggcttacaccaactacttcggacggtgcaatgtggccgagcacgaaaagctgatcctgctggcccagctgaagcccgagaaggatagcgacgaagccgtgacatatagcctgggaaagtttgggcagagggccctggatttctacagcattcatgtgaccaaggagtccacccaccccgtgaagcccctggcccagatcgccggaaacagatacgcctccggacctgtgggaaaggccctgagcgacgcatgtatgggcacaatcgcctccttcctgtctaagtaccaggacatcatcatcgaacaccagaaggtggtgaagggcaaccagaagagactggagagcctgcgggagctggccggcaaggaaaacctggaataccctagcgtgaccctgccacctcagcctcacaccaaggagggcgttgatgcctacaacgaagtgatcgcccgggtgcgaatgtgggtgaacctgaacctgtggcagaagctgaagctaagcagagatgatgccaagcctctgctgagactgaagggattcccttcctttcctctggtcgagagacaggccaacgaagtggactggtgggacatggtgtgtaacgtgaagaagctgatcaacgagaaaaaggaggatggcaaggtgttttggcagaatctggctggctacaagagacaggaagccctgagaccatacctgagcagcgaggaagatcggaagaagggaaagaaattcgctcggtaccagctgggcgacctgctgctgcacctggaaaagaagcacggcgaggactggggaaaggtgtacgacgaggcctgggagcggattgacaagaaagtggaaggcctgagcaagcacatcaagctggaagaggaacggagaagcgaggacgcccagagcaaggccgccctgaccgactggctgcgggctaaggccagcttcgtgatcgagggcctgaaggaggccgacaaggacgagttctgcagatgcgagctgaagctgcagaagtggtacggggacctgcggggaaagcccttcgccatcgaagccgagaacagcatcctggacatcagcggcttcagcaagcagtacaactgtgccttcatctggcagaaggacggcgtgaagaagctgaacctgtacctgatcatcaactacttcaagggcggcaagctgcggttcaagaagatcaaacctgaagccttcgaagccaacagattctacaccgtgatcaacaaaaagagcggcgagatcgtgcccatggaggtgaacttcaacttcgacgaccccaacctgatcatcctgcctctggcctttggcaagagacagggcagagaattcatctggaacgacctgctgtccctggaaaccggcagcctgaagctggccaacggaagagtgatcgagaagacactgtacaacagaagaacccggcaggatgagcctgccctgttcgtggccctgaccttcgagcggcgggaggtcctggactcctccaatatcaaaccaatgaacctgatcggcgtggcaagaggcgaaaacatccccgccgtgatcgccctgaccgaccccgagggctgcccactgagccggtttaaggatagcctgggaaacccaacccacatcctgagaatcggcgagagctataaggagaagcagcggaccatccaggccaagaaggaggtggagcagcggagagccggcggctacagccggaagtacgccagcaaagccaagaatctggcagacgatatggtgagaaacaccgctagagatctgctgtactacgccgtgacccaggatgccatgctgatcttcgccaacctgagccggggcttcggccggcagggcaagcggaccttcatggccgagagacagtacacacggatggaggactggctgaccgccaagctggcctacgagggcctgagcaagacctacctgtccaagacactggcccagtacacctccaagacatgcagcaactgtgggtttaccatcaccagcgccgactacgacagggtgctggagaagctgaagaagacagcaacaggctggatgaccacaattaacggcaaggagctgaaggtggagggccagattacctactacaacagatacaagagacagaacgtagtcaaggacctgtccgtcgagctggatagactgagcgaagaatctgtgaacaacgacatctcctcctggacaaagggcagaagcggagaagctctgagcctcctgaagaaaagattctcccatagacccgtgcaggagaagttcgtgtgcctgaactgcggcttcgagacacacgcagccgagcaagccgccctgaacatcgccagatcctggctgttcctgcggagccaggagtacaagaaataccagacaaacaagacaaccggcaacaccgataagagagccttcgtcgagacctggcagtccttttaccggaagaagcttaaggaggtgtggaaacctgccgtgcggtctggcggatctggcggaggctccaccagccccaagaaaaagagaaaagtctaagctgccttctgcggggcttgccttctggccatgcccttcttctctcccttgcacctgtacctcttggtctttgaataaagcctgagtaggaaggctagcaaaaaaaaaaaaaaaaaaaaaaaaaaaaaaaaaaaaaaaaaaaaaaaaaaaaaaaaaaaaaaaaaaaaaaaaaaaaaaaa

SEQ ID NO: 12533 - RNA, 5785 nt, synthetic construct
  source 1..5785: mol_type = other RNA
aggaaataagagagaaaagaagagtaagaagaaatataagagccaccatggcccctaagaagaagcgtaaagtgagccggatggaacgcctcgtctacgaggtgcggcagaagtgcagaaacatcgaggacatctgcatctcctgcggatctctgaacgtgaccctggagcacccactgttcatcggcggcatgtgccagaactgtaaaaactgttttctggagtgtgcctatcaatacgacgatgacggctaccagagctactgcaccatctgttgcggcggaagagaggtgctgatgtgtggaaataacaactgctgccggtgcttctgcgtggaatgcgtggacctgctggtgggccccggcgccgcccaggccgctattaaggaagatccttggaactgctacatgtgcggccacaagggcacatacggcctgctgagacggagagaggactggcctagcagactgcagatgttcttcgccaataaccacgaccaggagttcgacccccctaaggtgtaccctcccgtccccgccgagaagagaaagcccatccgggtcctgagcctgttcgatggcatcgccaccggtctgctggtgctgaaggacctgggcatccaggtggataggtacattgcctccgaggtgtgcgaggactccatcaccgtgggaatggtgcgtcatcagggcaagatcatgtacgtgggcgacgtgcggagcgtgacacagaagcatatccaggagtggggccctttcgacctggtgatcggcggcagcccttgcaatgacctgagcatcgtgaacccagcccggaagggcctgtacgagggaaccggcagactgttcttcgagttttacagactgctgcacgacgcccggcctaaggaaggcgacgaccggcccttcttttggctgttcgagaatgtggtggccatgggagtcagcgacaagcgggatattagccggttcctggagagcaaccccgtgatgatcgatgccaaggaagtgagcgccgcccaccgggccagatacttctggggcaatctgcctggcatgaacagacccctggccagcaccgtgaacgacaagctggagctgcaggagtgcctggagcacggccggatcgccaagttcagcaaggtgagaaccatcaccacccgaagcaacagcatcaaacaaggcaaggaccagcactttcctgtgttcatgaacgagaaggaggacatcctgtggtgtaccgagatggagagagtgttcgggttcccagtccactacacagatgtcagcaacatgtctagactggccagacagagactgctgggaagaagctggtccgtccctgtgatcagacacctgttcgcccctctgaaggagtacttcgcctgcgtgagcagcggcaacagcaacgccaacagccggggccccagcttctctagcggcctggtgccactgtccctgagagggagccacatgggccccatggagatctacaaaaccgtgagcgcctggaagcggcagcctgtgcgcgtgctgagcctgtttcggaatatcgataaagtcctgaaaagcctgggattcctggagagcggctctggctccggcggtggcaccctgaagtacgtggaggatgtgacaaacgtggtcagacgggatgtggagaagtggggccccttcgatctggtgtacggcagcacccaacccctgggcagctcttgtgaccggtgccctggctggtacatgtttcagttccaccggatcctgcagtacgccctgccgagacaggagtcccagcggccattcttttggattttcatggacaacttgctgctgaccgaggatgaccaggaaactaccactcggttcctgcagaccgaagccgtgaccctgcaggacgtgagaggccgggactaccagaacgccatgcgggtgtggtccaacatccctggactgaaaagcaagcacgcacctctgacccctaaagaagaggagtacctgcaggcccaggtgcggagcagaagcaagctggacgcccctaaggtggatctgctggtgaagaattgcctcctgcccctgagagagtacttcaagtatttcagccagaatagtctgcccctgggaggcagcggcggcggcagccagggcagggtgaccttcgaggacgtgaccgtgaacttcacccagggcgagtggcagaggctgaaccccgagcagaggaacctgtacagggacgtgatgctggagaactacagcaacctggtgagcgtgggccagggcgagaccaccaagcccgacgtgatcctgaggctggagcagggcaaggagccctggctggaggaggaggaggtgctgggcagcggcagggccgagaagaacggcggcggcccaagcagcggcgcccctcctcccagcggcggcagcccagccggctccccaacctctaccgaggagggcacctctgagtccgccacccccgagagcggccctggcacctccaccgagcccagcgagggcagcgcacccggcagccctgccggcagccccacctccacagaggagggaaccagcaccgagcccagcgaaggcagcgccccaggcaccagcaccgagcctagtgagcaggagattaaacggatcaacaagatcagaagaagacttgtgaaagacagcaacaccaagaaggccggcaagacaggccccatgaaaaccctgctggttagagtgatgacacccgatctgagagagcggctggaaaacctgagaaagaagcctgaaaatatcccccagcccatcagcaatacatctagagccaacctgaataagctgctgaccgattacaccgaaatgaagaaggcgatcctgcatgtgtactgggaagagttccagaaggaccctgtgggcctgatgagccgggtggcccagcctgccagcaagaagatcgatcagaacaagctgaaacctgagatggacgagaagggcaacctgaccaccgccggctttgcctgctctcagtgtggccagcccctgttcgtgtacaagctggagcaggtgtctgagaagggcaaggcttacaccaactacttcggacggtgcaatgtggccgagcacgaaaagctgatcctgctggcccagctgaagcccgagaaggatagcgacgaagccgtgacatatagcctgggaaagtttgggcagagggccctggatttctacagcattcatgtgaccaaggagtccacccaccccgtgaagcccctggcccagatcgccggaaacagatacgcctccggacctgtgggaaaggccctgagcgacgcatgtatgggcacaatcgcctccttcctgtctaagtaccaggacatcatcatcgaacaccagaaggtggtgaagggcaaccagaagagactggagagcctgcgggagctggccggcaaggaaaacctggaataccctagcgtgaccctgccacctcagcctcacaccaaggagggcgttgatgcctacaacgaagtgatcgcccgggtgcgaatgtgggtgaacctgaacctgtggcagaagctgaagctaagcagagatgatgccaagcctctgctgagactgaagggattcccttcctttcctctggtcgagagacaggccaacgaagtggactggtgggacatggtgtgtaacgtgaagaagctgatcaacgagaaaaaggaggatggcaaggtgttttggcagaatctggctggctacaagagacaggaagccctgagaccatacctgagcagcgaggaagatcggaagaagggaaagaaattcgctcggtaccagctgggcgacctgctgctgcacctggaaaagaagcacggcgaggactggggaaaggtgtacgacgaggcctgggagcggattgacaagaaagtggaaggcctgagcaagcacatcaagctggaagaggaacggagaagcgaggacgcccagagcaaggccgccctgaccgactggctgcgggctaaggccagcttcgtgatcgagggcctgaaggaggccgacaaggacgagttctgcagatgcgagctgaagctgcagaagtggtacggggacctgcggggaaagcccttcgccatcgaagccgagaacagcatcctggacatcagcggcttcagcaagcagtacaactgtgccttcatctggcagaaggacggcgtgaagaagctgaacctgtacctgatcatcaactacttcaagggcggcaagctgcggttcaagaagatcaaacctgaagccttcgaagccaacagattctacaccgtgatcaacaaaaagagcggcgagatcgtgcccatggaggtgaacttcaacttcgacgaccccaacctgatcatcctgcctctggcctttggcaagagacagggcagagaattcatctggaacgacctgctgtccctggaaaccggcagcctgaagctggccaacggaagagtgatcgagaagacactgtacaacagaagaacccggcaggatgagcctgccctgttcgtggccctgaccttcgagcggcgggaggtcctggactcctccaatatcaaaccaatgaacctgatcggcgtggcaagaggcgaaaacatccccgccgtgatcgccctgaccgaccccgagggctgcccactgagccggtttaaggatagcctgggaaacccaacccacatcctgagaatcggcgagagctataaggagaagcagcggaccatccaggccaagaaggaggtggagcagcggagagccggcggctacagccggaagtacgccagcaaagccaagaatctggcagacgatatggtgagaaacaccgctagagatctgctgtactacgccgtgacccaggatgccatgctgatcttcgccaacctgagccggggcttcggccggcagggcaagcggaccttcatggccgagagacagtacacacggatggaggactggctgaccgccaagctggcctacgagggcctgagcaagacctacctgtccaagacactggcccagtacacctccaagacatgcagcaactgtgggtttaccatcaccagcgccgactacgacagggtgctggagaagctgaagaagacagcaacaggctggatgaccacaattaacggcaaggagctgaaggtggagggccagattacctactacaacagatacaagagacagaacgtagtcaaggacctgtccgtcgagctggatagactgagcgaagaatctgtgaacaacgacatctcctcctggacaaagggcagaagcggagaagctctgagcctcctgaagaaaagattctcccatagacccgtgcaggagaagttcgtgtgcctgaactgcggcttcgagacacacgcagccgagcaagccgccctgaacatcgccagatcctggctgttcctgcggagccaggagtacaagaaataccagacaaacaagacaaccggcaacaccgataagagagccttcgtcgagacctggcagtccttttaccggaagaagcttaaggaggtgtggaaacctgccgtgcggtctggcggatctggcggaggctccaccagccccaagaaaaagagaaaagtctaagctgccttctgcggggcttgccttctggccatgcccttcttctctcccttgcacctgtacctcttggtctttgaataaagcctgagtaggaaggctagcaaaaaaaaaaaaaaaaaaaaaaaaaaaaaaaaaaaaaaaaaaaaaaaaaaaaaaaaaaaaaaaaaaaaaaaaaaaaaaaa

SEQ ID NO: 12534 - RNA, 5785 nt, synthetic construct
  source 1..5785: mol_type = other RNA
aggaaataagagagaaaagaagagtaagaagaaatataagagccaccatggcccctaagaagaagcgtaaagtgagccggatggaacgcctcgtctacgaggtgcggcagaagtgcagaaacatcgaggacatctgcatctcctgcggatctctgaacgtgaccctggagcacccactgttcatcggcggcatgtgccagaactgtaaaaactgttttctggagtgtgcctatcaatacgacgatgacggctaccagagctactgcaccatctgttgcggcggaagagaggtgctgatgtgtggaaataacaactgctgccggtgcttctgcgtggaatgcgtggacctgctggtgggccccggcgccgcccaggccgctattaaggaagatccttggaactgctacatgtgcggccacaagggcacatacggcctgctgagacggagagaggactggcctagcagactgcagatgttcttcgccaataaccacgaccaggagttcgacccccctaaggtgtaccctcccgtccccgccgagaagagaaagcccatccgggtcctgagcctgttcgatggcatcgccaccggtctgctggtgctgaaggacctgggcatccaggtggataggtacattgcctccgaggtgtgcgaggactccatcaccgtgggaatggtgcgtcatcagggcaagatcatgtacgtgggcgacgtgcggagcgtgacacagaagcatatccaggagtggggccctttcgacctggtgatcggcggcagcccttgcaatgacctgagcatcgtgaacccagcccggaagggcctgtacgagggaaccggcagactgttcttcgagttttacagactgctgcacgacgcccggcctaaggaaggcgacgaccggcccttcttttggctgttcgagaatgtggtggccatgggagtcagcgacaagcgggatattagccggttcctggagagcaaccccgtgatgatcgatgccaaggaagtgagcgccgcccaccgggccagatacttctggggcaatctgcctggcatgaacagacccctggccagcaccgtgaacgacaagctggagctgcaggagtgcctggagcacggccggatcgccaagttcagcaaggtgagaaccatcaccacccgaagcaacagcatcaaacaaggcaaggaccagcactttcctgtgttcatgaacgagaaggaggacatcctgtggtgtaccgagatggagagagtgttcgggttcccagtccactacacagatgtcagcaacatgtctagactggccagacagagactgctgggaagaagctggtccgtccctgtgatcagacacctgttcgcccctctgaaggagtacttcgcctgcgtgagcagcggcaacagcaacgccaacagccggggccccagcttctctagcggcctggtgccactgtccctgagagggagccacatgggccccatggagatctacaaaaccgtgagcgcctggaagcggcagcctgtgcgcgtgctgagcctgtttcggaatatcgataaagtcctgaaaagcctgggattcctggagagcggctctggctccggcggtggcaccctgaagtacgtggaggatgtgacaaacgtggtcagacgggatgtggagaagtggggccccttcgatctggtgtacggcagcacccaacccctgggcagctcttgtgaccggtgccctggctggtacatgtttcagttccaccggatcctgcagtacgccctgccgagacaggagtcccagcggccattcttttggattttcatggacaacttgctgctgaccgaggatgaccaggaaactaccactcggttcctgcagaccgaagccgtgaccctgcaggacgtgagaggccgggactaccagaacgccatgcgggtgtggtccaacatccctggactgaaaagcaagcacgcacctctgacccctaaagaagaggagtacctgcaggcccaggtgcggagcagaagcaagctggacgcccctaaggtggatctgctggtgaagaattgcctcctgcccctgagagagtacttcaagtatttcagccagaatagtctgcccctgggaggcagcggcggcggcatggccctgaggagcgtgatgttcagcgacgtgagcatcgacttcagccccgaggagtgggagtacctggacctggagcagaaggacctgtacagggacgtgatgctggagaactacagcaacctggtgagcctggccggctgcttcatcagcaagcccgacgtgatcagcagcctggagcagggcaaggagccctggaaggtggtgaggaagggcaggaggcagtaccccgacctggagaccggcggcccaagcagcggcgcccctcctcccagcggcggcagcccagccggctccccaacctctaccgaggagggcacctctgagtccgccacccccgagagcggccctggcacctccaccgagcccagcgagggcagcgcacccggcagccctgccggcagccccacctccacagaggagggaaccagcaccgagcccagcgaaggcagcgccccaggcaccagcaccgagcctagtgagcaggagattaaacggatcaacaagatcagaagaagacttgtgaaagacagcaacaccaagaaggccggcaagacaggccccatgaaaaccctgctggttagagtgatgacacccgatctgagagagcggctggaaaacctgagaaagaagcctgaaaatatcccccagcccatcagcaatacatctagagccaacctgaataagctgctgaccgattacaccgaaatgaagaaggcgatcctgcatgtgtactgggaagagttccagaaggaccctgtgggcctgatgagccgggtggcccagcctgccagcaagaagatcgatcagaacaagctgaaacctgagatggacgagaagggcaacctgaccaccgccggctttgcctgctctcagtgtggccagcccctgttcgtgtacaagctggagcaggtgtctgagaagggcaaggcttacaccaactacttcggacggtgcaatgtggccgagcacgaaaagctgatcctgctggcccagctgaagcccgagaaggatagcgacgaagccgtgacatatagcctgggaaagtttgggcagagggccctggatttctacagcattcatgtgaccaaggagtccacccaccccgtgaagcccctggcccagatcgccggaaacagatacgcctccggacctgtgggaaaggccctgagcgacgcatgtatgggcacaatcgcctccttcctgtctaagtaccaggacatcatcatcgaacaccagaaggtggtgaagggcaaccagaagagactggagagcctgcgggagctggccggcaaggaaaacctggaataccctagcgtgaccctgccacctcagcctcacaccaaggagggcgttgatgcctacaacgaagtgatcgcccgggtgcgaatgtgggtgaacctgaacctgtggcagaagctgaagctaagcagagatgatgccaagcctctgctgagactgaagggattcccttcctttcctctggtcgagagacaggccaacgaagtggactggtgggacatggtgtgtaacgtgaagaagctgatcaacgagaaaaaggaggatggcaaggtgttttggcagaatctggctggctacaagagacaggaagccctgagaccatacctgagcagcgaggaagatcggaagaagggaaagaaattcgctcggtaccagctgggcgacctgctgctgcacctggaaaagaagcacggcgaggactggggaaaggtgtacgacgaggcctgggagcggattgacaagaaagtggaaggcctgagcaagcacatcaagctggaagaggaacggagaagcgaggacgcccagagcaaggccgccctgaccgactggctgcgggctaaggccagcttcgtgatcgagggcctgaaggaggccgacaaggacgagttctgcagatgcgagctgaagctgcagaagtggtacggggacctgcggggaaagcccttcgccatcgaagccgagaacagcatcctggacatcagcggcttcagcaagcagtacaactgtgccttcatctggcagaaggacggcgtgaagaagctgaacctgtacctgatcatcaactacttcaagggcggcaagctgcggttcaagaagatcaaacctgaagccttcgaagccaacagattctacaccgtgatcaacaaaaagagcggcgagatcgtgcccatggaggtgaacttcaacttcgacgaccccaacctgatcatcctgcctctggcctttggcaagagacagggcagagaattcatctggaacgacctgctgtccctggaaaccggcagcctgaagctggccaacggaagagtgatcgagaagacactgtacaacagaagaacccggcaggatgagcctgccctgttcgtggccctgaccttcgagcggcgggaggtcctggactcctccaatatcaaaccaatgaacctgatcggcgtggcaagaggcgaaaacatccccgccgtgatcgccctgaccgaccccgagggctgcccactgagccggtttaaggatagcctgggaaacccaacccacatcctgagaatcggcgagagctataaggagaagcagcggaccatccaggccaagaaggaggtggagcagcggagagccggcggctacagccggaagtacgccagcaaagccaagaatctggcagacgatatggtgagaaacaccgctagagatctgctgtactacgccgtgacccaggatgccatgctgatcttcgccaacctgagccggggcttcggccggcagggcaagcggaccttcatggccgagagacagtacacacggatggaggactggctgaccgccaagctggcctacgagggcctgagcaagacctacctgtccaagacactggcccagtacacctccaagacatgcagcaactgtgggtttaccatcaccagcgccgactacgacagggtgctggagaagctgaagaagacagcaacaggctggatgaccacaattaacggcaaggagctgaaggtggagggccagattacctactacaacagatacaagagacagaacgtagtcaaggacctgtccgtcgagctggatagactgagcgaagaatctgtgaacaacgacatctcctcctggacaaagggcagaagcggagaagctctgagcctcctgaagaaaagattctcccatagacccgtgcaggagaagttcgtgtgcctgaactgcggcttcgagacacacgcagccgagcaagccgccctgaacatcgccagatcctggctgttcctgcggagccaggagtacaagaaataccagacaaacaagacaaccggcaacaccgataagagagccttcgtcgagacctggcagtccttttaccggaagaagcttaaggaggtgtggaaacctgccgtgcggtctggcggatctggcggaggctccaccagccccaagaaaaagagaaaagtctaagctgccttctgcggggcttgccttctggccatgcccttcttctctcccttgcacctgtacctcttggtctttgaataaagcctgagtaggaaggctagcaaaaaaaaaaaaaaaaaaaaaaaaaaaaaaaaaaaaaaaaaaaaaaaaaaaaaaaaaaaaaaaaaaaaaaaaaaaaaaaa

SEQ ID NO: 12535 - RNA, 5785 nt, synthetic construct
  source 1..5785: mol_type = other RNA
aggaaataagagagaaaagaagagtaagaagaaatataagagccaccatggcccctaagaagaagcgtaaagtgagccggatggaacgcctcgtctacgaggtgcggcagaagtgcagaaacatcgaggacatctgcatctcctgcggatctctgaacgtgaccctggagcacccactgttcatcggcggcatgtgccagaactgtaaaaactgttttctggagtgtgcctatcaatacgacgatgacggctaccagagctactgcaccatctgttgcggcggaagagaggtgctgatgtgtggaaataacaactgctgccggtgcttctgcgtggaatgcgtggacctgctggtgggccccggcgccgcccaggccgctattaaggaagatccttggaactgctacatgtgcggccacaagggcacatacggcctgctgagacggagagaggactggcctagcagactgcagatgttcttcgccaataaccacgaccaggagttcgacccccctaaggtgtaccctcccgtccccgccgagaagagaaagcccatccgggtcctgagcctgttcgatggcatcgccaccggtctgctggtgctgaaggacctgggcatccaggtggataggtacattgcctccgaggtgtgcgaggactccatcaccgtgggaatggtgcgtcatcagggcaagatcatgtacgtgggcgacgtgcggagcgtgacacagaagcatatccaggagtggggccctttcgacctggtgatcggcggcagcccttgcaatgacctgagcatcgtgaacccagcccggaagggcctgtacgagggaaccggcagactgttcttcgagttttacagactgctgcacgacgcccggcctaaggaaggcgacgaccggcccttcttttggctgttcgagaatgtggtggccatgggagtcagcgacaagcgggatattagccggttcctggagagcaaccccgtgatgatcgatgccaaggaagtgagcgccgcccaccgggccagatacttctggggcaatctgcctggcatgaacagacccctggccagcaccgtgaacgacaagctggagctgcaggagtgcctggagcacggccggatcgccaagttcagcaaggtgagaaccatcaccacccgaagcaacagcatcaaacaaggcaaggaccagcactttcctgtgttcatgaacgagaaggaggacatcctgtggtgtaccgagatggagagagtgttcgggttcccagtccactacacagatgtcagcaacatgtctagactggccagacagagactgctgggaagaagctggtccgtccctgtgatcagacacctgttcgcccctctgaaggagtacttcgcctgcgtgagcagcggcaacagcaacgccaacagccggggccccagcttctctagcggcctggtgccactgtccctgagagggagccacatgggccccatggagatctacaaaaccgtgagcgcctggaagcggcagcctgtgcgcgtgctgagcctgtttcggaatatcgataaagtcctgaaaagcctgggattcctggagagcggctctggctccggcggtggcaccctgaagtacgtggaggatgtgacaaacgtggtcagacgggatgtggagaagtggggccccttcgatctggtgtacggcagcacccaacccctgggcagctcttgtgaccggtgccctggctggtacatgtttcagttccaccggatcctgcagtacgccctgccgagacaggagtcccagcggccattcttttggattttcatggacaacttgctgctgaccgaggatgaccaggaaactaccactcggttcctgcagaccgaagccgtgaccctgcaggacgtgagaggccgggactaccagaacgccatgcgggtgtggtccaacatccctggactgaaaagcaagcacgcacctctgacccctaaagaagaggagtacctgcaggcccaggtgcggagcagaagcaagctggacgcccctaaggtggatctgctggtgaagaattgcctcctgcccctgagagagtacttcaagtatttcagccagaatagtctgcccctgggaggcagcggcggcggcggccaggaggaggtggccttcaaggacgtggccgtggacttcaccagggaggagtggaggctgctgagccccccccagaaggagctgtacaaggaggtgatgctggagaacatcaggaacctgctgagcgtgggcctgcccgccccccccgaggacatgatcagctacctggagcagagggaggccccctggatgctggagcaggagggcctgaggagctacagccccggcgaggagatcaggggcggcccaagcagcggcgcccctcctcccagcggcggcagcccagccggctccccaacctctaccgaggagggcacctctgagtccgccacccccgagagcggccctggcacctccaccgagcccagcgagggcagcgcacccggcagccctgccggcagccccacctccacagaggagggaaccagcaccgagcccagcgaaggcagcgccccaggcaccagcaccgagcctagtgagcaggagattaaacggatcaacaagatcagaagaagacttgtgaaagacagcaacaccaagaaggccggcaagacaggccccatgaaaaccctgctggttagagtgatgacacccgatctgagagagcggctggaaaacctgagaaagaagcctgaaaatatcccccagcccatcagcaatacatctagagccaacctgaataagctgctgaccgattacaccgaaatgaagaaggcgatcctgcatgtgtactgggaagagttccagaaggaccctgtgggcctgatgagccgggtggcccagcctgccagcaagaagatcgatcagaacaagctgaaacctgagatggacgagaagggcaacctgaccaccgccggctttgcctgctctcagtgtggccagcccctgttcgtgtacaagctggagcaggtgtctgagaagggcaaggcttacaccaactacttcggacggtgcaatgtggccgagcacgaaaagctgatcctgctggcccagctgaagcccgagaaggatagcgacgaagccgtgacatatagcctgggaaagtttgggcagagggccctggatttctacagcattcatgtgaccaaggagtccacccaccccgtgaagcccctggcccagatcgccggaaacagatacgcctccggacctgtgggaaaggccctgagcgacgcatgtatgggcacaatcgcctccttcctgtctaagtaccaggacatcatcatcgaacaccagaaggtggtgaagggcaaccagaagagactggagagcctgcgggagctggccggcaaggaaaacctggaataccctagcgtgaccctgccacctcagcctcacaccaaggagggcgttgatgcctacaacgaagtgatcgcccgggtgcgaatgtgggtgaacctgaacctgtggcagaagctgaagctaagcagagatgatgccaagcctctgctgagactgaagggattcccttcctttcctctggtcgagagacaggccaacgaagtggactggtgggacatggtgtgtaacgtgaagaagctgatcaacgagaaaaaggaggatggcaaggtgttttggcagaatctggctggctacaagagacaggaagccctgagaccatacctgagcagcgaggaagatcggaagaagggaaagaaattcgctcggtaccagctgggcgacctgctgctgcacctggaaaagaagcacggcgaggactggggaaaggtgtacgacgaggcctgggagcggattgacaagaaagtggaaggcctgagcaagcacatcaagctggaagaggaacggagaagcgaggacgcccagagcaaggccgccctgaccgactggctgcgggctaaggccagcttcgtgatcgagggcctgaaggaggccgacaaggacgagttctgcagatgcgagctgaagctgcagaagtggtacggggacctgcggggaaagcccttcgccatcgaagccgagaacagcatcctggacatcagcggcttcagcaagcagtacaactgtgccttcatctggcagaaggacggcgtgaagaagctgaacctgtacctgatcatcaactacttcaagggcggcaagctgcggttcaagaagatcaaacctgaagccttcgaagccaacagattctacaccgtgatcaacaaaaagagcggcgagatcgtgcccatggaggtgaacttcaacttcgacgaccccaacctgatcatcctgcctctggcctttggcaagagacagggcagagaattcatctggaacgacctgctgtccctggaaaccggcagcctgaagctggccaacggaagagtgatcgagaagacactgtacaacagaagaacccggcaggatgagcctgccctgttcgtggccctgaccttcgagcggcgggaggtcctggactcctccaatatcaaaccaatgaacctgatcggcgtggcaagaggcgaaaacatccccgccgtgatcgccctgaccgaccccgagggctgcccactgagccggtttaaggatagcctgggaaacccaacccacatcctgagaatcggcgagagctataaggagaagcagcggaccatccaggccaagaaggaggtggagcagcggagagccggcggctacagccggaagtacgccagcaaagccaagaatctggcagacgatatggtgagaaacaccgctagagatctgctgtactacgccgtgacccaggatgccatgctgatcttcgccaacctgagccggggcttcggccggcagggcaagcggaccttcatggccgagagacagtacacacggatggaggactggctgaccgccaagctggcctacgagggcctgagcaagacctacctgtccaagacactggcccagtacacctccaagacatgcagcaactgtgggtttaccatcaccagcgccgactacgacagggtgctggagaagctgaagaagacagcaacaggctggatgaccacaattaacggcaaggagctgaaggtggagggccagattacctactacaacagatacaagagacagaacgtagtcaaggacctgtccgtcgagctggatagactgagcgaagaatctgtgaacaacgacatctcctcctggacaaagggcagaagcggagaagctctgagcctcctgaagaaaagattctcccatagacccgtgcaggagaagttcgtgtgcctgaactgcggcttcgagacacacgcagccgagcaagccgccctgaacatcgccagatcctggctgttcctgcggagccaggagtacaagaaataccagacaaacaagacaaccggcaacaccgataagagagccttcgtcgagacctggcagtccttttaccggaagaagcttaaggaggtgtggaaacctgccgtgcggtctggcggatctggcggaggctccaccagccccaagaaaaagagaaaagtctaagctgccttctgcggggcttgccttctggccatgcccttcttctctcccttgcacctgtacctcttggtctttgaataaagcctgagtaggaaggctagcaaaaaaaaaaaaaaaaaaaaaaaaaaaaaaaaaaaaaaaaaaaaaaaaaaaaaaaaaaaaaaaaaaaaaaaaaaaaaaaa

SEQ ID NO: 12536 - RNA, 5785 nt, synthetic construct
  source 1..5785: mol_type = other RNA
aggaaataagagagaaaagaagagtaagaagaaatataagagccaccatggcccctaagaagaagcgtaaagtgagccggatggaacgcctcgtctacgaggtgcggcagaagtgcagaaacatcgaggacatctgcatctcctgcggatctctgaacgtgaccctggagcacccactgttcatcggcggcatgtgccagaactgtaaaaactgttttctggagtgtgcctatcaatacgacgatgacggctaccagagctactgcaccatctgttgcggcggaagagaggtgctgatgtgtggaaataacaactgctgccggtgcttctgcgtggaatgcgtggacctgctggtgggccccggcgccgcccaggccgctattaaggaagatccttggaactgctacatgtgcggccacaagggcacatacggcctgctgagacggagagaggactggcctagcagactgcagatgttcttcgccaataaccacgaccaggagttcgacccccctaaggtgtaccctcccgtccccgccgagaagagaaagcccatccgggtcctgagcctgttcgatggcatcgccaccggtctgctggtgctgaaggacctgggcatccaggtggataggtacattgcctccgaggtgtgcgaggactccatcaccgtgggaatggtgcgtcatcagggcaagatcatgtacgtgggcgacgtgcggagcgtgacacagaagcatatccaggagtggggccctttcgacctggtgatcggcggcagcccttgcaatgacctgagcatcgtgaacccagcccggaagggcctgtacgagggaaccggcagactgttcttcgagttttacagactgctgcacgacgcccggcctaaggaaggcgacgaccggcccttcttttggctgttcgagaatgtggtggccatgggagtcagcgacaagcgggatattagccggttcctggagagcaaccccgtgatgatcgatgccaaggaagtgagcgccgcccaccgggccagatacttctggggcaatctgcctggcatgaacagacccctggccagcaccgtgaacgacaagctggagctgcaggagtgcctggagcacggccggatcgccaagttcagcaaggtgagaaccatcaccacccgaagcaacagcatcaaacaaggcaaggaccagcactttcctgtgttcatgaacgagaaggaggacatcctgtggtgtaccgagatggagagagtgttcgggttcccagtccactacacagatgtcagcaacatgtctagactggccagacagagactgctgggaagaagctggtccgtccctgtgatcagacacctgttcgcccctctgaaggagtacttcgcctgcgtgagcagcggcaacagcaacgccaacagccggggccccagcttctctagcggcctggtgccactgtccctgagagggagccacatgggccccatggagatctacaaaaccgtgagcgcctggaagcggcagcctgtgcgcgtgctgagcctgtttcggaatatcgataaagtcctgaaaagcctgggattcctggagagcggctctggctccggcggtggcaccctgaagtacgtggaggatgtgacaaacgtggtcagacgggatgtggagaagtggggccccttcgatctggtgtacggcagcacccaacccctgggcagctcttgtgaccggtgccctggctggtacatgtttcagttccaccggatcctgcagtacgccctgccgagacaggagtcccagcggccattcttttggattttcatggacaacttgctgctgaccgaggatgaccaggaaactaccactcggttcctgcagaccgaagccgtgaccctgcaggacgtgagaggccgggactaccagaacgccatgcgggtgtggtccaacatccctggactgaaaagcaagcacgcacctctgacccctaaagaagaggagtacctgcaggcccaggtgcggagcagaagcaagctggacgcccctaaggtggatctgctggtgaagaattgcctcctgcccctgagagagtacttcaagtatttcagccagaatagtctgcccctgggaggcagcggcggcggcagccagggcagcgtgaccttcagggacgtggccatcgacttcagccaggaggagtgggagtggctgcagcccacccagagggacctgtacaggcacgtgatgctggagaactacagccacctggtgagcctgggcctgaacatcagcaagccctacgtggtgagcctgctggagcagggcaaggagccctggctggagaagaggggcgtgaggaggaacctgttcagcgagcccaacagggagggcggcccaagcagcggcgcccctcctcccagcggcggcagcccagccggctccccaacctctaccgaggagggcacctctgagtccgccacccccgagagcggccctggcacctccaccgagcccagcgagggcagcgcacccggcagccctgccggcagccccacctccacagaggagggaaccagcaccgagcccagcgaaggcagcgccccaggcaccagcaccgagcctagtgagcaggagattaaacggatcaacaagatcagaagaagacttgtgaaagacagcaacaccaagaaggccggcaagacaggccccatgaaaaccctgctggttagagtgatgacacccgatctgagagagcggctggaaaacctgagaaagaagcctgaaaatatcccccagcccatcagcaatacatctagagccaacctgaataagctgctgaccgattacaccgaaatgaagaaggcgatcctgcatgtgtactgggaagagttccagaaggaccctgtgggcctgatgagccgggtggcccagcctgccagcaagaagatcgatcagaacaagctgaaacctgagatggacgagaagggcaacctgaccaccgccggctttgcctgctctcagtgtggccagcccctgttcgtgtacaagctggagcaggtgtctgagaagggcaaggcttacaccaactacttcggacggtgcaatgtggccgagcacgaaaagctgatcctgctggcccagctgaagcccgagaaggatagcgacgaagccgtgacatatagcctgggaaagtttgggcagagggccctggatttctacagcattcatgtgaccaaggagtccacccaccccgtgaagcccctggcccagatcgccggaaacagatacgcctccggacctgtgggaaaggccctgagcgacgcatgtatgggcacaatcgcctccttcctgtctaagtaccaggacatcatcatcgaacaccagaaggtggtgaagggcaaccagaagagactggagagcctgcgggagctggccggcaaggaaaacctggaataccctagcgtgaccctgccacctcagcctcacaccaaggagggcgttgatgcctacaacgaagtgatcgcccgggtgcgaatgtgggtgaacctgaacctgtggcagaagctgaagctaagcagagatgatgccaagcctctgctgagactgaagggattcccttcctttcctctggtcgagagacaggccaacgaagtggactggtgggacatggtgtgtaacgtgaagaagctgatcaacgagaaaaaggaggatggcaaggtgttttggcagaatctggctggctacaagagacaggaagccctgagaccatacctgagcagcgaggaagatcggaagaagggaaagaaattcgctcggtaccagctgggcgacctgctgctgcacctggaaaagaagcacggcgaggactggggaaaggtgtacgacgaggcctgggagcggattgacaagaaagtggaaggcctgagcaagcacatcaagctggaagaggaacggagaagcgaggacgcccagagcaaggccgccctgaccgactggctgcgggctaaggccagcttcgtgatcgagggcctgaaggaggccgacaaggacgagttctgcagatgcgagctgaagctgcagaagtggtacggggacctgcggggaaagcccttcgccatcgaagccgagaacagcatcctggacatcagcggcttcagcaagcagtacaactgtgccttcatctggcagaaggacggcgtgaagaagctgaacctgtacctgatcatcaactacttcaagggcggcaagctgcggttcaagaagatcaaacctgaagccttcgaagccaacagattctacaccgtgatcaacaaaaagagcggcgagatcgtgcccatggaggtgaacttcaacttcgacgaccccaacctgatcatcctgcctctggcctttggcaagagacagggcagagaattcatctggaacgacctgctgtccctggaaaccggcagcctgaagctggccaacggaagagtgatcgagaagacactgtacaacagaagaacccggcaggatgagcctgccctgttcgtggccctgaccttcgagcggcgggaggtcctggactcctccaatatcaaaccaatgaacctgatcggcgtggcaagaggcgaaaacatccccgccgtgatcgccctgaccgaccccgagggctgcccactgagccggtttaaggatagcctgggaaacccaacccacatcctgagaatcggcgagagctataaggagaagcagcggaccatccaggccaagaaggaggtggagcagcggagagccggcggctacagccggaagtacgccagcaaagccaagaatctggcagacgatatggtgagaaacaccgctagagatctgctgtactacgccgtgacccaggatgccatgctgatcttcgccaacctgagccggggcttcggccggcagggcaagcggaccttcatggccgagagacagtacacacggatggaggactggctgaccgccaagctggcctacgagggcctgagcaagacctacctgtccaagacactggcccagtacacctccaagacatgcagcaactgtgggtttaccatcaccagcgccgactacgacagggtgctggagaagctgaagaagacagcaacaggctggatgaccacaattaacggcaaggagctgaaggtggagggccagattacctactacaacagatacaagagacagaacgtagtcaaggacctgtccgtcgagctggatagactgagcgaagaatctgtgaacaacgacatctcctcctggacaaagggcagaagcggagaagctctgagcctcctgaagaaaagattctcccatagacccgtgcaggagaagttcgtgtgcctgaactgcggcttcgagacacacgcagccgagcaagccgccctgaacatcgccagatcctggctgttcctgcggagccaggagtacaagaaataccagacaaacaagacaaccggcaacaccgataagagagccttcgtcgagacctggcagtccttttaccggaagaagcttaaggaggtgtggaaacctgccgtgcggtctggcggatctggcggaggctccaccagccccaagaaaaagagaaaagtctaagctgccttctgcggggcttgccttctggccatgcccttcttctctcccttgcacctgtacctcttggtctttgaataaagcctgagtaggaaggctagcaaaaaaaaaaaaaaaaaaaaaaaaaaaaaaaaaaaaaaaaaaaaaaaaaaaaaaaaaaaaaaaaaaaaaaaaaaaaaaaa

SEQ ID NO: 12537 - RNA, 5785 nt, synthetic construct
  source 1..5785: mol_type = other RNA
aggaaataagagagaaaagaagagtaagaagaaatataagagccaccatggcccctaagaagaagcgtaaagtgagccggatggaacgcctcgtctacgaggtgcggcagaagtgcagaaacatcgaggacatctgcatctcctgcggatctctgaacgtgaccctggagcacccactgttcatcggcggcatgtgccagaactgtaaaaactgttttctggagtgtgcctatcaatacgacgatgacggctaccagagctactgcaccatctgttgcggcggaagagaggtgctgatgtgtggaaataacaactgctgccggtgcttctgcgtggaatgcgtggacctgctggtgggccccggcgccgcccaggccgctattaaggaagatccttggaactgctacatgtgcggccacaagggcacatacggcctgctgagacggagagaggactggcctagcagactgcagatgttcttcgccaataaccacgaccaggagttcgacccccctaaggtgtaccctcccgtccccgccgagaagagaaagcccatccgggtcctgagcctgttcgatggcatcgccaccggtctgctggtgctgaaggacctgggcatccaggtggataggtacattgcctccgaggtgtgcgaggactccatcaccgtgggaatggtgcgtcatcagggcaagatcatgtacgtgggcgacgtgcggagcgtgacacagaagcatatccaggagtggggccctttcgacctggtgatcggcggcagcccttgcaatgacctgagcatcgtgaacccagcccggaagggcctgtacgagggaaccggcagactgttcttcgagttttacagactgctgcacgacgcccggcctaaggaaggcgacgaccggcccttcttttggctgttcgagaatgtggtggccatgggagtcagcgacaagcgggatattagccggttcctggagagcaaccccgtgatgatcgatgccaaggaagtgagcgccgcccaccgggccagatacttctggggcaatctgcctggcatgaacagacccctggccagcaccgtgaacgacaagctggagctgcaggagtgcctggagcacggccggatcgccaagttcagcaaggtgagaaccatcaccacccgaagcaacagcatcaaacaaggcaaggaccagcactttcctgtgttcatgaacgagaaggaggacatcctgtggtgtaccgagatggagagagtgttcgggttcccagtccactacacagatgtcagcaacatgtctagactggccagacagagactgctgggaagaagctggtccgtccctgtgatcagacacctgttcgcccctctgaaggagtacttcgcctgcgtgagcagcggcaacagcaacgccaacagccggggccccagcttctctagcggcctggtgccactgtccctgagagggagccacatgggccccatggagatctacaaaaccgtgagcgcctggaagcggcagcctgtgcgcgtgctgagcctgtttcggaatatcgataaagtcctgaaaagcctgggattcctggagagcggctctggctccggcggtggcaccctgaagtacgtggaggatgtgacaaacgtggtcagacgggatgtggagaagtggggccccttcgatctggtgtacggcagcacccaacccctgggcagctcttgtgaccggtgccctggctggtacatgtttcagttccaccggatcctgcagtacgccctgccgagacaggagtcccagcggccattcttttggattttcatggacaacttgctgctgaccgaggatgaccaggaaactaccactcggttcctgcagaccgaagccgtgaccctgcaggacgtgagaggccgggactaccagaacgccatgcgggtgtggtccaacatccctggactgaaaagcaagcacgcacctctgacccctaaagaagaggagtacctgcaggcccaggtgcggagcagaagcaagctggacgcccctaaggtggatctgctggtgaagaattgcctcctgcccctgagagagtacttcaagtatttcagccagaatagtctgcccctgggaggcagcggcggcggcctgcaggaggccatcgtgttcgaggacgtggccgtgtacttcaccaggatcgagtggagctgcctggccccccaccagagggccctgtacagggacgtgatgctggagaactacggccacatggccagcctgggcttcctggtggccaagcccgccctgatcagcctgctggagcagggcgaggagcccggcgccctgatcctgcagggcaccgaggagcagggcagcaccgccagcctgtgcggcggcccaagcagcggcgcccctcctcccagcggcggcagcccagccggctccccaacctctaccgaggagggcacctctgagtccgccacccccgagagcggccctggcacctccaccgagcccagcgagggcagcgcacccggcagccctgccggcagccccacctccacagaggagggaaccagcaccgagcccagcgaaggcagcgccccaggcaccagcaccgagcctagtgagcaggagattaaacggatcaacaagatcagaagaagacttgtgaaagacagcaacaccaagaaggccggcaagacaggccccatgaaaaccctgctggttagagtgatgacacccgatctgagagagcggctggaaaacctgagaaagaagcctgaaaatatcccccagcccatcagcaatacatctagagccaacctgaataagctgctgaccgattacaccgaaatgaagaaggcgatcctgcatgtgtactgggaagagttccagaaggaccctgtgggcctgatgagccgggtggcccagcctgccagcaagaagatcgatcagaacaagctgaaacctgagatggacgagaagggcaacctgaccaccgccggctttgcctgctctcagtgtggccagcccctgttcgtgtacaagctggagcaggtgtctgagaagggcaaggcttacaccaactacttcggacggtgcaatgtggccgagcacgaaaagctgatcctgctggcccagctgaagcccgagaaggatagcgacgaagccgtgacatatagcctgggaaagtttgggcagagggccctggatttctacagcattcatgtgaccaaggagtccacccaccccgtgaagcccctggcccagatcgccggaaacagatacgcctccggacctgtgggaaaggccctgagcgacgcatgtatgggcacaatcgcctccttcctgtctaagtaccaggacatcatcatcgaacaccagaaggtggtgaagggcaaccagaagagactggagagcctgcgggagctggccggcaaggaaaacctggaataccctagcgtgaccctgccacctcagcctcacaccaaggagggcgttgatgcctacaacgaagtgatcgcccgggtgcgaatgtgggtgaacctgaacctgtggcagaagctgaagctaagcagagatgatgccaagcctctgctgagactgaagggattcccttcctttcctctggtcgagagacaggccaacgaagtggactggtgggacatggtgtgtaacgtgaagaagctgatcaacgagaaaaaggaggatggcaaggtgttttggcagaatctggctggctacaagagacaggaagccctgagaccatacctgagcagcgaggaagatcggaagaagggaaagaaattcgctcggtaccagctgggcgacctgctgctgcacctggaaaagaagcacggcgaggactggggaaaggtgtacgacgaggcctgggagcggattgacaagaaagtggaaggcctgagcaagcacatcaagctggaagaggaacggagaagcgaggacgcccagagcaaggccgccctgaccgactggctgcgggctaaggccagcttcgtgatcgagggcctgaaggaggccgacaaggacgagttctgcagatgcgagctgaagctgcagaagtggtacggggacctgcggggaaagcccttcgccatcgaagccgagaacagcatcctggacatcagcggcttcagcaagcagtacaactgtgccttcatctggcagaaggacggcgtgaagaagctgaacctgtacctgatcatcaactacttcaagggcggcaagctgcggttcaagaagatcaaacctgaagccttcgaagccaacagattctacaccgtgatcaacaaaaagagcggcgagatcgtgcccatggaggtgaacttcaacttcgacgaccccaacctgatcatcctgcctctggcctttggcaagagacagggcagagaattcatctggaacgacctgctgtccctggaaaccggcagcctgaagctggccaacggaagagtgatcgagaagacactgtacaacagaagaacccggcaggatgagcctgccctgttcgtggccctgaccttcgagcggcgggaggtcctggactcctccaatatcaaaccaatgaacctgatcggcgtggcaagaggcgaaaacatccccgccgtgatcgccctgaccgaccccgagggctgcccactgagccggtttaaggatagcctgggaaacccaacccacatcctgagaatcggcgagagctataaggagaagcagcggaccatccaggccaagaaggaggtggagcagcggagagccggcggctacagccggaagtacgccagcaaagccaagaatctggcagacgatatggtgagaaacaccgctagagatctgctgtactacgccgtgacccaggatgccatgctgatcttcgccaacctgagccggggcttcggccggcagggcaagcggaccttcatggccgagagacagtacacacggatggaggactggctgaccgccaagctggcctacgagggcctgagcaagacctacctgtccaagacactggcccagtacacctccaagacatgcagcaactgtgggtttaccatcaccagcgccgactacgacagggtgctggagaagctgaagaagacagcaacaggctggatgaccacaattaacggcaaggagctgaaggtggagggccagattacctactacaacagatacaagagacagaacgtagtcaaggacctgtccgtcgagctggatagactgagcgaagaatctgtgaacaacgacatctcctcctggacaaagggcagaagcggagaagctctgagcctcctgaagaaaagattctcccatagacccgtgcaggagaagttcgtgtgcctgaactgcggcttcgagacacacgcagccgagcaagccgccctgaacatcgccagatcctggctgttcctgcggagccaggagtacaagaaataccagacaaacaagacaaccggcaacaccgataagagagccttcgtcgagacctggcagtccttttaccggaagaagcttaaggaggtgtggaaacctgccgtgcggtctggcggatctggcggaggctccaccagccccaagaaaaagagaaaagtctaagctgccttctgcggggcttgccttctggccatgcccttcttctctcccttgcacctgtacctcttggtctttgaataaagcctgagtaggaaggctagcaaaaaaaaaaaaaaaaaaaaaaaaaaaaaaaaaaaaaaaaaaaaaaaaaaaaaaaaaaaaaaaaaaaaaaaaaaaaaaaa

SEQ ID NO: 12538 - RNA, 5785 nt, synthetic construct
  source 1..5785: mol_type = other RNA
aggaaataagagagaaaagaagagtaagaagaaatataagagccaccatggcccctaagaagaagcgtaaagtgagccggatggaacgcctcgtctacgaggtgcggcagaagtgcagaaacatcgaggacatctgcatctcctgcggatctctgaacgtgaccctggagcacccactgttcatcggcggcatgtgccagaactgtaaaaactgttttctggagtgtgcctatcaatacgacgatgacggctaccagagctactgcaccatctgttgcggcggaagagaggtgctgatgtgtggaaataacaactgctgccggtgcttctgcgtggaatgcgtggacctgctggtgggccccggcgccgcccaggccgctattaaggaagatccttggaactgctacatgtgcggccacaagggcacatacggcctgctgagacggagagaggactggcctagcagactgcagatgttcttcgccaataaccacgaccaggagttcgacccccctaaggtgtaccctcccgtccccgccgagaagagaaagcccatccgggtcctgagcctgttcgatggcatcgccaccggtctgctggtgctgaaggacctgggcatccaggtggataggtacattgcctccgaggtgtgcgaggactccatcaccgtgggaatggtgcgtcatcagggcaagatcatgtacgtgggcgacgtgcggagcgtgacacagaagcatatccaggagtggggccctttcgacctggtgatcggcggcagcccttgcaatgacctgagcatcgtgaacccagcccggaagggcctgtacgagggaaccggcagactgttcttcgagttttacagactgctgcacgacgcccggcctaaggaaggcgacgaccggcccttcttttggctgttcgagaatgtggtggccatgggagtcagcgacaagcgggatattagccggttcctggagagcaaccccgtgatgatcgatgccaaggaagtgagcgccgcccaccgggccagatacttctggggcaatctgcctggcatgaacagacccctggccagcaccgtgaacgacaagctggagctgcaggagtgcctggagcacggccggatcgccaagttcagcaaggtgagaaccatcaccacccgaagcaacagcatcaaacaaggcaaggaccagcactttcctgtgttcatgaacgagaaggaggacatcctgtggtgtaccgagatggagagagtgttcgggttcccagtccactacacagatgtcagcaacatgtctagactggccagacagagactgctgggaagaagctggtccgtccctgtgatcagacacctgttcgcccctctgaaggagtacttcgcctgcgtgagcagcggcaacagcaacgccaacagccggggccccagcttctctagcggcctggtgccactgtccctgagagggagccacatgggccccatggagatctacaaaaccgtgagcgcctggaagcggcagcctgtgcgcgtgctgagcctgtttcggaatatcgataaagtcctgaaaagcctgggattcctggagagcggctctggctccggcggtggcaccctgaagtacgtggaggatgtgacaaacgtggtcagacgggatgtggagaagtggggccccttcgatctggtgtacggcagcacccaacccctgggcagctcttgtgaccggtgccctggctggtacatgtttcagttccaccggatcctgcagtacgccctgccgagacaggagtcccagcggccattcttttggattttcatggacaacttgctgctgaccgaggatgaccaggaaactaccactcggttcctgcagaccgaagccgtgaccctgcaggacgtgagaggccgggactaccagaacgccatgcgggtgtggtccaacatccctggactgaaaagcaagcacgcacctctgacccctaaagaagaggagtacctgcaggcccaggtgcggagcagaagcaagctggacgcccctaaggtggatctgctggtgaagaattgcctcctgcccctgagagagtacttcaagtatttcagccagaatagtctgcccctgggaggcagcggcggcggcatgctgaccttcagggacgtgttcatcgagttcagccaggaggagtgggagtgcctggaccccgcccagaggaagctgtacatggacgtgatgctggagagctacaggaacctggtgagcctgggccacagcatcagcaagcccgacgtgatcaccctgctggagcagggcaaggacccctgcatggtggtgagggaggagaccaggaggtggtgcaccggcaagaacaagagcggcaggaggggcggcccaagcagcggcgcccctcctcccagcggcggcagcccagccggctccccaacctctaccgaggagggcacctctgagtccgccacccccgagagcggccctggcacctccaccgagcccagcgagggcagcgcacccggcagccctgccggcagccccacctccacagaggagggaaccagcaccgagcccagcgaaggcagcgccccaggcaccagcaccgagcctagtgagcaggagattaaacggatcaacaagatcagaagaagacttgtgaaagacagcaacaccaagaaggccggcaagacaggccccatgaaaaccctgctggttagagtgatgacacccgatctgagagagcggctggaaaacctgagaaagaagcctgaaaatatcccccagcccatcagcaatacatctagagccaacctgaataagctgctgaccgattacaccgaaatgaagaaggcgatcctgcatgtgtactgggaagagttccagaaggaccctgtgggcctgatgagccgggtggcccagcctgccagcaagaagatcgatcagaacaagctgaaacctgagatggacgagaagggcaacctgaccaccgccggctttgcctgctctcagtgtggccagcccctgttcgtgtacaagctggagcaggtgtctgagaagggcaaggcttacaccaactacttcggacggtgcaatgtggccgagcacgaaaagctgatcctgctggcccagctgaagcccgagaaggatagcgacgaagccgtgacatatagcctgggaaagtttgggcagagggccctggatttctacagcattcatgtgaccaaggagtccacccaccccgtgaagcccctggcccagatcgccggaaacagatacgcctccggacctgtgggaaaggccctgagcgacgcatgtatgggcacaatcgcctccttcctgtctaagtaccaggacatcatcatcgaacaccagaaggtggtgaagggcaaccagaagagactggagagcctgcgggagctggccggcaaggaaaacctggaataccctagcgtgaccctgccacctcagcctcacaccaaggagggcgttgatgcctacaacgaagtgatcgcccgggtgcgaatgtgggtgaacctgaacctgtggcagaagctgaagctaagcagagatgatgccaagcctctgctgagactgaagggattcccttcctttcctctggtcgagagacaggccaacgaagtggactggtgggacatggtgtgtaacgtgaagaagctgatcaacgagaaaaaggaggatggcaaggtgttttggcagaatctggctggctacaagagacaggaagccctgagaccatacctgagcagcgaggaagatcggaagaagggaaagaaattcgctcggtaccagctgggcgacctgctgctgcacctggaaaagaagcacggcgaggactggggaaaggtgtacgacgaggcctgggagcggattgacaagaaagtggaaggcctgagcaagcacatcaagctggaagaggaacggagaagcgaggacgcccagagcaaggccgccctgaccgactggctgcgggctaaggccagcttcgtgatcgagggcctgaaggaggccgacaaggacgagttctgcagatgcgagctgaagctgcagaagtggtacggggacctgcggggaaagcccttcgccatcgaagccgagaacagcatcctggacatcagcggcttcagcaagcagtacaactgtgccttcatctggcagaaggacggcgtgaagaagctgaacctgtacctgatcatcaactacttcaagggcggcaagctgcggttcaagaagatcaaacctgaagccttcgaagccaacagattctacaccgtgatcaacaaaaagagcggcgagatcgtgcccatggaggtgaacttcaacttcgacgaccccaacctgatcatcctgcctctggcctttggcaagagacagggcagagaattcatctggaacgacctgctgtccctggaaaccggcagcctgaagctggccaacggaagagtgatcgagaagacactgtacaacagaagaacccggcaggatgagcctgccctgttcgtggccctgaccttcgagcggcgggaggtcctggactcctccaatatcaaaccaatgaacctgatcggcgtggcaagaggcgaaaacatccccgccgtgatcgccctgaccgaccccgagggctgcccactgagccggtttaaggatagcctgggaaacccaacccacatcctgagaatcggcgagagctataaggagaagcagcggaccatccaggccaagaaggaggtggagcagcggagagccggcggctacagccggaagtacgccagcaaagccaagaatctggcagacgatatggtgagaaacaccgctagagatctgctgtactacgccgtgacccaggatgccatgctgatcttcgccaacctgagccggggcttcggccggcagggcaagcggaccttcatggccgagagacagtacacacggatggaggactggctgaccgccaagctggcctacgagggcctgagcaagacctacctgtccaagacactggcccagtacacctccaagacatgcagcaactgtgggtttaccatcaccagcgccgactacgacagggtgctggagaagctgaagaagacagcaacaggctggatgaccacaattaacggcaaggagctgaaggtggagggccagattacctactacaacagatacaagagacagaacgtagtcaaggacctgtccgtcgagctggatagactgagcgaagaatctgtgaacaacgacatctcctcctggacaaagggcagaagcggagaagctctgagcctcctgaagaaaagattctcccatagacccgtgcaggagaagttcgtgtgcctgaactgcggcttcgagacacacgcagccgagcaagccgccctgaacatcgccagatcctggctgttcctgcggagccaggagtacaagaaataccagacaaacaagacaaccggcaacaccgataagagagccttcgtcgagacctggcagtccttttaccggaagaagcttaaggaggtgtggaaacctgccgtgcggtctggcggatctggcggaggctccaccagccccaagaaaaagagaaaagtctaagctgccttctgcggggcttgccttctggccatgcccttcttctctcccttgcacctgtacctcttggtctttgaataaagcctgagtaggaaggctagcaaaaaaaaaaaaaaaaaaaaaaaaaaaaaaaaaaaaaaaaaaaaaaaaaaaaaaaaaaaaaaaaaaaaaaaaaaaaaaaa

SEQ ID NO: 12539 - RNA, 5785 nt, synthetic construct
  source 1..5785: mol_type = other RNA
aggaaataagagagaaaagaagagtaagaagaaatataagagccaccatggcccctaagaagaagcgtaaagtgagccggatggaacgcctcgtctacgaggtgcggcagaagtgcagaaacatcgaggacatctgcatctcctgcggatctctgaacgtgaccctggagcacccactgttcatcggcggcatgtgccagaactgtaaaaactgttttctggagtgtgcctatcaatacgacgatgacggctaccagagctactgcaccatctgttgcggcggaagagaggtgctgatgtgtggaaataacaactgctgccggtgcttctgcgtggaatgcgtggacctgctggtgggccccggcgccgcccaggccgctattaaggaagatccttggaactgctacatgtgcggccacaagggcacatacggcctgctgagacggagagaggactggcctagcagactgcagatgttcttcgccaataaccacgaccaggagttcgacccccctaaggtgtaccctcccgtccccgccgagaagagaaagcccatccgggtcctgagcctgttcgatggcatcgccaccggtctgctggtgctgaaggacctgggcatccaggtggataggtacattgcctccgaggtgtgcgaggactccatcaccgtgggaatggtgcgtcatcagggcaagatcatgtacgtgggcgacgtgcggagcgtgacacagaagcatatccaggagtggggccctttcgacctggtgatcggcggcagcccttgcaatgacctgagcatcgtgaacccagcccggaagggcctgtacgagggaaccggcagactgttcttcgagttttacagactgctgcacgacgcccggcctaaggaaggcgacgaccggcccttcttttggctgttcgagaatgtggtggccatgggagtcagcgacaagcgggatattagccggttcctggagagcaaccccgtgatgatcgatgccaaggaagtgagcgccgcccaccgggccagatacttctggggcaatctgcctggcatgaacagacccctggccagcaccgtgaacgacaagctggagctgcaggagtgcctggagcacggccggatcgccaagttcagcaaggtgagaaccatcaccacccgaagcaacagcatcaaacaaggcaaggaccagcactttcctgtgttcatgaacgagaaggaggacatcctgtggtgtaccgagatggagagagtgttcgggttcccagtccactacacagatgtcagcaacatgtctagactggccagacagagactgctgggaagaagctggtccgtccctgtgatcagacacctgttcgcccctctgaaggagtacttcgcctgcgtgagcagcggcaacagcaacgccaacagccggggccccagcttctctagcggcctggtgccactgtccctgagagggagccacatgggccccatggagatctacaaaaccgtgagcgcctggaagcggcagcctgtgcgcgtgctgagcctgtttcggaatatcgataaagtcctgaaaagcctgggattcctggagagcggctctggctccggcggtggcaccctgaagtacgtggaggatgtgacaaacgtggtcagacgggatgtggagaagtggggccccttcgatctggtgtacggcagcacccaacccctgggcagctcttgtgaccggtgccctggctggtacatgtttcagttccaccggatcctgcagtacgccctgccgagacaggagtcccagcggccattcttttggattttcatggacaacttgctgctgaccgaggatgaccaggaaactaccactcggttcctgcagaccgaagccgtgaccctgcaggacgtgagaggccgggactaccagaacgccatgcgggtgtggtccaacatccctggactgaaaagcaagcacgcacctctgacccctaaagaagaggagtacctgcaggcccaggtgcggagcagaagcaagctggacgcccctaaggtggatctgctggtgaagaattgcctcctgcccctgagagagtacttcaagtatttcagccagaatagtctgcccctgggaggcagcggcggcggcagcgtggccttcgaggacgtggccgtgaacttcacccaggaggagtggagcctgctggaccccagccagaagaacctgtacagggaggtgatgcaggagaccctgaggaacctggccagcatcggcaagaagtggaaggaccagaacatcgagaacgagtacaagaaccccaggagcaaccagaggggcctgatggaggagaggctgttcgagagcgagggccaccagcccggcgagatcctgggcggcccaagcagcggcgcccctcctcccagcggcggcagcccagccggctccccaacctctaccgaggagggcacctctgagtccgccacccccgagagcggccctggcacctccaccgagcccagcgagggcagcgcacccggcagccctgccggcagccccacctccacagaggagggaaccagcaccgagcccagcgaaggcagcgccccaggcaccagcaccgagcctagtgagcaggagattaaacggatcaacaagatcagaagaagacttgtgaaagacagcaacaccaagaaggccggcaagacaggccccatgaaaaccctgctggttagagtgatgacacccgatctgagagagcggctggaaaacctgagaaagaagcctgaaaatatcccccagcccatcagcaatacatctagagccaacctgaataagctgctgaccgattacaccgaaatgaagaaggcgatcctgcatgtgtactgggaagagttccagaaggaccctgtgggcctgatgagccgggtggcccagcctgccagcaagaagatcgatcagaacaagctgaaacctgagatggacgagaagggcaacctgaccaccgccggctttgcctgctctcagtgtggccagcccctgttcgtgtacaagctggagcaggtgtctgagaagggcaaggcttacaccaactacttcggacggtgcaatgtggccgagcacgaaaagctgatcctgctggcccagctgaagcccgagaaggatagcgacgaagccgtgacatatagcctgggaaagtttgggcagagggccctggatttctacagcattcatgtgaccaaggagtccacccaccccgtgaagcccctggcccagatcgccggaaacagatacgcctccggacctgtgggaaaggccctgagcgacgcatgtatgggcacaatcgcctccttcctgtctaagtaccaggacatcatcatcgaacaccagaaggtggtgaagggcaaccagaagagactggagagcctgcgggagctggccggcaaggaaaacctggaataccctagcgtgaccctgccacctcagcctcacaccaaggagggcgttgatgcctacaacgaagtgatcgcccgggtgcgaatgtgggtgaacctgaacctgtggcagaagctgaagctaagcagagatgatgccaagcctctgctgagactgaagggattcccttcctttcctctggtcgagagacaggccaacgaagtggactggtgggacatggtgtgtaacgtgaagaagctgatcaacgagaaaaaggaggatggcaaggtgttttggcagaatctggctggctacaagagacaggaagccctgagaccatacctgagcagcgaggaagatcggaagaagggaaagaaattcgctcggtaccagctgggcgacctgctgctgcacctggaaaagaagcacggcgaggactggggaaaggtgtacgacgaggcctgggagcggattgacaagaaagtggaaggcctgagcaagcacatcaagctggaagaggaacggagaagcgaggacgcccagagcaaggccgccctgaccgactggctgcgggctaaggccagcttcgtgatcgagggcctgaaggaggccgacaaggacgagttctgcagatgcgagctgaagctgcagaagtggtacggggacctgcggggaaagcccttcgccatcgaagccgagaacagcatcctggacatcagcggcttcagcaagcagtacaactgtgccttcatctggcagaaggacggcgtgaagaagctgaacctgtacctgatcatcaactacttcaagggcggcaagctgcggttcaagaagatcaaacctgaagccttcgaagccaacagattctacaccgtgatcaacaaaaagagcggcgagatcgtgcccatggaggtgaacttcaacttcgacgaccccaacctgatcatcctgcctctggcctttggcaagagacagggcagagaattcatctggaacgacctgctgtccctggaaaccggcagcctgaagctggccaacggaagagtgatcgagaagacactgtacaacagaagaacccggcaggatgagcctgccctgttcgtggccctgaccttcgagcggcgggaggtcctggactcctccaatatcaaaccaatgaacctgatcggcgtggcaagaggcgaaaacatccccgccgtgatcgccctgaccgaccccgagggctgcccactgagccggtttaaggatagcctgggaaacccaacccacatcctgagaatcggcgagagctataaggagaagcagcggaccatccaggccaagaaggaggtggagcagcggagagccggcggctacagccggaagtacgccagcaaagccaagaatctggcagacgatatggtgagaaacaccgctagagatctgctgtactacgccgtgacccaggatgccatgctgatcttcgccaacctgagccggggcttcggccggcagggcaagcggaccttcatggccgagagacagtacacacggatggaggactggctgaccgccaagctggcctacgagggcctgagcaagacctacctgtccaagacactggcccagtacacctccaagacatgcagcaactgtgggtttaccatcaccagcgccgactacgacagggtgctggagaagctgaagaagacagcaacaggctggatgaccacaattaacggcaaggagctgaaggtggagggccagattacctactacaacagatacaagagacagaacgtagtcaaggacctgtccgtcgagctggatagactgagcgaagaatctgtgaacaacgacatctcctcctggacaaagggcagaagcggagaagctctgagcctcctgaagaaaagattctcccatagacccgtgcaggagaagttcgtgtgcctgaactgcggcttcgagacacacgcagccgagcaagccgccctgaacatcgccagatcctggctgttcctgcggagccaggagtacaagaaataccagacaaacaagacaaccggcaacaccgataagagagccttcgtcgagacctggcagtccttttaccggaagaagcttaaggaggtgtggaaacctgccgtgcggtctggcggatctggcggaggctccaccagccccaagaaaaagagaaaagtctaagctgccttctgcggggcttgccttctggccatgcccttcttctctcccttgcacctgtacctcttggtctttgaataaagcctgagtaggaaggctagcaaaaaaaaaaaaaaaaaaaaaaaaaaaaaaaaaaaaaaaaaaaaaaaaaaaaaaaaaaaaaaaaaaaaaaaaaaaaaaaa

SEQ ID NO: 12540 - RNA, 5785 nt, synthetic construct
  source 1..5785: mol_type = other RNA
aggaaataagagagaaaagaagagtaagaagaaatataagagccaccatggcccctaagaagaagcgtaaagtgagccggatggaacgcctcgtctacgaggtgcggcagaagtgcagaaacatcgaggacatctgcatctcctgcggatctctgaacgtgaccctggagcacccactgttcatcggcggcatgtgccagaactgtaaaaactgttttctggagtgtgcctatcaatacgacgatgacggctaccagagctactgcaccatctgttgcggcggaagagaggtgctgatgtgtggaaataacaactgctgccggtgcttctgcgtggaatgcgtggacctgctggtgggccccggcgccgcccaggccgctattaaggaagatccttggaactgctacatgtgcggccacaagggcacatacggcctgctgagacggagagaggactggcctagcagactgcagatgttcttcgccaataaccacgaccaggagttcgacccccctaaggtgtaccctcccgtccccgccgagaagagaaagcccatccgggtcctgagcctgttcgatggcatcgccaccggtctgctggtgctgaaggacctgggcatccaggtggataggtacattgcctccgaggtgtgcgaggactccatcaccgtgggaatggtgcgtcatcagggcaagatcatgtacgtgggcgacgtgcggagcgtgacacagaagcatatccaggagtggggccctttcgacctggtgatcggcggcagcccttgcaatgacctgagcatcgtgaacccagcccggaagggcctgtacgagggaaccggcagactgttcttcgagttttacagactgctgcacgacgcccggcctaaggaaggcgacgaccggcccttcttttggctgttcgagaatgtggtggccatgggagtcagcgacaagcgggatattagccggttcctggagagcaaccccgtgatgatcgatgccaaggaagtgagcgccgcccaccgggccagatacttctggggcaatctgcctggcatgaacagacccctggccagcaccgtgaacgacaagctggagctgcaggagtgcctggagcacggccggatcgccaagttcagcaaggtgagaaccatcaccacccgaagcaacagcatcaaacaaggcaaggaccagcactttcctgtgttcatgaacgagaaggaggacatcctgtggtgtaccgagatggagagagtgttcgggttcccagtccactacacagatgtcagcaacatgtctagactggccagacagagactgctgggaagaagctggtccgtccctgtgatcagacacctgttcgcccctctgaaggagtacttcgcctgcgtgagcagcggcaacagcaacgccaacagccggggccccagcttctctagcggcctggtgccactgtccctgagagggagccacatgggccccatggagatctacaaaaccgtgagcgcctggaagcggcagcctgtgcgcgtgctgagcctgtttcggaatatcgataaagtcctgaaaagcctgggattcctggagagcggctctggctccggcggtggcaccctgaagtacgtggaggatgtgacaaacgtggtcagacgggatgtggagaagtggggccccttcgatctggtgtacggcagcacccaacccctgggcagctcttgtgaccggtgccctggctggtacatgtttcagttccaccggatcctgcagtacgccctgccgagacaggagtcccagcggccattcttttggattttcatggacaacttgctgctgaccgaggatgaccaggaaactaccactcggttcctgcagaccgaagccgtgaccctgcaggacgtgagaggccgggactaccagaacgccatgcgggtgtggtccaacatccctggactgaaaagcaagcacgcacctctgacccctaaagaagaggagtacctgcaggcccaggtgcggagcagaagcaagctggacgcccctaaggtggatctgctggtgaagaattgcctcctgcccctgagagagtacttcaagtatttcagccagaatagtctgcccctgggaggcagcggcggcggcccccaggagagcgtgaccttcgaggacgtggccgtgaacttcagctacgaggagtggcagtgcctgacccacgcccagaggcacctgtacaccgacgtgatgctggagaactacggcaacatggtgagcctgggcttcagcttcagcaagccccccctgatcagcaggctggagcagggcaccgagccctacgtgcaggacaggcaggactgggagttcctgaactgcagctaccccgccgccggcggcccaagcagcggcgcccctcctcccagcggcggcagcccagccggctccccaacctctaccgaggagggcacctctgagtccgccacccccgagagcggccctggcacctccaccgagcccagcgagggcagcgcacccggcagccctgccggcagccccacctccacagaggagggaaccagcaccgagcccagcgaaggcagcgccccaggcaccagcaccgagcctagtgagcaggagattaaacggatcaacaagatcagaagaagacttgtgaaagacagcaacaccaagaaggccggcaagacaggccccatgaaaaccctgctggttagagtgatgacacccgatctgagagagcggctggaaaacctgagaaagaagcctgaaaatatcccccagcccatcagcaatacatctagagccaacctgaataagctgctgaccgattacaccgaaatgaagaaggcgatcctgcatgtgtactgggaagagttccagaaggaccctgtgggcctgatgagccgggtggcccagcctgccagcaagaagatcgatcagaacaagctgaaacctgagatggacgagaagggcaacctgaccaccgccggctttgcctgctctcagtgtggccagcccctgttcgtgtacaagctggagcaggtgtctgagaagggcaaggcttacaccaactacttcggacggtgcaatgtggccgagcacgaaaagctgatcctgctggcccagctgaagcccgagaaggatagcgacgaagccgtgacatatagcctgggaaagtttgggcagagggccctggatttctacagcattcatgtgaccaaggagtccacccaccccgtgaagcccctggcccagatcgccggaaacagatacgcctccggacctgtgggaaaggccctgagcgacgcatgtatgggcacaatcgcctccttcctgtctaagtaccaggacatcatcatcgaacaccagaaggtggtgaagggcaaccagaagagactggagagcctgcgggagctggccggcaaggaaaacctggaataccctagcgtgaccctgccacctcagcctcacaccaaggagggcgttgatgcctacaacgaagtgatcgcccgggtgcgaatgtgggtgaacctgaacctgtggcagaagctgaagctaagcagagatgatgccaagcctctgctgagactgaagggattcccttcctttcctctggtcgagagacaggccaacgaagtggactggtgggacatggtgtgtaacgtgaagaagctgatcaacgagaaaaaggaggatggcaaggtgttttggcagaatctggctggctacaagagacaggaagccctgagaccatacctgagcagcgaggaagatcggaagaagggaaagaaattcgctcggtaccagctgggcgacctgctgctgcacctggaaaagaagcacggcgaggactggggaaaggtgtacgacgaggcctgggagcggattgacaagaaagtggaaggcctgagcaagcacatcaagctggaagaggaacggagaagcgaggacgcccagagcaaggccgccctgaccgactggctgcgggctaaggccagcttcgtgatcgagggcctgaaggaggccgacaaggacgagttctgcagatgcgagctgaagctgcagaagtggtacggggacctgcggggaaagcccttcgccatcgaagccgagaacagcatcctggacatcagcggcttcagcaagcagtacaactgtgccttcatctggcagaaggacggcgtgaagaagctgaacctgtacctgatcatcaactacttcaagggcggcaagctgcggttcaagaagatcaaacctgaagccttcgaagccaacagattctacaccgtgatcaacaaaaagagcggcgagatcgtgcccatggaggtgaacttcaacttcgacgaccccaacctgatcatcctgcctctggcctttggcaagagacagggcagagaattcatctggaacgacctgctgtccctggaaaccggcagcctgaagctggccaacggaagagtgatcgagaagacactgtacaacagaagaacccggcaggatgagcctgccctgttcgtggccctgaccttcgagcggcgggaggtcctggactcctccaatatcaaaccaatgaacctgatcggcgtggcaagaggcgaaaacatccccgccgtgatcgccctgaccgaccccgagggctgcccactgagccggtttaaggatagcctgggaaacccaacccacatcctgagaatcggcgagagctataaggagaagcagcggaccatccaggccaagaaggaggtggagcagcggagagccggcggctacagccggaagtacgccagcaaagccaagaatctggcagacgatatggtgagaaacaccgctagagatctgctgtactacgccgtgacccaggatgccatgctgatcttcgccaacctgagccggggcttcggccggcagggcaagcggaccttcatggccgagagacagtacacacggatggaggactggctgaccgccaagctggcctacgagggcctgagcaagacctacctgtccaagacactggcccagtacacctccaagacatgcagcaactgtgggtttaccatcaccagcgccgactacgacagggtgctggagaagctgaagaagacagcaacaggctggatgaccacaattaacggcaaggagctgaaggtggagggccagattacctactacaacagatacaagagacagaacgtagtcaaggacctgtccgtcgagctggatagactgagcgaagaatctgtgaacaacgacatctcctcctggacaaagggcagaagcggagaagctctgagcctcctgaagaaaagattctcccatagacccgtgcaggagaagttcgtgtgcctgaactgcggcttcgagacacacgcagccgagcaagccgccctgaacatcgccagatcctggctgttcctgcggagccaggagtacaagaaataccagacaaacaagacaaccggcaacaccgataagagagccttcgtcgagacctggcagtccttttaccggaagaagcttaaggaggtgtggaaacctgccgtgcggtctggcggatctggcggaggctccaccagccccaagaaaaagagaaaagtctaagctgccttctgcggggcttgccttctggccatgcccttcttctctcccttgcacctgtacctcttggtctttgaataaagcctgagtaggaaggctagcaaaaaaaaaaaaaaaaaaaaaaaaaaaaaaaaaaaaaaaaaaaaaaaaaaaaaaaaaaaaaaaaaaaaaaaaaaaaaaaa

SEQ ID NO: 12541 - RNA, 5785 nt, synthetic construct
  source 1..5785: mol_type = other RNA
aggaaataagagagaaaagaagagtaagaagaaatataagagccaccatggcccctaagaagaagcgtaaagtgagccggatggaacgcctcgtctacgaggtgcggcagaagtgcagaaacatcgaggacatctgcatctcctgcggatctctgaacgtgaccctggagcacccactgttcatcggcggcatgtgccagaactgtaaaaactgttttctggagtgtgcctatcaatacgacgatgacggctaccagagctactgcaccatctgttgcggcggaagagaggtgctgatgtgtggaaataacaactgctgccggtgcttctgcgtggaatgcgtggacctgctggtgggccccggcgccgcccaggccgctattaaggaagatccttggaactgctacatgtgcggccacaagggcacatacggcctgctgagacggagagaggactggcctagcagactgcagatgttcttcgccaataaccacgaccaggagttcgacccccctaaggtgtaccctcccgtccccgccgagaagagaaagcccatccgggtcctgagcctgttcgatggcatcgccaccggtctgctggtgctgaaggacctgggcatccaggtggataggtacattgcctccgaggtgtgcgaggactccatcaccgtgggaatggtgcgtcatcagggcaagatcatgtacgtgggcgacgtgcggagcgtgacacagaagcatatccaggagtggggccctttcgacctggtgatcggcggcagcccttgcaatgacctgagcatcgtgaacccagcccggaagggcctgtacgagggaaccggcagactgttcttcgagttttacagactgctgcacgacgcccggcctaaggaaggcgacgaccggcccttcttttggctgttcgagaatgtggtggccatgggagtcagcgacaagcgggatattagccggttcctggagagcaaccccgtgatgatcgatgccaaggaagtgagcgccgcccaccgggccagatacttctggggcaatctgcctggcatgaacagacccctggccagcaccgtgaacgacaagctggagctgcaggagtgcctggagcacggccggatcgccaagttcagcaaggtgagaaccatcaccacccgaagcaacagcatcaaacaaggcaaggaccagcactttcctgtgttcatgaacgagaaggaggacatcctgtggtgtaccgagatggagagagtgttcgggttcccagtccactacacagatgtcagcaacatgtctagactggccagacagagactgctgggaagaagctggtccgtccctgtgatcagacacctgttcgcccctctgaaggagtacttcgcctgcgtgagcagcggcaacagcaacgccaacagccggggccccagcttctctagcggcctggtgccactgtccctgagagggagccacatgggccccatggagatctacaaaaccgtgagcgcctggaagcggcagcctgtgcgcgtgctgagcctgtttcggaatatcgataaagtcctgaaaagcctgggattcctggagagcggctctggctccggcggtggcaccctgaagtacgtggaggatgtgacaaacgtggtcagacgggatgtggagaagtggggccccttcgatctggtgtacggcagcacccaacccctgggcagctcttgtgaccggtgccctggctggtacatgtttcagttccaccggatcctgcagtacgccctgccgagacaggagtcccagcggccattcttttggattttcatggacaacttgctgctgaccgaggatgaccaggaaactaccactcggttcctgcagaccgaagccgtgaccctgcaggacgtgagaggccgggactaccagaacgccatgcgggtgtggtccaacatccctggactgaaaagcaagcacgcacctctgacccctaaagaagaggagtacctgcaggcccaggtgcggagcagaagcaagctggacgcccctaaggtggatctgctggtgaagaattgcctcctgcccctgagagagtacttcaagtatttcagccagaatagtctgcccctgggaggcagcggcggcggcacccacggcctggtgatgttcaaggacgtggccatcgacgtgagccaggaggagtgggagtgcctgaaccccacccagaggagcctgtacagggacgtgatgctggagaactacagcaacctggtgagcctgggcctgagcctgagcaagcccgccgtgatcagcagcctggagcagggcatggagccctggatggtggtgagggaggtgaccggcaagcagtgccccgacctggtgagcaggggcggcccaagcagcggcgcccctcctcccagcggcggcagcccagccggctccccaacctctaccgaggagggcacctctgagtccgccacccccgagagcggccctggcacctccaccgagcccagcgagggcagcgcacccggcagccctgccggcagccccacctccacagaggagggaaccagcaccgagcccagcgaaggcagcgccccaggcaccagcaccgagcctagtgagcaggagattaaacggatcaacaagatcagaagaagacttgtgaaagacagcaacaccaagaaggccggcaagacaggccccatgaaaaccctgctggttagagtgatgacacccgatctgagagagcggctggaaaacctgagaaagaagcctgaaaatatcccccagcccatcagcaatacatctagagccaacctgaataagctgctgaccgattacaccgaaatgaagaaggcgatcctgcatgtgtactgggaagagttccagaaggaccctgtgggcctgatgagccgggtggcccagcctgccagcaagaagatcgatcagaacaagctgaaacctgagatggacgagaagggcaacctgaccaccgccggctttgcctgctctcagtgtggccagcccctgttcgtgtacaagctggagcaggtgtctgagaagggcaaggcttacaccaactacttcggacggtgcaatgtggccgagcacgaaaagctgatcctgctggcccagctgaagcccgagaaggatagcgacgaagccgtgacatatagcctgggaaagtttgggcagagggccctggatttctacagcattcatgtgaccaaggagtccacccaccccgtgaagcccctggcccagatcgccggaaacagatacgcctccggacctgtgggaaaggccctgagcgacgcatgtatgggcacaatcgcctccttcctgtctaagtaccaggacatcatcatcgaacaccagaaggtggtgaagggcaaccagaagagactggagagcctgcgggagctggccggcaaggaaaacctggaataccctagcgtgaccctgccacctcagcctcacaccaaggagggcgttgatgcctacaacgaagtgatcgcccgggtgcgaatgtgggtgaacctgaacctgtggcagaagctgaagctaagcagagatgatgccaagcctctgctgagactgaagggattcccttcctttcctctggtcgagagacaggccaacgaagtggactggtgggacatggtgtgtaacgtgaagaagctgatcaacgagaaaaaggaggatggcaaggtgttttggcagaatctggctggctacaagagacaggaagccctgagaccatacctgagcagcgaggaagatcggaagaagggaaagaaattcgctcggtaccagctgggcgacctgctgctgcacctggaaaagaagcacggcgaggactggggaaaggtgtacgacgaggcctgggagcggattgacaagaaagtggaaggcctgagcaagcacatcaagctggaagaggaacggagaagcgaggacgcccagagcaaggccgccctgaccgactggctgcgggctaaggccagcttcgtgatcgagggcctgaaggaggccgacaaggacgagttctgcagatgcgagctgaagctgcagaagtggtacggggacctgcggggaaagcccttcgccatcgaagccgagaacagcatcctggacatcagcggcttcagcaagcagtacaactgtgccttcatctggcagaaggacggcgtgaagaagctgaacctgtacctgatcatcaactacttcaagggcggcaagctgcggttcaagaagatcaaacctgaagccttcgaagccaacagattctacaccgtgatcaacaaaaagagcggcgagatcgtgcccatggaggtgaacttcaacttcgacgaccccaacctgatcatcctgcctctggcctttggcaagagacagggcagagaattcatctggaacgacctgctgtccctggaaaccggcagcctgaagctggccaacggaagagtgatcgagaagacactgtacaacagaagaacccggcaggatgagcctgccctgttcgtggccctgaccttcgagcggcgggaggtcctggactcctccaatatcaaaccaatgaacctgatcggcgtggcaagaggcgaaaacatccccgccgtgatcgccctgaccgaccccgagggctgcccactgagccggtttaaggatagcctgggaaacccaacccacatcctgagaatcggcgagagctataaggagaagcagcggaccatccaggccaagaaggaggtggagcagcggagagccggcggctacagccggaagtacgccagcaaagccaagaatctggcagacgatatggtgagaaacaccgctagagatctgctgtactacgccgtgacccaggatgccatgctgatcttcgccaacctgagccggggcttcggccggcagggcaagcggaccttcatggccgagagacagtacacacggatggaggactggctgaccgccaagctggcctacgagggcctgagcaagacctacctgtccaagacactggcccagtacacctccaagacatgcagcaactgtgggtttaccatcaccagcgccgactacgacagggtgctggagaagctgaagaagacagcaacaggctggatgaccacaattaacggcaaggagctgaaggtggagggccagattacctactacaacagatacaagagacagaacgtagtcaaggacctgtccgtcgagctggatagactgagcgaagaatctgtgaacaacgacatctcctcctggacaaagggcagaagcggagaagctctgagcctcctgaagaaaagattctcccatagacccgtgcaggagaagttcgtgtgcctgaactgcggcttcgagacacacgcagccgagcaagccgccctgaacatcgccagatcctggctgttcctgcggagccaggagtacaagaaataccagacaaacaagacaaccggcaacaccgataagagagccttcgtcgagacctggcagtccttttaccggaagaagcttaaggaggtgtggaaacctgccgtgcggtctggcggatctggcggaggctccaccagccccaagaaaaagagaaaagtctaagctgccttctgcggggcttgccttctggccatgcccttcttctctcccttgcacctgtacctcttggtctttgaataaagcctgagtaggaaggctagcaaaaaaaaaaaaaaaaaaaaaaaaaaaaaaaaaaaaaaaaaaaaaaaaaaaaaaaaaaaaaaaaaaaaaaaaaaaaaaaa

SEQ ID NO: 12542 - RNA, 5785 nt, synthetic construct
  source 1..5785: mol_type = other RNA
aggaaataagagagaaaagaagagtaagaagaaatataagagccaccatggcccctaagaagaagcgtaaagtgagccggatggaacgcctcgtctacgaggtgcggcagaagtgcagaaacatcgaggacatctgcatctcctgcggatctctgaacgtgaccctggagcacccactgttcatcggcggcatgtgccagaactgtaaaaactgttttctggagtgtgcctatcaatacgacgatgacggctaccagagctactgcaccatctgttgcggcggaagagaggtgctgatgtgtggaaataacaactgctgccggtgcttctgcgtggaatgcgtggacctgctggtgggccccggcgccgcccaggccgctattaaggaagatccttggaactgctacatgtgcggccacaagggcacatacggcctgctgagacggagagaggactggcctagcagactgcagatgttcttcgccaataaccacgaccaggagttcgacccccctaaggtgtaccctcccgtccccgccgagaagagaaagcccatccgggtcctgagcctgttcgatggcatcgccaccggtctgctggtgctgaaggacctgggcatccaggtggataggtacattgcctccgaggtgtgcgaggactccatcaccgtgggaatggtgcgtcatcagggcaagatcatgtacgtgggcgacgtgcggagcgtgacacagaagcatatccaggagtggggccctttcgacctggtgatcggcggcagcccttgcaatgacctgagcatcgtgaacccagcccggaagggcctgtacgagggaaccggcagactgttcttcgagttttacagactgctgcacgacgcccggcctaaggaaggcgacgaccggcccttcttttggctgttcgagaatgtggtggccatgggagtcagcgacaagcgggatattagccggttcctggagagcaaccccgtgatgatcgatgccaaggaagtgagcgccgcccaccgggccagatacttctggggcaatctgcctggcatgaacagacccctggccagcaccgtgaacgacaagctggagctgcaggagtgcctggagcacggccggatcgccaagttcagcaaggtgagaaccatcaccacccgaagcaacagcatcaaacaaggcaaggaccagcactttcctgtgttcatgaacgagaaggaggacatcctgtggtgtaccgagatggagagagtgttcgggttcccagtccactacacagatgtcagcaacatgtctagactggccagacagagactgctgggaagaagctggtccgtccctgtgatcagacacctgttcgcccctctgaaggagtacttcgcctgcgtgagcagcggcaacagcaacgccaacagccggggccccagcttctctagcggcctggtgccactgtccctgagagggagccacatgggccccatggagatctacaaaaccgtgagcgcctggaagcggcagcctgtgcgcgtgctgagcctgtttcggaatatcgataaagtcctgaaaagcctgggattcctggagagcggctctggctccggcggtggcaccctgaagtacgtggaggatgtgacaaacgtggtcagacgggatgtggagaagtggggccccttcgatctggtgtacggcagcacccaacccctgggcagctcttgtgaccggtgccctggctggtacatgtttcagttccaccggatcctgcagtacgccctgccgagacaggagtcccagcggccattcttttggattttcatggacaacttgctgctgaccgaggatgaccaggaaactaccactcggttcctgcagaccgaagccgtgaccctgcaggacgtgagaggccgggactaccagaacgccatgcgggtgtggtccaacatccctggactgaaaagcaagcacgcacctctgacccctaaagaagaggagtacctgcaggcccaggtgcggagcagaagcaagctggacgcccctaaggtggatctgctggtgaagaattgcctcctgcccctgagagagtacttcaagtatttcagccagaatagtctgcccctgggaggcagcggcggcggcacccaggagagcgtgaccttcagggacgtggccgtgcacttcagcagggacgagtggctgtacctggaccccgcccagagggccctgtacagggaggtgatgctggagaactacagcagcctggtgagcctgggcatcctgttcagcaagcccaaggtgatcttccagctgcagcagggcgaggacccctggatggtggagaacggcgtgagctgcggcgcctgcctgggctgggagagcctgggcggcccaagcagcggcgcccctcctcccagcggcggcagcccagccggctccccaacctctaccgaggagggcacctctgagtccgccacccccgagagcggccctggcacctccaccgagcccagcgagggcagcgcacccggcagccctgccggcagccccacctccacagaggagggaaccagcaccgagcccagcgaaggcagcgccccaggcaccagcaccgagcctagtgagcaggagattaaacggatcaacaagatcagaagaagacttgtgaaagacagcaacaccaagaaggccggcaagacaggccccatgaaaaccctgctggttagagtgatgacacccgatctgagagagcggctggaaaacctgagaaagaagcctgaaaatatcccccagcccatcagcaatacatctagagccaacctgaataagctgctgaccgattacaccgaaatgaagaaggcgatcctgcatgtgtactgggaagagttccagaaggaccctgtgggcctgatgagccgggtggcccagcctgccagcaagaagatcgatcagaacaagctgaaacctgagatggacgagaagggcaacctgaccaccgccggctttgcctgctctcagtgtggccagcccctgttcgtgtacaagctggagcaggtgtctgagaagggcaaggcttacaccaactacttcggacggtgcaatgtggccgagcacgaaaagctgatcctgctggcccagctgaagcccgagaaggatagcgacgaagccgtgacatatagcctgggaaagtttgggcagagggccctggatttctacagcattcatgtgaccaaggagtccacccaccccgtgaagcccctggcccagatcgccggaaacagatacgcctccggacctgtgggaaaggccctgagcgacgcatgtatgggcacaatcgcctccttcctgtctaagtaccaggacatcatcatcgaacaccagaaggtggtgaagggcaaccagaagagactggagagcctgcgggagctggccggcaaggaaaacctggaataccctagcgtgaccctgccacctcagcctcacaccaaggagggcgttgatgcctacaacgaagtgatcgcccgggtgcgaatgtgggtgaacctgaacctgtggcagaagctgaagctaagcagagatgatgccaagcctctgctgagactgaagggattcccttcctttcctctggtcgagagacaggccaacgaagtggactggtgggacatggtgtgtaacgtgaagaagctgatcaacgagaaaaaggaggatggcaaggtgttttggcagaatctggctggctacaagagacaggaagccctgagaccatacctgagcagcgaggaagatcggaagaagggaaagaaattcgctcggtaccagctgggcgacctgctgctgcacctggaaaagaagcacggcgaggactggggaaaggtgtacgacgaggcctgggagcggattgacaagaaagtggaaggcctgagcaagcacatcaagctggaagaggaacggagaagcgaggacgcccagagcaaggccgccctgaccgactggctgcgggctaaggccagcttcgtgatcgagggcctgaaggaggccgacaaggacgagttctgcagatgcgagctgaagctgcagaagtggtacggggacctgcggggaaagcccttcgccatcgaagccgagaacagcatcctggacatcagcggcttcagcaagcagtacaactgtgccttcatctggcagaaggacggcgtgaagaagctgaacctgtacctgatcatcaactacttcaagggcggcaagctgcggttcaagaagatcaaacctgaagccttcgaagccaacagattctacaccgtgatcaacaaaaagagcggcgagatcgtgcccatggaggtgaacttcaacttcgacgaccccaacctgatcatcctgcctctggcctttggcaagagacagggcagagaattcatctggaacgacctgctgtccctggaaaccggcagcctgaagctggccaacggaagagtgatcgagaagacactgtacaacagaagaacccggcaggatgagcctgccctgttcgtggccctgaccttcgagcggcgggaggtcctggactcctccaatatcaaaccaatgaacctgatcggcgtggcaagaggcgaaaacatccccgccgtgatcgccctgaccgaccccgagggctgcccactgagccggtttaaggatagcctgggaaacccaacccacatcctgagaatcggcgagagctataaggagaagcagcggaccatccaggccaagaaggaggtggagcagcggagagccggcggctacagccggaagtacgccagcaaagccaagaatctggcagacgatatggtgagaaacaccgctagagatctgctgtactacgccgtgacccaggatgccatgctgatcttcgccaacctgagccggggcttcggccggcagggcaagcggaccttcatggccgagagacagtacacacggatggaggactggctgaccgccaagctggcctacgagggcctgagcaagacctacctgtccaagacactggcccagtacacctccaagacatgcagcaactgtgggtttaccatcaccagcgccgactacgacagggtgctggagaagctgaagaagacagcaacaggctggatgaccacaattaacggcaaggagctgaaggtggagggccagattacctactacaacagatacaagagacagaacgtagtcaaggacctgtccgtcgagctggatagactgagcgaagaatctgtgaacaacgacatctcctcctggacaaagggcagaagcggagaagctctgagcctcctgaagaaaagattctcccatagacccgtgcaggagaagttcgtgtgcctgaactgcggcttcgagacacacgcagccgagcaagccgccctgaacatcgccagatcctggctgttcctgcggagccaggagtacaagaaataccagacaaacaagacaaccggcaacaccgataagagagccttcgtcgagacctggcagtccttttaccggaagaagcttaaggaggtgtggaaacctgccgtgcggtctggcggatctggcggaggctccaccagccccaagaaaaagagaaaagtctaagctgccttctgcggggcttgccttctggccatgcccttcttctctcccttgcacctgtacctcttggtctttgaataaagcctgagtaggaaggctagcaaaaaaaaaaaaaaaaaaaaaaaaaaaaaaaaaaaaaaaaaaaaaaaaaaaaaaaaaaaaaaaaaaaaaaaaaaaaaaaa

SEQ ID NO: 12543 - RNA, 5785 nt, synthetic construct
  source 1..5785: mol_type = other RNA
aggaaataagagagaaaagaagagtaagaagaaatataagagccaccatggcccctaagaagaagcgtaaagtgagccggatggaacgcctcgtctacgaggtgcggcagaagtgcagaaacatcgaggacatctgcatctcctgcggatctctgaacgtgaccctggagcacccactgttcatcggcggcatgtgccagaactgtaaaaactgttttctggagtgtgcctatcaatacgacgatgacggctaccagagctactgcaccatctgttgcggcggaagagaggtgctgatgtgtggaaataacaactgctgccggtgcttctgcgtggaatgcgtggacctgctggtgggccccggcgccgcccaggccgctattaaggaagatccttggaactgctacatgtgcggccacaagggcacatacggcctgctgagacggagagaggactggcctagcagactgcagatgttcttcgccaataaccacgaccaggagttcgacccccctaaggtgtaccctcccgtccccgccgagaagagaaagcccatccgggtcctgagcctgttcgatggcatcgccaccggtctgctggtgctgaaggacctgggcatccaggtggataggtacattgcctccgaggtgtgcgaggactccatcaccgtgggaatggtgcgtcatcagggcaagatcatgtacgtgggcgacgtgcggagcgtgacacagaagcatatccaggagtggggccctttcgacctggtgatcggcggcagcccttgcaatgacctgagcatcgtgaacccagcccggaagggcctgtacgagggaaccggcagactgttcttcgagttttacagactgctgcacgacgcccggcctaaggaaggcgacgaccggcccttcttttggctgttcgagaatgtggtggccatgggagtcagcgacaagcgggatattagccggttcctggagagcaaccccgtgatgatcgatgccaaggaagtgagcgccgcccaccgggccagatacttctggggcaatctgcctggcatgaacagacccctggccagcaccgtgaacgacaagctggagctgcaggagtgcctggagcacggccggatcgccaagttcagcaaggtgagaaccatcaccacccgaagcaacagcatcaaacaaggcaaggaccagcactttcctgtgttcatgaacgagaaggaggacatcctgtggtgtaccgagatggagagagtgttcgggttcccagtccactacacagatgtcagcaacatgtctagactggccagacagagactgctgggaagaagctggtccgtccctgtgatcagacacctgttcgcccctctgaaggagtacttcgcctgcgtgagcagcggcaacagcaacgccaacagccggggccccagcttctctagcggcctggtgccactgtccctgagagggagccacatgggccccatggagatctacaaaaccgtgagcgcctggaagcggcagcctgtgcgcgtgctgagcctgtttcggaatatcgataaagtcctgaaaagcctgggattcctggagagcggctctggctccggcggtggcaccctgaagtacgtggaggatgtgacaaacgtggtcagacgggatgtggagaagtggggccccttcgatctggtgtacggcagcacccaacccctgggcagctcttgtgaccggtgccctggctggtacatgtttcagttccaccggatcctgcagtacgccctgccgagacaggagtcccagcggccattcttttggattttcatggacaacttgctgctgaccgaggatgaccaggaaactaccactcggttcctgcagaccgaagccgtgaccctgcaggacgtgagaggccgggactaccagaacgccatgcgggtgtggtccaacatccctggactgaaaagcaagcacgcacctctgacccctaaagaagaggagtacctgcaggcccaggtgcggagcagaagcaagctggacgcccctaaggtggatctgctggtgaagaattgcctcctgcccctgagagagtacttcaagtatttcagccagaatagtctgcccctgggaggcagcggcggcggccaggtgcccgtgaccttcgaggacatcaccatctacttcagccaggaggagtgggagggcctgcaggagtggcagaaggagctgtacaaggacgtgatgaaggagaactacgagatcctgatcagcctgggcgccagcagccccatcctgacccccgacgtgatcagccacatcgagaggggcgaggagccctacatcagggacgagcccaggagcgaggagagggagagcggcaagagcagcggcggcccaagcagcggcgcccctcctcccagcggcggcagcccagccggctccccaacctctaccgaggagggcacctctgagtccgccacccccgagagcggccctggcacctccaccgagcccagcgagggcagcgcacccggcagccctgccggcagccccacctccacagaggagggaaccagcaccgagcccagcgaaggcagcgccccaggcaccagcaccgagcctagtgagcaggagattaaacggatcaacaagatcagaagaagacttgtgaaagacagcaacaccaagaaggccggcaagacaggccccatgaaaaccctgctggttagagtgatgacacccgatctgagagagcggctggaaaacctgagaaagaagcctgaaaatatcccccagcccatcagcaatacatctagagccaacctgaataagctgctgaccgattacaccgaaatgaagaaggcgatcctgcatgtgtactgggaagagttccagaaggaccctgtgggcctgatgagccgggtggcccagcctgccagcaagaagatcgatcagaacaagctgaaacctgagatggacgagaagggcaacctgaccaccgccggctttgcctgctctcagtgtggccagcccctgttcgtgtacaagctggagcaggtgtctgagaagggcaaggcttacaccaactacttcggacggtgcaatgtggccgagcacgaaaagctgatcctgctggcccagctgaagcccgagaaggatagcgacgaagccgtgacatatagcctgggaaagtttgggcagagggccctggatttctacagcattcatgtgaccaaggagtccacccaccccgtgaagcccctggcccagatcgccggaaacagatacgcctccggacctgtgggaaaggccctgagcgacgcatgtatgggcacaatcgcctccttcctgtctaagtaccaggacatcatcatcgaacaccagaaggtggtgaagggcaaccagaagagactggagagcctgcgggagctggccggcaaggaaaacctggaataccctagcgtgaccctgccacctcagcctcacaccaaggagggcgttgatgcctacaacgaagtgatcgcccgggtgcgaatgtgggtgaacctgaacctgtggcagaagctgaagctaagcagagatgatgccaagcctctgctgagactgaagggattcccttcctttcctctggtcgagagacaggccaacgaagtggactggtgggacatggtgtgtaacgtgaagaagctgatcaacgagaaaaaggaggatggcaaggtgttttggcagaatctggctggctacaagagacaggaagccctgagaccatacctgagcagcgaggaagatcggaagaagggaaagaaattcgctcggtaccagctgggcgacctgctgctgcacctggaaaagaagcacggcgaggactggggaaaggtgtacgacgaggcctgggagcggattgacaagaaagtggaaggcctgagcaagcacatcaagctggaagaggaacggagaagcgaggacgcccagagcaaggccgccctgaccgactggctgcgggctaaggccagcttcgtgatcgagggcctgaaggaggccgacaaggacgagttctgcagatgcgagctgaagctgcagaagtggtacggggacctgcggggaaagcccttcgccatcgaagccgagaacagcatcctggacatcagcggcttcagcaagcagtacaactgtgccttcatctggcagaaggacggcgtgaagaagctgaacctgtacctgatcatcaactacttcaagggcggcaagctgcggttcaagaagatcaaacctgaagccttcgaagccaacagattctacaccgtgatcaacaaaaagagcggcgagatcgtgcccatggaggtgaacttcaacttcgacgaccccaacctgatcatcctgcctctggcctttggcaagagacagggcagagaattcatctggaacgacctgctgtccctggaaaccggcagcctgaagctggccaacggaagagtgatcgagaagacactgtacaacagaagaacccggcaggatgagcctgccctgttcgtggccctgaccttcgagcggcgggaggtcctggactcctccaatatcaaaccaatgaacctgatcggcgtggcaagaggcgaaaacatccccgccgtgatcgccctgaccgaccccgagggctgcccactgagccggtttaaggatagcctgggaaacccaacccacatcctgagaatcggcgagagctataaggagaagcagcggaccatccaggccaagaaggaggtggagcagcggagagccggcggctacagccggaagtacgccagcaaagccaagaatctggcagacgatatggtgagaaacaccgctagagatctgctgtactacgccgtgacccaggatgccatgctgatcttcgccaacctgagccggggcttcggccggcagggcaagcggaccttcatggccgagagacagtacacacggatggaggactggctgaccgccaagctggcctacgagggcctgagcaagacctacctgtccaagacactggcccagtacacctccaagacatgcagcaactgtgggtttaccatcaccagcgccgactacgacagggtgctggagaagctgaagaagacagcaacaggctggatgaccacaattaacggcaaggagctgaaggtggagggccagattacctactacaacagatacaagagacagaacgtagtcaaggacctgtccgtcgagctggatagactgagcgaagaatctgtgaacaacgacatctcctcctggacaaagggcagaagcggagaagctctgagcctcctgaagaaaagattctcccatagacccgtgcaggagaagttcgtgtgcctgaactgcggcttcgagacacacgcagccgagcaagccgccctgaacatcgccagatcctggctgttcctgcggagccaggagtacaagaaataccagacaaacaagacaaccggcaacaccgataagagagccttcgtcgagacctggcagtccttttaccggaagaagcttaaggaggtgtggaaacctgccgtgcggtctggcggatctggcggaggctccaccagccccaagaaaaagagaaaagtctaagctgccttctgcggggcttgccttctggccatgcccttcttctctcccttgcacctgtacctcttggtctttgaataaagcctgagtaggaaggctagcaaaaaaaaaaaaaaaaaaaaaaaaaaaaaaaaaaaaaaaaaaaaaaaaaaaaaaaaaaaaaaaaaaaaaaaaaaaaaaaa

SEQ ID NO: 12544 - RNA, 5785 nt, synthetic construct
  source 1..5785: mol_type = other RNA
aggaaataagagagaaaagaagagtaagaagaaatataagagccaccatggcccctaagaagaagcgtaaagtgagccggatggaacgcctcgtctacgaggtgcggcagaagtgcagaaacatcgaggacatctgcatctcctgcggatctctgaacgtgaccctggagcacccactgttcatcggcggcatgtgccagaactgtaaaaactgttttctggagtgtgcctatcaatacgacgatgacggctaccagagctactgcaccatctgttgcggcggaagagaggtgctgatgtgtggaaataacaactgctgccggtgcttctgcgtggaatgcgtggacctgctggtgggccccggcgccgcccaggccgctattaaggaagatccttggaactgctacatgtgcggccacaagggcacatacggcctgctgagacggagagaggactggcctagcagactgcagatgttcttcgccaataaccacgaccaggagttcgacccccctaaggtgtaccctcccgtccccgccgagaagagaaagcccatccgggtcctgagcctgttcgatggcatcgccaccggtctgctggtgctgaaggacctgggcatccaggtggataggtacattgcctccgaggtgtgcgaggactccatcaccgtgggaatggtgcgtcatcagggcaagatcatgtacgtgggcgacgtgcggagcgtgacacagaagcatatccaggagtggggccctttcgacctggtgatcggcggcagcccttgcaatgacctgagcatcgtgaacccagcccggaagggcctgtacgagggaaccggcagactgttcttcgagttttacagactgctgcacgacgcccggcctaaggaaggcgacgaccggcccttcttttggctgttcgagaatgtggtggccatgggagtcagcgacaagcgggatattagccggttcctggagagcaaccccgtgatgatcgatgccaaggaagtgagcgccgcccaccgggccagatacttctggggcaatctgcctggcatgaacagacccctggccagcaccgtgaacgacaagctggagctgcaggagtgcctggagcacggccggatcgccaagttcagcaaggtgagaaccatcaccacccgaagcaacagcatcaaacaaggcaaggaccagcactttcctgtgttcatgaacgagaaggaggacatcctgtggtgtaccgagatggagagagtgttcgggttcccagtccactacacagatgtcagcaacatgtctagactggccagacagagactgctgggaagaagctggtccgtccctgtgatcagacacctgttcgcccctctgaaggagtacttcgcctgcgtgagcagcggcaacagcaacgccaacagccggggccccagcttctctagcggcctggtgccactgtccctgagagggagccacatgggccccatggagatctacaaaaccgtgagcgcctggaagcggcagcctgtgcgcgtgctgagcctgtttcggaatatcgataaagtcctgaaaagcctgggattcctggagagcggctctggctccggcggtggcaccctgaagtacgtggaggatgtgacaaacgtggtcagacgggatgtggagaagtggggccccttcgatctggtgtacggcagcacccaacccctgggcagctcttgtgaccggtgccctggctggtacatgtttcagttccaccggatcctgcagtacgccctgccgagacaggagtcccagcggccattcttttggattttcatggacaacttgctgctgaccgaggatgaccaggaaactaccactcggttcctgcagaccgaagccgtgaccctgcaggacgtgagaggccgggactaccagaacgccatgcgggtgtggtccaacatccctggactgaaaagcaagcacgcacctctgacccctaaagaagaggagtacctgcaggcccaggtgcggagcagaagcaagctggacgcccctaaggtggatctgctggtgaagaattgcctcctgcccctgagagagtacttcaagtatttcagccagaatagtctgcccctgggaggcagcggcggcggcgaggagctgcccgtggtgttcgaggacgtggccgtgtacttcaccagggaggagtggggcatgctggacaagaggcagaaggagctgtacagggacgtgatgaggatgaactacgagctgctggccagcctgggccccgccgccgccaagcccgacctgatcagcaagctggagaggagggccgccccctggatcaaggaccccaacggcgccaagagcggcggcaagggcaggccccccggcggcggcccaagcagcggcgcccctcctcccagcggcggcagcccagccggctccccaacctctaccgaggagggcacctctgagtccgccacccccgagagcggccctggcacctccaccgagcccagcgagggcagcgcacccggcagccctgccggcagccccacctccacagaggagggaaccagcaccgagcccagcgaaggcagcgccccaggcaccagcaccgagcctagtgagcaggagattaaacggatcaacaagatcagaagaagacttgtgaaagacagcaacaccaagaaggccggcaagacaggccccatgaaaaccctgctggttagagtgatgacacccgatctgagagagcggctggaaaacctgagaaagaagcctgaaaatatcccccagcccatcagcaatacatctagagccaacctgaataagctgctgaccgattacaccgaaatgaagaaggcgatcctgcatgtgtactgggaagagttccagaaggaccctgtgggcctgatgagccgggtggcccagcctgccagcaagaagatcgatcagaacaagctgaaacctgagatggacgagaagggcaacctgaccaccgccggctttgcctgctctcagtgtggccagcccctgttcgtgtacaagctggagcaggtgtctgagaagggcaaggcttacaccaactacttcggacggtgcaatgtggccgagcacgaaaagctgatcctgctggcccagctgaagcccgagaaggatagcgacgaagccgtgacatatagcctgggaaagtttgggcagagggccctggatttctacagcattcatgtgaccaaggagtccacccaccccgtgaagcccctggcccagatcgccggaaacagatacgcctccggacctgtgggaaaggccctgagcgacgcatgtatgggcacaatcgcctccttcctgtctaagtaccaggacatcatcatcgaacaccagaaggtggtgaagggcaaccagaagagactggagagcctgcgggagctggccggcaaggaaaacctggaataccctagcgtgaccctgccacctcagcctcacaccaaggagggcgttgatgcctacaacgaagtgatcgcccgggtgcgaatgtgggtgaacctgaacctgtggcagaagctgaagctaagcagagatgatgccaagcctctgctgagactgaagggattcccttcctttcctctggtcgagagacaggccaacgaagtggactggtgggacatggtgtgtaacgtgaagaagctgatcaacgagaaaaaggaggatggcaaggtgttttggcagaatctggctggctacaagagacaggaagccctgagaccatacctgagcagcgaggaagatcggaagaagggaaagaaattcgctcggtaccagctgggcgacctgctgctgcacctggaaaagaagcacggcgaggactggggaaaggtgtacgacgaggcctgggagcggattgacaagaaagtggaaggcctgagcaagcacatcaagctggaagaggaacggagaagcgaggacgcccagagcaaggccgccctgaccgactggctgcgggctaaggccagcttcgtgatcgagggcctgaaggaggccgacaaggacgagttctgcagatgcgagctgaagctgcagaagtggtacggggacctgcggggaaagcccttcgccatcgaagccgagaacagcatcctggacatcagcggcttcagcaagcagtacaactgtgccttcatctggcagaaggacggcgtgaagaagctgaacctgtacctgatcatcaactacttcaagggcggcaagctgcggttcaagaagatcaaacctgaagccttcgaagccaacagattctacaccgtgatcaacaaaaagagcggcgagatcgtgcccatggaggtgaacttcaacttcgacgaccccaacctgatcatcctgcctctggcctttggcaagagacagggcagagaattcatctggaacgacctgctgtccctggaaaccggcagcctgaagctggccaacggaagagtgatcgagaagacactgtacaacagaagaacccggcaggatgagcctgccctgttcgtggccctgaccttcgagcggcgggaggtcctggactcctccaatatcaaaccaatgaacctgatcggcgtggcaagaggcgaaaacatccccgccgtgatcgccctgaccgaccccgagggctgcccactgagccggtttaaggatagcctgggaaacccaacccacatcctgagaatcggcgagagctataaggagaagcagcggaccatccaggccaagaaggaggtggagcagcggagagccggcggctacagccggaagtacgccagcaaagccaagaatctggcagacgatatggtgagaaacaccgctagagatctgctgtactacgccgtgacccaggatgccatgctgatcttcgccaacctgagccggggcttcggccggcagggcaagcggaccttcatggccgagagacagtacacacggatggaggactggctgaccgccaagctggcctacgagggcctgagcaagacctacctgtccaagacactggcccagtacacctccaagacatgcagcaactgtgggtttaccatcaccagcgccgactacgacagggtgctggagaagctgaagaagacagcaacaggctggatgaccacaattaacggcaaggagctgaaggtggagggccagattacctactacaacagatacaagagacagaacgtagtcaaggacctgtccgtcgagctggatagactgagcgaagaatctgtgaacaacgacatctcctcctggacaaagggcagaagcggagaagctctgagcctcctgaagaaaagattctcccatagacccgtgcaggagaagttcgtgtgcctgaactgcggcttcgagacacacgcagccgagcaagccgccctgaacatcgccagatcctggctgttcctgcggagccaggagtacaagaaataccagacaaacaagacaaccggcaacaccgataagagagccttcgtcgagacctggcagtccttttaccggaagaagcttaaggaggtgtggaaacctgccgtgcggtctggcggatctggcggaggctccaccagccccaagaaaaagagaaaagtctaagctgccttctgcggggcttgccttctggccatgcccttcttctctcccttgcacctgtacctcttggtctttgaataaagcctgagtaggaaggctagcaaaaaaaaaaaaaaaaaaaaaaaaaaaaaaaaaaaaaaaaaaaaaaaaaaaaaaaaaaaaaaaaaaaaaaaaaaaaaaaa

SEQ ID NO: 12545 - RNA, 5785 nt, synthetic construct
  source 1..5785: mol_type = other RNA
aggaaataagagagaaaagaagagtaagaagaaatataagagccaccatggcccctaagaagaagcgtaaagtgagccggatggaacgcctcgtctacgaggtgcggcagaagtgcagaaacatcgaggacatctgcatctcctgcggatctctgaacgtgaccctggagcacccactgttcatcggcggcatgtgccagaactgtaaaaactgttttctggagtgtgcctatcaatacgacgatgacggctaccagagctactgcaccatctgttgcggcggaagagaggtgctgatgtgtggaaataacaactgctgccggtgcttctgcgtggaatgcgtggacctgctggtgggccccggcgccgcccaggccgctattaaggaagatccttggaactgctacatgtgcggccacaagggcacatacggcctgctgagacggagagaggactggcctagcagactgcagatgttcttcgccaataaccacgaccaggagttcgacccccctaaggtgtaccctcccgtccccgccgagaagagaaagcccatccgggtcctgagcctgttcgatggcatcgccaccggtctgctggtgctgaaggacctgggcatccaggtggataggtacattgcctccgaggtgtgcgaggactccatcaccgtgggaatggtgcgtcatcagggcaagatcatgtacgtgggcgacgtgcggagcgtgacacagaagcatatccaggagtggggccctttcgacctggtgatcggcggcagcccttgcaatgacctgagcatcgtgaacccagcccggaagggcctgtacgagggaaccggcagactgttcttcgagttttacagactgctgcacgacgcccggcctaaggaaggcgacgaccggcccttcttttggctgttcgagaatgtggtggccatgggagtcagcgacaagcgggatattagccggttcctggagagcaaccccgtgatgatcgatgccaaggaagtgagcgccgcccaccgggccagatacttctggggcaatctgcctggcatgaacagacccctggccagcaccgtgaacgacaagctggagctgcaggagtgcctggagcacggccggatcgccaagttcagcaaggtgagaaccatcaccacccgaagcaacagcatcaaacaaggcaaggaccagcactttcctgtgttcatgaacgagaaggaggacatcctgtggtgtaccgagatggagagagtgttcgggttcccagtccactacacagatgtcagcaacatgtctagactggccagacagagactgctgggaagaagctggtccgtccctgtgatcagacacctgttcgcccctctgaaggagtacttcgcctgcgtgagcagcggcaacagcaacgccaacagccggggccccagcttctctagcggcctggtgccactgtccctgagagggagccacatgggccccatggagatctacaaaaccgtgagcgcctggaagcggcagcctgtgcgcgtgctgagcctgtttcggaatatcgataaagtcctgaaaagcctgggattcctggagagcggctctggctccggcggtggcaccctgaagtacgtggaggatgtgacaaacgtggtcagacgggatgtggagaagtggggccccttcgatctggtgtacggcagcacccaacccctgggcagctcttgtgaccggtgccctggctggtacatgtttcagttccaccggatcctgcagtacgccctgccgagacaggagtcccagcggccattcttttggattttcatggacaacttgctgctgaccgaggatgaccaggaaactaccactcggttcctgcagaccgaagccgtgaccctgcaggacgtgagaggccgggactaccagaacgccatgcgggtgtggtccaacatccctggactgaaaagcaagcacgcacctctgacccctaaagaagaggagtacctgcaggcccaggtgcggagcagaagcaagctggacgcccctaaggtggatctgctggtgaagaattgcctcctgcccctgagagagtacttcaagtatttcagccagaatagtctgcccctgggaggcagcggcggcggcaagcacggccccgtgaccttcgaggaggtggccgtgtacttcaccagggaggagtgggccctgctggaccccacccagagggccctgtacagggacgtgatgcaggagaactacgagatggtggtgctgctgggcttcctgaacagcaagcccgacgtgatcagccagctggagcagggcgaggagccctgcatcgtggacctgcagggcagcgagaaggaggtgctgcccagggccgcctgcggcggcccaagcagcggcgcccctcctcccagcggcggcagcccagccggctccccaacctctaccgaggagggcacctctgagtccgccacccccgagagcggccctggcacctccaccgagcccagcgagggcagcgcacccggcagccctgccggcagccccacctccacagaggagggaaccagcaccgagcccagcgaaggcagcgccccaggcaccagcaccgagcctagtgagcaggagattaaacggatcaacaagatcagaagaagacttgtgaaagacagcaacaccaagaaggccggcaagacaggccccatgaaaaccctgctggttagagtgatgacacccgatctgagagagcggctggaaaacctgagaaagaagcctgaaaatatcccccagcccatcagcaatacatctagagccaacctgaataagctgctgaccgattacaccgaaatgaagaaggcgatcctgcatgtgtactgggaagagttccagaaggaccctgtgggcctgatgagccgggtggcccagcctgccagcaagaagatcgatcagaacaagctgaaacctgagatggacgagaagggcaacctgaccaccgccggctttgcctgctctcagtgtggccagcccctgttcgtgtacaagctggagcaggtgtctgagaagggcaaggcttacaccaactacttcggacggtgcaatgtggccgagcacgaaaagctgatcctgctggcccagctgaagcccgagaaggatagcgacgaagccgtgacatatagcctgggaaagtttgggcagagggccctggatttctacagcattcatgtgaccaaggagtccacccaccccgtgaagcccctggcccagatcgccggaaacagatacgcctccggacctgtgggaaaggccctgagcgacgcatgtatgggcacaatcgcctccttcctgtctaagtaccaggacatcatcatcgaacaccagaaggtggtgaagggcaaccagaagagactggagagcctgcgggagctggccggcaaggaaaacctggaataccctagcgtgaccctgccacctcagcctcacaccaaggagggcgttgatgcctacaacgaagtgatcgcccgggtgcgaatgtgggtgaacctgaacctgtggcagaagctgaagctaagcagagatgatgccaagcctctgctgagactgaagggattcccttcctttcctctggtcgagagacaggccaacgaagtggactggtgggacatggtgtgtaacgtgaagaagctgatcaacgagaaaaaggaggatggcaaggtgttttggcagaatctggctggctacaagagacaggaagccctgagaccatacctgagcagcgaggaagatcggaagaagggaaagaaattcgctcggtaccagctgggcgacctgctgctgcacctggaaaagaagcacggcgaggactggggaaaggtgtacgacgaggcctgggagcggattgacaagaaagtggaaggcctgagcaagcacatcaagctggaagaggaacggagaagcgaggacgcccagagcaaggccgccctgaccgactggctgcgggctaaggccagcttcgtgatcgagggcctgaaggaggccgacaaggacgagttctgcagatgcgagctgaagctgcagaagtggtacggggacctgcggggaaagcccttcgccatcgaagccgagaacagcatcctggacatcagcggcttcagcaagcagtacaactgtgccttcatctggcagaaggacggcgtgaagaagctgaacctgtacctgatcatcaactacttcaagggcggcaagctgcggttcaagaagatcaaacctgaagccttcgaagccaacagattctacaccgtgatcaacaaaaagagcggcgagatcgtgcccatggaggtgaacttcaacttcgacgaccccaacctgatcatcctgcctctggcctttggcaagagacagggcagagaattcatctggaacgacctgctgtccctggaaaccggcagcctgaagctggccaacggaagagtgatcgagaagacactgtacaacagaagaacccggcaggatgagcctgccctgttcgtggccctgaccttcgagcggcgggaggtcctggactcctccaatatcaaaccaatgaacctgatcggcgtggcaagaggcgaaaacatccccgccgtgatcgccctgaccgaccccgagggctgcccactgagccggtttaaggatagcctgggaaacccaacccacatcctgagaatcggcgagagctataaggagaagcagcggaccatccaggccaagaaggaggtggagcagcggagagccggcggctacagccggaagtacgccagcaaagccaagaatctggcagacgatatggtgagaaacaccgctagagatctgctgtactacgccgtgacccaggatgccatgctgatcttcgccaacctgagccggggcttcggccggcagggcaagcggaccttcatggccgagagacagtacacacggatggaggactggctgaccgccaagctggcctacgagggcctgagcaagacctacctgtccaagacactggcccagtacacctccaagacatgcagcaactgtgggtttaccatcaccagcgccgactacgacagggtgctggagaagctgaagaagacagcaacaggctggatgaccacaattaacggcaaggagctgaaggtggagggccagattacctactacaacagatacaagagacagaacgtagtcaaggacctgtccgtcgagctggatagactgagcgaagaatctgtgaacaacgacatctcctcctggacaaagggcagaagcggagaagctctgagcctcctgaagaaaagattctcccatagacccgtgcaggagaagttcgtgtgcctgaactgcggcttcgagacacacgcagccgagcaagccgccctgaacatcgccagatcctggctgttcctgcggagccaggagtacaagaaataccagacaaacaagacaaccggcaacaccgataagagagccttcgtcgagacctggcagtccttttaccggaagaagcttaaggaggtgtggaaacctgccgtgcggtctggcggatctggcggaggctccaccagccccaagaaaaagagaaaagtctaagctgccttctgcggggcttgccttctggccatgcccttcttctctcccttgcacctgtacctcttggtctttgaataaagcctgagtaggaaggctagcaaaaaaaaaaaaaaaaaaaaaaaaaaaaaaaaaaaaaaaaaaaaaaaaaaaaaaaaaaaaaaaaaaaaaaaaaaaaaaaa

SEQ ID NO: 12546 - RNA, 5785 nt, synthetic construct
  source 1..5785: mol_type = other RNA
aggaaataagagagaaaagaagagtaagaagaaatataagagccaccatggcccctaagaagaagcgtaaagtgagccggatggaacgcctcgtctacgaggtgcggcagaagtgcagaaacatcgaggacatctgcatctcctgcggatctctgaacgtgaccctggagcacccactgttcatcggcggcatgtgccagaactgtaaaaactgttttctggagtgtgcctatcaatacgacgatgacggctaccagagctactgcaccatctgttgcggcggaagagaggtgctgatgtgtggaaataacaactgctgccggtgcttctgcgtggaatgcgtggacctgctggtgggccccggcgccgcccaggccgctattaaggaagatccttggaactgctacatgtgcggccacaagggcacatacggcctgctgagacggagagaggactggcctagcagactgcagatgttcttcgccaataaccacgaccaggagttcgacccccctaaggtgtaccctcccgtccccgccgagaagagaaagcccatccgggtcctgagcctgttcgatggcatcgccaccggtctgctggtgctgaaggacctgggcatccaggtggataggtacattgcctccgaggtgtgcgaggactccatcaccgtgggaatggtgcgtcatcagggcaagatcatgtacgtgggcgacgtgcggagcgtgacacagaagcatatccaggagtggggccctttcgacctggtgatcggcggcagcccttgcaatgacctgagcatcgtgaacccagcccggaagggcctgtacgagggaaccggcagactgttcttcgagttttacagactgctgcacgacgcccggcctaaggaaggcgacgaccggcccttcttttggctgttcgagaatgtggtggccatgggagtcagcgacaagcgggatattagccggttcctggagagcaaccccgtgatgatcgatgccaaggaagtgagcgccgcccaccgggccagatacttctggggcaatctgcctggcatgaacagacccctggccagcaccgtgaacgacaagctggagctgcaggagtgcctggagcacggccggatcgccaagttcagcaaggtgagaaccatcaccacccgaagcaacagcatcaaacaaggcaaggaccagcactttcctgtgttcatgaacgagaaggaggacatcctgtggtgtaccgagatggagagagtgttcgggttcccagtccactacacagatgtcagcaacatgtctagactggccagacagagactgctgggaagaagctggtccgtccctgtgatcagacacctgttcgcccctctgaaggagtacttcgcctgcgtgagcagcggcaacagcaacgccaacagccggggccccagcttctctagcggcctggtgccactgtccctgagagggagccacatgggccccatggagatctacaaaaccgtgagcgcctggaagcggcagcctgtgcgcgtgctgagcctgtttcggaatatcgataaagtcctgaaaagcctgggattcctggagagcggctctggctccggcggtggcaccctgaagtacgtggaggatgtgacaaacgtggtcagacgggatgtggagaagtggggccccttcgatctggtgtacggcagcacccaacccctgggcagctcttgtgaccggtgccctggctggtacatgtttcagttccaccggatcctgcagtacgccctgccgagacaggagtcccagcggccattcttttggattttcatggacaacttgctgctgaccgaggatgaccaggaaactaccactcggttcctgcagaccgaagccgtgaccctgcaggacgtgagaggccgggactaccagaacgccatgcgggtgtggtccaacatccctggactgaaaagcaagcacgcacctctgacccctaaagaagaggagtacctgcaggcccaggtgcggagcagaagcaagctggacgcccctaaggtggatctgctggtgaagaattgcctcctgcccctgagagagtacttcaagtatttcagccagaatagtctgcccctgggaggcagcggcggcggcagccaggaggtggtgaccttccaggacgtggccgtgaacttcaccagggaggagtggaggctgctgagccccccccagaaggagctgtacagggaggtgatgctggagaacgccaggaacctgctgagcgtgggcctgcccgccagcatcgaggacgtgatcagcaacgtggagcagagggaggccctgtggatgctggagagggagggcctgaggagctgctgccccgaggaggacatcaggggcggcccaagcagcggcgcccctcctcccagcggcggcagcccagccggctccccaacctctaccgaggagggcacctctgagtccgccacccccgagagcggccctggcacctccaccgagcccagcgagggcagcgcacccggcagccctgccggcagccccacctccacagaggagggaaccagcaccgagcccagcgaaggcagcgccccaggcaccagcaccgagcctagtgagcaggagattaaacggatcaacaagatcagaagaagacttgtgaaagacagcaacaccaagaaggccggcaagacaggccccatgaaaaccctgctggttagagtgatgacacccgatctgagagagcggctggaaaacctgagaaagaagcctgaaaatatcccccagcccatcagcaatacatctagagccaacctgaataagctgctgaccgattacaccgaaatgaagaaggcgatcctgcatgtgtactgggaagagttccagaaggaccctgtgggcctgatgagccgggtggcccagcctgccagcaagaagatcgatcagaacaagctgaaacctgagatggacgagaagggcaacctgaccaccgccggctttgcctgctctcagtgtggccagcccctgttcgtgtacaagctggagcaggtgtctgagaagggcaaggcttacaccaactacttcggacggtgcaatgtggccgagcacgaaaagctgatcctgctggcccagctgaagcccgagaaggatagcgacgaagccgtgacatatagcctgggaaagtttgggcagagggccctggatttctacagcattcatgtgaccaaggagtccacccaccccgtgaagcccctggcccagatcgccggaaacagatacgcctccggacctgtgggaaaggccctgagcgacgcatgtatgggcacaatcgcctccttcctgtctaagtaccaggacatcatcatcgaacaccagaaggtggtgaagggcaaccagaagagactggagagcctgcgggagctggccggcaaggaaaacctggaataccctagcgtgaccctgccacctcagcctcacaccaaggagggcgttgatgcctacaacgaagtgatcgcccgggtgcgaatgtgggtgaacctgaacctgtggcagaagctgaagctaagcagagatgatgccaagcctctgctgagactgaagggattcccttcctttcctctggtcgagagacaggccaacgaagtggactggtgggacatggtgtgtaacgtgaagaagctgatcaacgagaaaaaggaggatggcaaggtgttttggcagaatctggctggctacaagagacaggaagccctgagaccatacctgagcagcgaggaagatcggaagaagggaaagaaattcgctcggtaccagctgggcgacctgctgctgcacctggaaaagaagcacggcgaggactggggaaaggtgtacgacgaggcctgggagcggattgacaagaaagtggaaggcctgagcaagcacatcaagctggaagaggaacggagaagcgaggacgcccagagcaaggccgccctgaccgactggctgcgggctaaggccagcttcgtgatcgagggcctgaaggaggccgacaaggacgagttctgcagatgcgagctgaagctgcagaagtggtacggggacctgcggggaaagcccttcgccatcgaagccgagaacagcatcctggacatcagcggcttcagcaagcagtacaactgtgccttcatctggcagaaggacggcgtgaagaagctgaacctgtacctgatcatcaactacttcaagggcggcaagctgcggttcaagaagatcaaacctgaagccttcgaagccaacagattctacaccgtgatcaacaaaaagagcggcgagatcgtgcccatggaggtgaacttcaacttcgacgaccccaacctgatcatcctgcctctggcctttggcaagagacagggcagagaattcatctggaacgacctgctgtccctggaaaccggcagcctgaagctggccaacggaagagtgatcgagaagacactgtacaacagaagaacccggcaggatgagcctgccctgttcgtggccctgaccttcgagcggcgggaggtcctggactcctccaatatcaaaccaatgaacctgatcggcgtggcaagaggcgaaaacatccccgccgtgatcgccctgaccgaccccgagggctgcccactgagccggtttaaggatagcctgggaaacccaacccacatcctgagaatcggcgagagctataaggagaagcagcggaccatccaggccaagaaggaggtggagcagcggagagccggcggctacagccggaagtacgccagcaaagccaagaatctggcagacgatatggtgagaaacaccgctagagatctgctgtactacgccgtgacccaggatgccatgctgatcttcgccaacctgagccggggcttcggccggcagggcaagcggaccttcatggccgagagacagtacacacggatggaggactggctgaccgccaagctggcctacgagggcctgagcaagacctacctgtccaagacactggcccagtacacctccaagacatgcagcaactgtgggtttaccatcaccagcgccgactacgacagggtgctggagaagctgaagaagacagcaacaggctggatgaccacaattaacggcaaggagctgaaggtggagggccagattacctactacaacagatacaagagacagaacgtagtcaaggacctgtccgtcgagctggatagactgagcgaagaatctgtgaacaacgacatctcctcctggacaaagggcagaagcggagaagctctgagcctcctgaagaaaagattctcccatagacccgtgcaggagaagttcgtgtgcctgaactgcggcttcgagacacacgcagccgagcaagccgccctgaacatcgccagatcctggctgttcctgcggagccaggagtacaagaaataccagacaaacaagacaaccggcaacaccgataagagagccttcgtcgagacctggcagtccttttaccggaagaagcttaaggaggtgtggaaacctgccgtgcggtctggcggatctggcggaggctccaccagccccaagaaaaagagaaaagtctaagctgccttctgcggggcttgccttctggccatgcccttcttctctcccttgcacctgtacctcttggtctttgaataaagcctgagtaggaaggctagcaaaaaaaaaaaaaaaaaaaaaaaaaaaaaaaaaaaaaaaaaaaaaaaaaaaaaaaaaaaaaaaaaaaaaaaaaaaaaaaa

SEQ ID NO: 12547 - RNA, 5785 nt, synthetic construct
  source 1..5785: mol_type = other RNA
aggaaataagagagaaaagaagagtaagaagaaatataagagccaccatggcccctaagaagaagcgtaaagtgagccggatggaacgcctcgtctacgaggtgcggcagaagtgcagaaacatcgaggacatctgcatctcctgcggatctctgaacgtgaccctggagcacccactgttcatcggcggcatgtgccagaactgtaaaaactgttttctggagtgtgcctatcaatacgacgatgacggctaccagagctactgcaccatctgttgcggcggaagagaggtgctgatgtgtggaaataacaactgctgccggtgcttctgcgtggaatgcgtggacctgctggtgggccccggcgccgcccaggccgctattaaggaagatccttggaactgctacatgtgcggccacaagggcacatacggcctgctgagacggagagaggactggcctagcagactgcagatgttcttcgccaataaccacgaccaggagttcgacccccctaaggtgtaccctcccgtccccgccgagaagagaaagcccatccgggtcctgagcctgttcgatggcatcgccaccggtctgctggtgctgaaggacctgggcatccaggtggataggtacattgcctccgaggtgtgcgaggactccatcaccgtgggaatggtgcgtcatcagggcaagatcatgtacgtgggcgacgtgcggagcgtgacacagaagcatatccaggagtggggccctttcgacctggtgatcggcggcagcccttgcaatgacctgagcatcgtgaacccagcccggaagggcctgtacgagggaaccggcagactgttcttcgagttttacagactgctgcacgacgcccggcctaaggaaggcgacgaccggcccttcttttggctgttcgagaatgtggtggccatgggagtcagcgacaagcgggatattagccggttcctggagagcaaccccgtgatgatcgatgccaaggaagtgagcgccgcccaccgggccagatacttctggggcaatctgcctggcatgaacagacccctggccagcaccgtgaacgacaagctggagctgcaggagtgcctggagcacggccggatcgccaagttcagcaaggtgagaaccatcaccacccgaagcaacagcatcaaacaaggcaaggaccagcactttcctgtgttcatgaacgagaaggaggacatcctgtggtgtaccgagatggagagagtgttcgggttcccagtccactacacagatgtcagcaacatgtctagactggccagacagagactgctgggaagaagctggtccgtccctgtgatcagacacctgttcgcccctctgaaggagtacttcgcctgcgtgagcagcggcaacagcaacgccaacagccggggccccagcttctctagcggcctggtgccactgtccctgagagggagccacatgggccccatggagatctacaaaaccgtgagcgcctggaagcggcagcctgtgcgcgtgctgagcctgtttcggaatatcgataaagtcctgaaaagcctgggattcctggagagcggctctggctccggcggtggcaccctgaagtacgtggaggatgtgacaaacgtggtcagacgggatgtggagaagtggggccccttcgatctggtgtacggcagcacccaacccctgggcagctcttgtgaccggtgccctggctggtacatgtttcagttccaccggatcctgcagtacgccctgccgagacaggagtcccagcggccattcttttggattttcatggacaacttgctgctgaccgaggatgaccaggaaactaccactcggttcctgcagaccgaagccgtgaccctgcaggacgtgagaggccgggactaccagaacgccatgcgggtgtggtccaacatccctggactgaaaagcaagcacgcacctctgacccctaaagaagaggagtacctgcaggcccaggtgcggagcagaagcaagctggacgcccctaaggtggatctgctggtgaagaattgcctcctgcccctgagagagtacttcaagtatttcagccagaatagtctgcccctgggaggcagcggcggcggcgagagcgtggccttcgaggacgtggccgtgtacttcacccagaaccagtggggcagcctggaccccgcccagagggccctgtacagggaggtgatgctggagaactacgccaacgtggccagcctggtggccttccccttccccaagcccgccctgatcagccacctggagaagggcgaggccccctggggccccgacccctgggacgccgagatccccagcggcatcagccagggcggcgagggcggcccaagcagcggcgcccctcctcccagcggcggcagcccagccggctccccaacctctaccgaggagggcacctctgagtccgccacccccgagagcggccctggcacctccaccgagcccagcgagggcagcgcacccggcagccctgccggcagccccacctccacagaggagggaaccagcaccgagcccagcgaaggcagcgccccaggcaccagcaccgagcctagtgagcaggagattaaacggatcaacaagatcagaagaagacttgtgaaagacagcaacaccaagaaggccggcaagacaggccccatgaaaaccctgctggttagagtgatgacacccgatctgagagagcggctggaaaacctgagaaagaagcctgaaaatatcccccagcccatcagcaatacatctagagccaacctgaataagctgctgaccgattacaccgaaatgaagaaggcgatcctgcatgtgtactgggaagagttccagaaggaccctgtgggcctgatgagccgggtggcccagcctgccagcaagaagatcgatcagaacaagctgaaacctgagatggacgagaagggcaacctgaccaccgccggctttgcctgctctcagtgtggccagcccctgttcgtgtacaagctggagcaggtgtctgagaagggcaaggcttacaccaactacttcggacggtgcaatgtggccgagcacgaaaagctgatcctgctggcccagctgaagcccgagaaggatagcgacgaagccgtgacatatagcctgggaaagtttgggcagagggccctggatttctacagcattcatgtgaccaaggagtccacccaccccgtgaagcccctggcccagatcgccggaaacagatacgcctccggacctgtgggaaaggccctgagcgacgcatgtatgggcacaatcgcctccttcctgtctaagtaccaggacatcatcatcgaacaccagaaggtggtgaagggcaaccagaagagactggagagcctgcgggagctggccggcaaggaaaacctggaataccctagcgtgaccctgccacctcagcctcacaccaaggagggcgttgatgcctacaacgaagtgatcgcccgggtgcgaatgtgggtgaacctgaacctgtggcagaagctgaagctaagcagagatgatgccaagcctctgctgagactgaagggattcccttcctttcctctggtcgagagacaggccaacgaagtggactggtgggacatggtgtgtaacgtgaagaagctgatcaacgagaaaaaggaggatggcaaggtgttttggcagaatctggctggctacaagagacaggaagccctgagaccatacctgagcagcgaggaagatcggaagaagggaaagaaattcgctcggtaccagctgggcgacctgctgctgcacctggaaaagaagcacggcgaggactggggaaaggtgtacgacgaggcctgggagcggattgacaagaaagtggaaggcctgagcaagcacatcaagctggaagaggaacggagaagcgaggacgcccagagcaaggccgccctgaccgactggctgcgggctaaggccagcttcgtgatcgagggcctgaaggaggccgacaaggacgagttctgcagatgcgagctgaagctgcagaagtggtacggggacctgcggggaaagcccttcgccatcgaagccgagaacagcatcctggacatcagcggcttcagcaagcagtacaactgtgccttcatctggcagaaggacggcgtgaagaagctgaacctgtacctgatcatcaactacttcaagggcggcaagctgcggttcaagaagatcaaacctgaagccttcgaagccaacagattctacaccgtgatcaacaaaaagagcggcgagatcgtgcccatggaggtgaacttcaacttcgacgaccccaacctgatcatcctgcctctggcctttggcaagagacagggcagagaattcatctggaacgacctgctgtccctggaaaccggcagcctgaagctggccaacggaagagtgatcgagaagacactgtacaacagaagaacccggcaggatgagcctgccctgttcgtggccctgaccttcgagcggcgggaggtcctggactcctccaatatcaaaccaatgaacctgatcggcgtggcaagaggcgaaaacatccccgccgtgatcgccctgaccgaccccgagggctgcccactgagccggtttaaggatagcctgggaaacccaacccacatcctgagaatcggcgagagctataaggagaagcagcggaccatccaggccaagaaggaggtggagcagcggagagccggcggctacagccggaagtacgccagcaaagccaagaatctggcagacgatatggtgagaaacaccgctagagatctgctgtactacgccgtgacccaggatgccatgctgatcttcgccaacctgagccggggcttcggccggcagggcaagcggaccttcatggccgagagacagtacacacggatggaggactggctgaccgccaagctggcctacgagggcctgagcaagacctacctgtccaagacactggcccagtacacctccaagacatgcagcaactgtgggtttaccatcaccagcgccgactacgacagggtgctggagaagctgaagaagacagcaacaggctggatgaccacaattaacggcaaggagctgaaggtggagggccagattacctactacaacagatacaagagacagaacgtagtcaaggacctgtccgtcgagctggatagactgagcgaagaatctgtgaacaacgacatctcctcctggacaaagggcagaagcggagaagctctgagcctcctgaagaaaagattctcccatagacccgtgcaggagaagttcgtgtgcctgaactgcggcttcgagacacacgcagccgagcaagccgccctgaacatcgccagatcctggctgttcctgcggagccaggagtacaagaaataccagacaaacaagacaaccggcaacaccgataagagagccttcgtcgagacctggcagtccttttaccggaagaagcttaaggaggtgtggaaacctgccgtgcggtctggcggatctggcggaggctccaccagccccaagaaaaagagaaaagtctaagctgccttctgcggggcttgccttctggccatgcccttcttctctcccttgcacctgtacctcttggtctttgaataaagcctgagtaggaaggctagcaaaaaaaaaaaaaaaaaaaaaaaaaaaaaaaaaaaaaaaaaaaaaaaaaaaaaaaaaaaaaaaaaaaaaaaaaaaaaaaa

SEQ ID NO: 12548 - RNA, 5785 nt, synthetic construct
  source 1..5785: mol_type = other RNA
aggaaataagagagaaaagaagagtaagaagaaatataagagccaccatggcccctaagaagaagcgtaaagtgagccggatggaacgcctcgtctacgaggtgcggcagaagtgcagaaacatcgaggacatctgcatctcctgcggatctctgaacgtgaccctggagcacccactgttcatcggcggcatgtgccagaactgtaaaaactgttttctggagtgtgcctatcaatacgacgatgacggctaccagagctactgcaccatctgttgcggcggaagagaggtgctgatgtgtggaaataacaactgctgccggtgcttctgcgtggaatgcgtggacctgctggtgggccccggcgccgcccaggccgctattaaggaagatccttggaactgctacatgtgcggccacaagggcacatacggcctgctgagacggagagaggactggcctagcagactgcagatgttcttcgccaataaccacgaccaggagttcgacccccctaaggtgtaccctcccgtccccgccgagaagagaaagcccatccgggtcctgagcctgttcgatggcatcgccaccggtctgctggtgctgaaggacctgggcatccaggtggataggtacattgcctccgaggtgtgcgaggactccatcaccgtgggaatggtgcgtcatcagggcaagatcatgtacgtgggcgacgtgcggagcgtgacacagaagcatatccaggagtggggccctttcgacctggtgatcggcggcagcccttgcaatgacctgagcatcgtgaacccagcccggaagggcctgtacgagggaaccggcagactgttcttcgagttttacagactgctgcacgacgcccggcctaaggaaggcgacgaccggcccttcttttggctgttcgagaatgtggtggccatgggagtcagcgacaagcgggatattagccggttcctggagagcaaccccgtgatgatcgatgccaaggaagtgagcgccgcccaccgggccagatacttctggggcaatctgcctggcatgaacagacccctggccagcaccgtgaacgacaagctggagctgcaggagtgcctggagcacggccggatcgccaagttcagcaaggtgagaaccatcaccacccgaagcaacagcatcaaacaaggcaaggaccagcactttcctgtgttcatgaacgagaaggaggacatcctgtggtgtaccgagatggagagagtgttcgggttcccagtccactacacagatgtcagcaacatgtctagactggccagacagagactgctgggaagaagctggtccgtccctgtgatcagacacctgttcgcccctctgaaggagtacttcgcctgcgtgagcagcggcaacagcaacgccaacagccggggccccagcttctctagcggcctggtgccactgtccctgagagggagccacatgggccccatggagatctacaaaaccgtgagcgcctggaagcggcagcctgtgcgcgtgctgagcctgtttcggaatatcgataaagtcctgaaaagcctgggattcctggagagcggctctggctccggcggtggcaccctgaagtacgtggaggatgtgacaaacgtggtcagacgggatgtggagaagtggggccccttcgatctggtgtacggcagcacccaacccctgggcagctcttgtgaccggtgccctggctggtacatgtttcagttccaccggatcctgcagtacgccctgccgagacaggagtcccagcggccattcttttggattttcatggacaacttgctgctgaccgaggatgaccaggaaactaccactcggttcctgcagaccgaagccgtgaccctgcaggacgtgagaggccgggactaccagaacgccatgcgggtgtggtccaacatccctggactgaaaagcaagcacgcacctctgacccctaaagaagaggagtacctgcaggcccaggtgcggagcagaagcaagctggacgcccctaaggtggatctgctggtgaagaattgcctcctgcccctgagagagtacttcaagtatttcagccagaatagtctgcccctgggaggcagcggcggcggcagcgagggcctggtgaccttcggcgacgtggccgtggacttcagccaggaggagtgggagtggctgaaccccgcccagaggagcctgtacaggaaggtgatgctggacaactacaggagcctggtgagcctgggcgtgagcgtgagcaagcccgacgtgatcagcctgctggagcagggcaaggagccctggctggtgaaggaggagggccccaggggcgccaggagcgactgggagtacgccggcggcccaagcagcggcgcccctcctcccagcggcggcagcccagccggctccccaacctctaccgaggagggcacctctgagtccgccacccccgagagcggccctggcacctccaccgagcccagcgagggcagcgcacccggcagccctgccggcagccccacctccacagaggagggaaccagcaccgagcccagcgaaggcagcgccccaggcaccagcaccgagcctagtgagcaggagattaaacggatcaacaagatcagaagaagacttgtgaaagacagcaacaccaagaaggccggcaagacaggccccatgaaaaccctgctggttagagtgatgacacccgatctgagagagcggctggaaaacctgagaaagaagcctgaaaatatcccccagcccatcagcaatacatctagagccaacctgaataagctgctgaccgattacaccgaaatgaagaaggcgatcctgcatgtgtactgggaagagttccagaaggaccctgtgggcctgatgagccgggtggcccagcctgccagcaagaagatcgatcagaacaagctgaaacctgagatggacgagaagggcaacctgaccaccgccggctttgcctgctctcagtgtggccagcccctgttcgtgtacaagctggagcaggtgtctgagaagggcaaggcttacaccaactacttcggacggtgcaatgtggccgagcacgaaaagctgatcctgctggcccagctgaagcccgagaaggatagcgacgaagccgtgacatatagcctgggaaagtttgggcagagggccctggatttctacagcattcatgtgaccaaggagtccacccaccccgtgaagcccctggcccagatcgccggaaacagatacgcctccggacctgtgggaaaggccctgagcgacgcatgtatgggcacaatcgcctccttcctgtctaagtaccaggacatcatcatcgaacaccagaaggtggtgaagggcaaccagaagagactggagagcctgcgggagctggccggcaaggaaaacctggaataccctagcgtgaccctgccacctcagcctcacaccaaggagggcgttgatgcctacaacgaagtgatcgcccgggtgcgaatgtgggtgaacctgaacctgtggcagaagctgaagctaagcagagatgatgccaagcctctgctgagactgaagggattcccttcctttcctctggtcgagagacaggccaacgaagtggactggtgggacatggtgtgtaacgtgaagaagctgatcaacgagaaaaaggaggatggcaaggtgttttggcagaatctggctggctacaagagacaggaagccctgagaccatacctgagcagcgaggaagatcggaagaagggaaagaaattcgctcggtaccagctgggcgacctgctgctgcacctggaaaagaagcacggcgaggactggggaaaggtgtacgacgaggcctgggagcggattgacaagaaagtggaaggcctgagcaagcacatcaagctggaagaggaacggagaagcgaggacgcccagagcaaggccgccctgaccgactggctgcgggctaaggccagcttcgtgatcgagggcctgaaggaggccgacaaggacgagttctgcagatgcgagctgaagctgcagaagtggtacggggacctgcggggaaagcccttcgccatcgaagccgagaacagcatcctggacatcagcggcttcagcaagcagtacaactgtgccttcatctggcagaaggacggcgtgaagaagctgaacctgtacctgatcatcaactacttcaagggcggcaagctgcggttcaagaagatcaaacctgaagccttcgaagccaacagattctacaccgtgatcaacaaaaagagcggcgagatcgtgcccatggaggtgaacttcaacttcgacgaccccaacctgatcatcctgcctctggcctttggcaagagacagggcagagaattcatctggaacgacctgctgtccctggaaaccggcagcctgaagctggccaacggaagagtgatcgagaagacactgtacaacagaagaacccggcaggatgagcctgccctgttcgtggccctgaccttcgagcggcgggaggtcctggactcctccaatatcaaaccaatgaacctgatcggcgtggcaagaggcgaaaacatccccgccgtgatcgccctgaccgaccccgagggctgcccactgagccggtttaaggatagcctgggaaacccaacccacatcctgagaatcggcgagagctataaggagaagcagcggaccatccaggccaagaaggaggtggagcagcggagagccggcggctacagccggaagtacgccagcaaagccaagaatctggcagacgatatggtgagaaacaccgctagagatctgctgtactacgccgtgacccaggatgccatgctgatcttcgccaacctgagccggggcttcggccggcagggcaagcggaccttcatggccgagagacagtacacacggatggaggactggctgaccgccaagctggcctacgagggcctgagcaagacctacctgtccaagacactggcccagtacacctccaagacatgcagcaactgtgggtttaccatcaccagcgccgactacgacagggtgctggagaagctgaagaagacagcaacaggctggatgaccacaattaacggcaaggagctgaaggtggagggccagattacctactacaacagatacaagagacagaacgtagtcaaggacctgtccgtcgagctggatagactgagcgaagaatctgtgaacaacgacatctcctcctggacaaagggcagaagcggagaagctctgagcctcctgaagaaaagattctcccatagacccgtgcaggagaagttcgtgtgcctgaactgcggcttcgagacacacgcagccgagcaagccgccctgaacatcgccagatcctggctgttcctgcggagccaggagtacaagaaataccagacaaacaagacaaccggcaacaccgataagagagccttcgtcgagacctggcagtccttttaccggaagaagcttaaggaggtgtggaaacctgccgtgcggtctggcggatctggcggaggctccaccagccccaagaaaaagagaaaagtctaagctgccttctgcggggcttgccttctggccatgcccttcttctctcccttgcacctgtacctcttggtctttgaataaagcctgagtaggaaggctagcaaaaaaaaaaaaaaaaaaaaaaaaaaaaaaaaaaaaaaaaaaaaaaaaaaaaaaaaaaaaaaaaaaaaaaaaaaaaaaaa

SEQ ID NO: 12549 - RNA, 5785 nt, synthetic construct
  source 1..5785: mol_type = other RNA
aggaaataagagagaaaagaagagtaagaagaaatataagagccaccatggcccctaagaagaagcgtaaagtgagccggatggaacgcctcgtctacgaggtgcggcagaagtgcagaaacatcgaggacatctgcatctcctgcggatctctgaacgtgaccctggagcacccactgttcatcggcggcatgtgccagaactgtaaaaactgttttctggagtgtgcctatcaatacgacgatgacggctaccagagctactgcaccatctgttgcggcggaagagaggtgctgatgtgtggaaataacaactgctgccggtgcttctgcgtggaatgcgtggacctgctggtgggccccggcgccgcccaggccgctattaaggaagatccttggaactgctacatgtgcggccacaagggcacatacggcctgctgagacggagagaggactggcctagcagactgcagatgttcttcgccaataaccacgaccaggagttcgacccccctaaggtgtaccctcccgtccccgccgagaagagaaagcccatccgggtcctgagcctgttcgatggcatcgccaccggtctgctggtgctgaaggacctgggcatccaggtggataggtacattgcctccgaggtgtgcgaggactccatcaccgtgggaatggtgcgtcatcagggcaagatcatgtacgtgggcgacgtgcggagcgtgacacagaagcatatccaggagtggggccctttcgacctggtgatcggcggcagcccttgcaatgacctgagcatcgtgaacccagcccggaagggcctgtacgagggaaccggcagactgttcttcgagttttacagactgctgcacgacgcccggcctaaggaaggcgacgaccggcccttcttttggctgttcgagaatgtggtggccatgggagtcagcgacaagcgggatattagccggttcctggagagcaaccccgtgatgatcgatgccaaggaagtgagcgccgcccaccgggccagatacttctggggcaatctgcctggcatgaacagacccctggccagcaccgtgaacgacaagctggagctgcaggagtgcctggagcacggccggatcgccaagttcagcaaggtgagaaccatcaccacccgaagcaacagcatcaaacaaggcaaggaccagcactttcctgtgttcatgaacgagaaggaggacatcctgtggtgtaccgagatggagagagtgttcgggttcccagtccactacacagatgtcagcaacatgtctagactggccagacagagactgctgggaagaagctggtccgtccctgtgatcagacacctgttcgcccctctgaaggagtacttcgcctgcgtgagcagcggcaacagcaacgccaacagccggggccccagcttctctagcggcctggtgccactgtccctgagagggagccacatgggccccatggagatctacaaaaccgtgagcgcctggaagcggcagcctgtgcgcgtgctgagcctgtttcggaatatcgataaagtcctgaaaagcctgggattcctggagagcggctctggctccggcggtggcaccctgaagtacgtggaggatgtgacaaacgtggtcagacgggatgtggagaagtggggccccttcgatctggtgtacggcagcacccaacccctgggcagctcttgtgaccggtgccctggctggtacatgtttcagttccaccggatcctgcagtacgccctgccgagacaggagtcccagcggccattcttttggattttcatggacaacttgctgctgaccgaggatgaccaggaaactaccactcggttcctgcagaccgaagccgtgaccctgcaggacgtgagaggccgggactaccagaacgccatgcgggtgtggtccaacatccctggactgaaaagcaagcacgcacctctgacccctaaagaagaggagtacctgcaggcccaggtgcggagcagaagcaagctggacgcccctaaggtggatctgctggtgaagaattgcctcctgcccctgagagagtacttcaagtatttcagccagaatagtctgcccctgggaggcagcggcggcggcgaggagctgcccgtggtgttcgaggacgtggccgtgtacttcaccagggaggagtggggcatgctggtgaagaggcagaaggagctgtacagggacgtgatgaggatgaactacgagctgctggccagcctgggccccgccgccgccaagcccgacctgatcctgaagctggagaggagggccgccccctggatcaaggaccccaacggccccaagtggggcaagggcaggccccccggcaagggcggcccaagcagcggcgcccctcctcccagcggcggcagcccagccggctccccaacctctaccgaggagggcacctctgagtccgccacccccgagagcggccctggcacctccaccgagcccagcgagggcagcgcacccggcagccctgccggcagccccacctccacagaggagggaaccagcaccgagcccagcgaaggcagcgccccaggcaccagcaccgagcctagtgagcaggagattaaacggatcaacaagatcagaagaagacttgtgaaagacagcaacaccaagaaggccggcaagacaggccccatgaaaaccctgctggttagagtgatgacacccgatctgagagagcggctggaaaacctgagaaagaagcctgaaaatatcccccagcccatcagcaatacatctagagccaacctgaataagctgctgaccgattacaccgaaatgaagaaggcgatcctgcatgtgtactgggaagagttccagaaggaccctgtgggcctgatgagccgggtggcccagcctgccagcaagaagatcgatcagaacaagctgaaacctgagatggacgagaagggcaacctgaccaccgccggctttgcctgctctcagtgtggccagcccctgttcgtgtacaagctggagcaggtgtctgagaagggcaaggcttacaccaactacttcggacggtgcaatgtggccgagcacgaaaagctgatcctgctggcccagctgaagcccgagaaggatagcgacgaagccgtgacatatagcctgggaaagtttgggcagagggccctggatttctacagcattcatgtgaccaaggagtccacccaccccgtgaagcccctggcccagatcgccggaaacagatacgcctccggacctgtgggaaaggccctgagcgacgcatgtatgggcacaatcgcctccttcctgtctaagtaccaggacatcatcatcgaacaccagaaggtggtgaagggcaaccagaagagactggagagcctgcgggagctggccggcaaggaaaacctggaataccctagcgtgaccctgccacctcagcctcacaccaaggagggcgttgatgcctacaacgaagtgatcgcccgggtgcgaatgtgggtgaacctgaacctgtggcagaagctgaagctaagcagagatgatgccaagcctctgctgagactgaagggattcccttcctttcctctggtcgagagacaggccaacgaagtggactggtgggacatggtgtgtaacgtgaagaagctgatcaacgagaaaaaggaggatggcaaggtgttttggcagaatctggctggctacaagagacaggaagccctgagaccatacctgagcagcgaggaagatcggaagaagggaaagaaattcgctcggtaccagctgggcgacctgctgctgcacctggaaaagaagcacggcgaggactggggaaaggtgtacgacgaggcctgggagcggattgacaagaaagtggaaggcctgagcaagcacatcaagctggaagaggaacggagaagcgaggacgcccagagcaaggccgccctgaccgactggctgcgggctaaggccagcttcgtgatcgagggcctgaaggaggccgacaaggacgagttctgcagatgcgagctgaagctgcagaagtggtacggggacctgcggggaaagcccttcgccatcgaagccgagaacagcatcctggacatcagcggcttcagcaagcagtacaactgtgccttcatctggcagaaggacggcgtgaagaagctgaacctgtacctgatcatcaactacttcaagggcggcaagctgcggttcaagaagatcaaacctgaagccttcgaagccaacagattctacaccgtgatcaacaaaaagagcggcgagatcgtgcccatggaggtgaacttcaacttcgacgaccccaacctgatcatcctgcctctggcctttggcaagagacagggcagagaattcatctggaacgacctgctgtccctggaaaccggcagcctgaagctggccaacggaagagtgatcgagaagacactgtacaacagaagaacccggcaggatgagcctgccctgttcgtggccctgaccttcgagcggcgggaggtcctggactcctccaatatcaaaccaatgaacctgatcggcgtggcaagaggcgaaaacatccccgccgtgatcgccctgaccgaccccgagggctgcccactgagccggtttaaggatagcctgggaaacccaacccacatcctgagaatcggcgagagctataaggagaagcagcggaccatccaggccaagaaggaggtggagcagcggagagccggcggctacagccggaagtacgccagcaaagccaagaatctggcagacgatatggtgagaaacaccgctagagatctgctgtactacgccgtgacccaggatgccatgctgatcttcgccaacctgagccggggcttcggccggcagggcaagcggaccttcatggccgagagacagtacacacggatggaggactggctgaccgccaagctggcctacgagggcctgagcaagacctacctgtccaagacactggcccagtacacctccaagacatgcagcaactgtgggtttaccatcaccagcgccgactacgacagggtgctggagaagctgaagaagacagcaacaggctggatgaccacaattaacggcaaggagctgaaggtggagggccagattacctactacaacagatacaagagacagaacgtagtcaaggacctgtccgtcgagctggatagactgagcgaagaatctgtgaacaacgacatctcctcctggacaaagggcagaagcggagaagctctgagcctcctgaagaaaagattctcccatagacccgtgcaggagaagttcgtgtgcctgaactgcggcttcgagacacacgcagccgagcaagccgccctgaacatcgccagatcctggctgttcctgcggagccaggagtacaagaaataccagacaaacaagacaaccggcaacaccgataagagagccttcgtcgagacctggcagtccttttaccggaagaagcttaaggaggtgtggaaacctgccgtgcggtctggcggatctggcggaggctccaccagccccaagaaaaagagaaaagtctaagctgccttctgcggggcttgccttctggccatgcccttcttctctcccttgcacctgtacctcttggtctttgaataaagcctgagtaggaaggctagcaaaaaaaaaaaaaaaaaaaaaaaaaaaaaaaaaaaaaaaaaaaaaaaaaaaaaaaaaaaaaaaaaaaaaaaaaaaaaaaa

SEQ ID NO: 12550 - RNA, 5785 nt, synthetic construct
  source 1..5785: mol_type = other RNA
aggaaataagagagaaaagaagagtaagaagaaatataagagccaccatggcccctaagaagaagcgtaaagtgagccggatggaacgcctcgtctacgaggtgcggcagaagtgcagaaacatcgaggacatctgcatctcctgcggatctctgaacgtgaccctggagcacccactgttcatcggcggcatgtgccagaactgtaaaaactgttttctggagtgtgcctatcaatacgacgatgacggctaccagagctactgcaccatctgttgcggcggaagagaggtgctgatgtgtggaaataacaactgctgccggtgcttctgcgtggaatgcgtggacctgctggtgggccccggcgccgcccaggccgctattaaggaagatccttggaactgctacatgtgcggccacaagggcacatacggcctgctgagacggagagaggactggcctagcagactgcagatgttcttcgccaataaccacgaccaggagttcgacccccctaaggtgtaccctcccgtccccgccgagaagagaaagcccatccgggtcctgagcctgttcgatggcatcgccaccggtctgctggtgctgaaggacctgggcatccaggtggataggtacattgcctccgaggtgtgcgaggactccatcaccgtgggaatggtgcgtcatcagggcaagatcatgtacgtgggcgacgtgcggagcgtgacacagaagcatatccaggagtggggccctttcgacctggtgatcggcggcagcccttgcaatgacctgagcatcgtgaacccagcccggaagggcctgtacgagggaaccggcagactgttcttcgagttttacagactgctgcacgacgcccggcctaaggaaggcgacgaccggcccttcttttggctgttcgagaatgtggtggccatgggagtcagcgacaagcgggatattagccggttcctggagagcaaccccgtgatgatcgatgccaaggaagtgagcgccgcccaccgggccagatacttctggggcaatctgcctggcatgaacagacccctggccagcaccgtgaacgacaagctggagctgcaggagtgcctggagcacggccggatcgccaagttcagcaaggtgagaaccatcaccacccgaagcaacagcatcaaacaaggcaaggaccagcactttcctgtgttcatgaacgagaaggaggacatcctgtggtgtaccgagatggagagagtgttcgggttcccagtccactacacagatgtcagcaacatgtctagactggccagacagagactgctgggaagaagctggtccgtccctgtgatcagacacctgttcgcccctctgaaggagtacttcgcctgcgtgagcagcggcaacagcaacgccaacagccggggccccagcttctctagcggcctggtgccactgtccctgagagggagccacatgggccccatggagatctacaaaaccgtgagcgcctggaagcggcagcctgtgcgcgtgctgagcctgtttcggaatatcgataaagtcctgaaaagcctgggattcctggagagcggctctggctccggcggtggcaccctgaagtacgtggaggatgtgacaaacgtggtcagacgggatgtggagaagtggggccccttcgatctggtgtacggcagcacccaacccctgggcagctcttgtgaccggtgccctggctggtacatgtttcagttccaccggatcctgcagtacgccctgccgagacaggagtcccagcggccattcttttggattttcatggacaacttgctgctgaccgaggatgaccaggaaactaccactcggttcctgcagaccgaagccgtgaccctgcaggacgtgagaggccgggactaccagaacgccatgcgggtgtggtccaacatccctggactgaaaagcaagcacgcacctctgacccctaaagaagaggagtacctgcaggcccaggtgcggagcagaagcaagctggacgcccctaaggtggatctgctggtgaagaattgcctcctgcccctgagagagtacttcaagtatttcagccagaatagtctgcccctgggaggcagcggcggcggcatggccgccgtgagccccaccaccaggtgccaggagagcgtgaccttcgaggacgtggccgtggtgttcaccgacgaggagtggagccacctggtgcccacccagagggacctgtacaaggaggtgatgctggagaactacaacagcatcgtgagcctgggcctgcccgtgccccagcccgacgtgatcttccagctgaagaggggcgacaagccctggatggtggacctgcacggcagcgagggcggcccaagcagcggcgcccctcctcccagcggcggcagcccagccggctccccaacctctaccgaggagggcacctctgagtccgccacccccgagagcggccctggcacctccaccgagcccagcgagggcagcgcacccggcagccctgccggcagccccacctccacagaggagggaaccagcaccgagcccagcgaaggcagcgccccaggcaccagcaccgagcctagtgagcaggagattaaacggatcaacaagatcagaagaagacttgtgaaagacagcaacaccaagaaggccggcaagacaggccccatgaaaaccctgctggttagagtgatgacacccgatctgagagagcggctggaaaacctgagaaagaagcctgaaaatatcccccagcccatcagcaatacatctagagccaacctgaataagctgctgaccgattacaccgaaatgaagaaggcgatcctgcatgtgtactgggaagagttccagaaggaccctgtgggcctgatgagccgggtggcccagcctgccagcaagaagatcgatcagaacaagctgaaacctgagatggacgagaagggcaacctgaccaccgccggctttgcctgctctcagtgtggccagcccctgttcgtgtacaagctggagcaggtgtctgagaagggcaaggcttacaccaactacttcggacggtgcaatgtggccgagcacgaaaagctgatcctgctggcccagctgaagcccgagaaggatagcgacgaagccgtgacatatagcctgggaaagtttgggcagagggccctggatttctacagcattcatgtgaccaaggagtccacccaccccgtgaagcccctggcccagatcgccggaaacagatacgcctccggacctgtgggaaaggccctgagcgacgcatgtatgggcacaatcgcctccttcctgtctaagtaccaggacatcatcatcgaacaccagaaggtggtgaagggcaaccagaagagactggagagcctgcgggagctggccggcaaggaaaacctggaataccctagcgtgaccctgccacctcagcctcacaccaaggagggcgttgatgcctacaacgaagtgatcgcccgggtgcgaatgtgggtgaacctgaacctgtggcagaagctgaagctaagcagagatgatgccaagcctctgctgagactgaagggattcccttcctttcctctggtcgagagacaggccaacgaagtggactggtgggacatggtgtgtaacgtgaagaagctgatcaacgagaaaaaggaggatggcaaggtgttttggcagaatctggctggctacaagagacaggaagccctgagaccatacctgagcagcgaggaagatcggaagaagggaaagaaattcgctcggtaccagctgggcgacctgctgctgcacctggaaaagaagcacggcgaggactggggaaaggtgtacgacgaggcctgggagcggattgacaagaaagtggaaggcctgagcaagcacatcaagctggaagaggaacggagaagcgaggacgcccagagcaaggccgccctgaccgactggctgcgggctaaggccagcttcgtgatcgagggcctgaaggaggccgacaaggacgagttctgcagatgcgagctgaagctgcagaagtggtacggggacctgcggggaaagcccttcgccatcgaagccgagaacagcatcctggacatcagcggcttcagcaagcagtacaactgtgccttcatctggcagaaggacggcgtgaagaagctgaacctgtacctgatcatcaactacttcaagggcggcaagctgcggttcaagaagatcaaacctgaagccttcgaagccaacagattctacaccgtgatcaacaaaaagagcggcgagatcgtgcccatggaggtgaacttcaacttcgacgaccccaacctgatcatcctgcctctggcctttggcaagagacagggcagagaattcatctggaacgacctgctgtccctggaaaccggcagcctgaagctggccaacggaagagtgatcgagaagacactgtacaacagaagaacccggcaggatgagcctgccctgttcgtggccctgaccttcgagcggcgggaggtcctggactcctccaatatcaaaccaatgaacctgatcggcgtggcaagaggcgaaaacatccccgccgtgatcgccctgaccgaccccgagggctgcccactgagccggtttaaggatagcctgggaaacccaacccacatcctgagaatcggcgagagctataaggagaagcagcggaccatccaggccaagaaggaggtggagcagcggagagccggcggctacagccggaagtacgccagcaaagccaagaatctggcagacgatatggtgagaaacaccgctagagatctgctgtactacgccgtgacccaggatgccatgctgatcttcgccaacctgagccggggcttcggccggcagggcaagcggaccttcatggccgagagacagtacacacggatggaggactggctgaccgccaagctggcctacgagggcctgagcaagacctacctgtccaagacactggcccagtacacctccaagacatgcagcaactgtgggtttaccatcaccagcgccgactacgacagggtgctggagaagctgaagaagacagcaacaggctggatgaccacaattaacggcaaggagctgaaggtggagggccagattacctactacaacagatacaagagacagaacgtagtcaaggacctgtccgtcgagctggatagactgagcgaagaatctgtgaacaacgacatctcctcctggacaaagggcagaagcggagaagctctgagcctcctgaagaaaagattctcccatagacccgtgcaggagaagttcgtgtgcctgaactgcggcttcgagacacacgcagccgagcaagccgccctgaacatcgccagatcctggctgttcctgcggagccaggagtacaagaaataccagacaaacaagacaaccggcaacaccgataagagagccttcgtcgagacctggcagtccttttaccggaagaagcttaaggaggtgtggaaacctgccgtgcggtctggcggatctggcggaggctccaccagccccaagaaaaagagaaaagtctaagctgccttctgcggggcttgccttctggccatgcccttcttctctcccttgcacctgtacctcttggtctttgaataaagcctgagtaggaaggctagcaaaaaaaaaaaaaaaaaaaaaaaaaaaaaaaaaaaaaaaaaaaaaaaaaaaaaaaaaaaaaaaaaaaaaaaaaaaaaaaa

SEQ ID NO: 12551 - RNA, 5785 nt, synthetic construct
  source 1..5785: mol_type = other RNA
aggaaataagagagaaaagaagagtaagaagaaatataagagccaccatggcccctaagaagaagcgtaaagtgagccggatggaacgcctcgtctacgaggtgcggcagaagtgcagaaacatcgaggacatctgcatctcctgcggatctctgaacgtgaccctggagcacccactgttcatcggcggcatgtgccagaactgtaaaaactgttttctggagtgtgcctatcaatacgacgatgacggctaccagagctactgcaccatctgttgcggcggaagagaggtgctgatgtgtggaaataacaactgctgccggtgcttctgcgtggaatgcgtggacctgctggtgggccccggcgccgcccaggccgctattaaggaagatccttggaactgctacatgtgcggccacaagggcacatacggcctgctgagacggagagaggactggcctagcagactgcagatgttcttcgccaataaccacgaccaggagttcgacccccctaaggtgtaccctcccgtccccgccgagaagagaaagcccatccgggtcctgagcctgttcgatggcatcgccaccggtctgctggtgctgaaggacctgggcatccaggtggataggtacattgcctccgaggtgtgcgaggactccatcaccgtgggaatggtgcgtcatcagggcaagatcatgtacgtgggcgacgtgcggagcgtgacacagaagcatatccaggagtggggccctttcgacctggtgatcggcggcagcccttgcaatgacctgagcatcgtgaacccagcccggaagggcctgtacgagggaaccggcagactgttcttcgagttttacagactgctgcacgacgcccggcctaaggaaggcgacgaccggcccttcttttggctgttcgagaatgtggtggccatgggagtcagcgacaagcgggatattagccggttcctggagagcaaccccgtgatgatcgatgccaaggaagtgagcgccgcccaccgggccagatacttctggggcaatctgcctggcatgaacagacccctggccagcaccgtgaacgacaagctggagctgcaggagtgcctggagcacggccggatcgccaagttcagcaaggtgagaaccatcaccacccgaagcaacagcatcaaacaaggcaaggaccagcactttcctgtgttcatgaacgagaaggaggacatcctgtggtgtaccgagatggagagagtgttcgggttcccagtccactacacagatgtcagcaacatgtctagactggccagacagagactgctgggaagaagctggtccgtccctgtgatcagacacctgttcgcccctctgaaggagtacttcgcctgcgtgagcagcggcaacagcaacgccaacagccggggccccagcttctctagcggcctggtgccactgtccctgagagggagccacatgggccccatggagatctacaaaaccgtgagcgcctggaagcggcagcctgtgcgcgtgctgagcctgtttcggaatatcgataaagtcctgaaaagcctgggattcctggagagcggctctggctccggcggtggcaccctgaagtacgtggaggatgtgacaaacgtggtcagacgggatgtggagaagtggggccccttcgatctggtgtacggcagcacccaacccctgggcagctcttgtgaccggtgccctggctggtacatgtttcagttccaccggatcctgcagtacgccctgccgagacaggagtcccagcggccattcttttggattttcatggacaacttgctgctgaccgaggatgaccaggaaactaccactcggttcctgcagaccgaagccgtgaccctgcaggacgtgagaggccgggactaccagaacgccatgcgggtgtggtccaacatccctggactgaaaagcaagcacgcacctctgacccctaaagaagaggagtacctgcaggcccaggtgcggagcagaagcaagctggacgcccctaaggtggatctgctggtgaagaattgcctcctgcccctgagagagtacttcaagtatttcagccagaatagtctgcccctgggaggcagcggcggcggcgcccaggtgagcgtgaccttcgacgacgtggccgtgaccttcacccaggaggagtggggccacctggagcccgcccagaggaccctgtaccaggaggtgatgctggagacctgcaggctgctgatgagcctgggctgccccgtgcccaggcccgagctgatctaccagctggagcacggccaggagctgtggaccgtgaagagggacctgagcaggagcacctgccccggctacagcagcgagggcggcccaagcagcggcgcccctcctcccagcggcggcagcccagccggctccccaacctctaccgaggagggcacctctgagtccgccacccccgagagcggccctggcacctccaccgagcccagcgagggcagcgcacccggcagccctgccggcagccccacctccacagaggagggaaccagcaccgagcccagcgaaggcagcgccccaggcaccagcaccgagcctagtgagcaggagattaaacggatcaacaagatcagaagaagacttgtgaaagacagcaacaccaagaaggccggcaagacaggccccatgaaaaccctgctggttagagtgatgacacccgatctgagagagcggctggaaaacctgagaaagaagcctgaaaatatcccccagcccatcagcaatacatctagagccaacctgaataagctgctgaccgattacaccgaaatgaagaaggcgatcctgcatgtgtactgggaagagttccagaaggaccctgtgggcctgatgagccgggtggcccagcctgccagcaagaagatcgatcagaacaagctgaaacctgagatggacgagaagggcaacctgaccaccgccggctttgcctgctctcagtgtggccagcccctgttcgtgtacaagctggagcaggtgtctgagaagggcaaggcttacaccaactacttcggacggtgcaatgtggccgagcacgaaaagctgatcctgctggcccagctgaagcccgagaaggatagcgacgaagccgtgacatatagcctgggaaagtttgggcagagggccctggatttctacagcattcatgtgaccaaggagtccacccaccccgtgaagcccctggcccagatcgccggaaacagatacgcctccggacctgtgggaaaggccctgagcgacgcatgtatgggcacaatcgcctccttcctgtctaagtaccaggacatcatcatcgaacaccagaaggtggtgaagggcaaccagaagagactggagagcctgcgggagctggccggcaaggaaaacctggaataccctagcgtgaccctgccacctcagcctcacaccaaggagggcgttgatgcctacaacgaagtgatcgcccgggtgcgaatgtgggtgaacctgaacctgtggcagaagctgaagctaagcagagatgatgccaagcctctgctgagactgaagggattcccttcctttcctctggtcgagagacaggccaacgaagtggactggtgggacatggtgtgtaacgtgaagaagctgatcaacgagaaaaaggaggatggcaaggtgttttggcagaatctggctggctacaagagacaggaagccctgagaccatacctgagcagcgaggaagatcggaagaagggaaagaaattcgctcggtaccagctgggcgacctgctgctgcacctggaaaagaagcacggcgaggactggggaaaggtgtacgacgaggcctgggagcggattgacaagaaagtggaaggcctgagcaagcacatcaagctggaagaggaacggagaagcgaggacgcccagagcaaggccgccctgaccgactggctgcgggctaaggccagcttcgtgatcgagggcctgaaggaggccgacaaggacgagttctgcagatgcgagctgaagctgcagaagtggtacggggacctgcggggaaagcccttcgccatcgaagccgagaacagcatcctggacatcagcggcttcagcaagcagtacaactgtgccttcatctggcagaaggacggcgtgaagaagctgaacctgtacctgatcatcaactacttcaagggcggcaagctgcggttcaagaagatcaaacctgaagccttcgaagccaacagattctacaccgtgatcaacaaaaagagcggcgagatcgtgcccatggaggtgaacttcaacttcgacgaccccaacctgatcatcctgcctctggcctttggcaagagacagggcagagaattcatctggaacgacctgctgtccctggaaaccggcagcctgaagctggccaacggaagagtgatcgagaagacactgtacaacagaagaacccggcaggatgagcctgccctgttcgtggccctgaccttcgagcggcgggaggtcctggactcctccaatatcaaaccaatgaacctgatcggcgtggcaagaggcgaaaacatccccgccgtgatcgccctgaccgaccccgagggctgcccactgagccggtttaaggatagcctgggaaacccaacccacatcctgagaatcggcgagagctataaggagaagcagcggaccatccaggccaagaaggaggtggagcagcggagagccggcggctacagccggaagtacgccagcaaagccaagaatctggcagacgatatggtgagaaacaccgctagagatctgctgtactacgccgtgacccaggatgccatgctgatcttcgccaacctgagccggggcttcggccggcagggcaagcggaccttcatggccgagagacagtacacacggatggaggactggctgaccgccaagctggcctacgagggcctgagcaagacctacctgtccaagacactggcccagtacacctccaagacatgcagcaactgtgggtttaccatcaccagcgccgactacgacagggtgctggagaagctgaagaagacagcaacaggctggatgaccacaattaacggcaaggagctgaaggtggagggccagattacctactacaacagatacaagagacagaacgtagtcaaggacctgtccgtcgagctggatagactgagcgaagaatctgtgaacaacgacatctcctcctggacaaagggcagaagcggagaagctctgagcctcctgaagaaaagattctcccatagacccgtgcaggagaagttcgtgtgcctgaactgcggcttcgagacacacgcagccgagcaagccgccctgaacatcgccagatcctggctgttcctgcggagccaggagtacaagaaataccagacaaacaagacaaccggcaacaccgataagagagccttcgtcgagacctggcagtccttttaccggaagaagcttaaggaggtgtggaaacctgccgtgcggtctggcggatctggcggaggctccaccagccccaagaaaaagagaaaagtctaagctgccttctgcggggcttgccttctggccatgcccttcttctctcccttgcacctgtacctcttggtctttgaataaagcctgagtaggaaggctagcaaaaaaaaaaaaaaaaaaaaaaaaaaaaaaaaaaaaaaaaaaaaaaaaaaaaaaaaaaaaaaaaaaaaaaaaaaaaaaaa

SEQ ID NO: 12552 - RNA, 5785 nt, synthetic construct
  source 1..5785: mol_type = other RNA
aggaaataagagagaaaagaagagtaagaagaaatataagagccaccatggcccctaagaagaagcgtaaagtgagccggatggaacgcctcgtctacgaggtgcggcagaagtgcagaaacatcgaggacatctgcatctcctgcggatctctgaacgtgaccctggagcacccactgttcatcggcggcatgtgccagaactgtaaaaactgttttctggagtgtgcctatcaatacgacgatgacggctaccagagctactgcaccatctgttgcggcggaagagaggtgctgatgtgtggaaataacaactgctgccggtgcttctgcgtggaatgcgtggacctgctggtgggccccggcgccgcccaggccgctattaaggaagatccttggaactgctacatgtgcggccacaagggcacatacggcctgctgagacggagagaggactggcctagcagactgcagatgttcttcgccaataaccacgaccaggagttcgacccccctaaggtgtaccctcccgtccccgccgagaagagaaagcccatccgggtcctgagcctgttcgatggcatcgccaccggtctgctggtgctgaaggacctgggcatccaggtggataggtacattgcctccgaggtgtgcgaggactccatcaccgtgggaatggtgcgtcatcagggcaagatcatgtacgtgggcgacgtgcggagcgtgacacagaagcatatccaggagtggggccctttcgacctggtgatcggcggcagcccttgcaatgacctgagcatcgtgaacccagcccggaagggcctgtacgagggaaccggcagactgttcttcgagttttacagactgctgcacgacgcccggcctaaggaaggcgacgaccggcccttcttttggctgttcgagaatgtggtggccatgggagtcagcgacaagcgggatattagccggttcctggagagcaaccccgtgatgatcgatgccaaggaagtgagcgccgcccaccgggccagatacttctggggcaatctgcctggcatgaacagacccctggccagcaccgtgaacgacaagctggagctgcaggagtgcctggagcacggccggatcgccaagttcagcaaggtgagaaccatcaccacccgaagcaacagcatcaaacaaggcaaggaccagcactttcctgtgttcatgaacgagaaggaggacatcctgtggtgtaccgagatggagagagtgttcgggttcccagtccactacacagatgtcagcaacatgtctagactggccagacagagactgctgggaagaagctggtccgtccctgtgatcagacacctgttcgcccctctgaaggagtacttcgcctgcgtgagcagcggcaacagcaacgccaacagccggggccccagcttctctagcggcctggtgccactgtccctgagagggagccacatgggccccatggagatctacaaaaccgtgagcgcctggaagcggcagcctgtgcgcgtgctgagcctgtttcggaatatcgataaagtcctgaaaagcctgggattcctggagagcggctctggctccggcggtggcaccctgaagtacgtggaggatgtgacaaacgtggtcagacgggatgtggagaagtggggccccttcgatctggtgtacggcagcacccaacccctgggcagctcttgtgaccggtgccctggctggtacatgtttcagttccaccggatcctgcagtacgccctgccgagacaggagtcccagcggccattcttttggattttcatggacaacttgctgctgaccgaggatgaccaggaaactaccactcggttcctgcagaccgaagccgtgaccctgcaggacgtgagaggccgggactaccagaacgccatgcgggtgtggtccaacatccctggactgaaaagcaagcacgcacctctgacccctaaagaagaggagtacctgcaggcccaggtgcggagcagaagcaagctggacgcccctaaggtggatctgctggtgaagaattgcctcctgcccctgagagagtacttcaagtatttcagccagaatagtctgcccctgggaggcagcggcggcggcccccaggtgctggtgagcttcgaggacgtggccgtgttcctgagcagggaggagtggggctgcctgggccccgcccagaggggcctgtacagcaacgtgatgctggagacctacaggaacctgatcagcctgggcctgcagggcagcaagcccgacgtgatcagcaggctggagaagggcgaggagccctgggccccctacagccccaagatcgaggagggctggatcaggagccacaggagcggcggcccaagcagcggcgcccctcctcccagcggcggcagcccagccggctccccaacctctaccgaggagggcacctctgagtccgccacccccgagagcggccctggcacctccaccgagcccagcgagggcagcgcacccggcagccctgccggcagccccacctccacagaggagggaaccagcaccgagcccagcgaaggcagcgccccaggcaccagcaccgagcctagtgagcaggagattaaacggatcaacaagatcagaagaagacttgtgaaagacagcaacaccaagaaggccggcaagacaggccccatgaaaaccctgctggttagagtgatgacacccgatctgagagagcggctggaaaacctgagaaagaagcctgaaaatatcccccagcccatcagcaatacatctagagccaacctgaataagctgctgaccgattacaccgaaatgaagaaggcgatcctgcatgtgtactgggaagagttccagaaggaccctgtgggcctgatgagccgggtggcccagcctgccagcaagaagatcgatcagaacaagctgaaacctgagatggacgagaagggcaacctgaccaccgccggctttgcctgctctcagtgtggccagcccctgttcgtgtacaagctggagcaggtgtctgagaagggcaaggcttacaccaactacttcggacggtgcaatgtggccgagcacgaaaagctgatcctgctggcccagctgaagcccgagaaggatagcgacgaagccgtgacatatagcctgggaaagtttgggcagagggccctggatttctacagcattcatgtgaccaaggagtccacccaccccgtgaagcccctggcccagatcgccggaaacagatacgcctccggacctgtgggaaaggccctgagcgacgcatgtatgggcacaatcgcctccttcctgtctaagtaccaggacatcatcatcgaacaccagaaggtggtgaagggcaaccagaagagactggagagcctgcgggagctggccggcaaggaaaacctggaataccctagcgtgaccctgccacctcagcctcacaccaaggagggcgttgatgcctacaacgaagtgatcgcccgggtgcgaatgtgggtgaacctgaacctgtggcagaagctgaagctaagcagagatgatgccaagcctctgctgagactgaagggattcccttcctttcctctggtcgagagacaggccaacgaagtggactggtgggacatggtgtgtaacgtgaagaagctgatcaacgagaaaaaggaggatggcaaggtgttttggcagaatctggctggctacaagagacaggaagccctgagaccatacctgagcagcgaggaagatcggaagaagggaaagaaattcgctcggtaccagctgggcgacctgctgctgcacctggaaaagaagcacggcgaggactggggaaaggtgtacgacgaggcctgggagcggattgacaagaaagtggaaggcctgagcaagcacatcaagctggaagaggaacggagaagcgaggacgcccagagcaaggccgccctgaccgactggctgcgggctaaggccagcttcgtgatcgagggcctgaaggaggccgacaaggacgagttctgcagatgcgagctgaagctgcagaagtggtacggggacctgcggggaaagcccttcgccatcgaagccgagaacagcatcctggacatcagcggcttcagcaagcagtacaactgtgccttcatctggcagaaggacggcgtgaagaagctgaacctgtacctgatcatcaactacttcaagggcggcaagctgcggttcaagaagatcaaacctgaagccttcgaagccaacagattctacaccgtgatcaacaaaaagagcggcgagatcgtgcccatggaggtgaacttcaacttcgacgaccccaacctgatcatcctgcctctggcctttggcaagagacagggcagagaattcatctggaacgacctgctgtccctggaaaccggcagcctgaagctggccaacggaagagtgatcgagaagacactgtacaacagaagaacccggcaggatgagcctgccctgttcgtggccctgaccttcgagcggcgggaggtcctggactcctccaatatcaaaccaatgaacctgatcggcgtggcaagaggcgaaaacatccccgccgtgatcgccctgaccgaccccgagggctgcccactgagccggtttaaggatagcctgggaaacccaacccacatcctgagaatcggcgagagctataaggagaagcagcggaccatccaggccaagaaggaggtggagcagcggagagccggcggctacagccggaagtacgccagcaaagccaagaatctggcagacgatatggtgagaaacaccgctagagatctgctgtactacgccgtgacccaggatgccatgctgatcttcgccaacctgagccggggcttcggccggcagggcaagcggaccttcatggccgagagacagtacacacggatggaggactggctgaccgccaagctggcctacgagggcctgagcaagacctacctgtccaagacactggcccagtacacctccaagacatgcagcaactgtgggtttaccatcaccagcgccgactacgacagggtgctggagaagctgaagaagacagcaacaggctggatgaccacaattaacggcaaggagctgaaggtggagggccagattacctactacaacagatacaagagacagaacgtagtcaaggacctgtccgtcgagctggatagactgagcgaagaatctgtgaacaacgacatctcctcctggacaaagggcagaagcggagaagctctgagcctcctgaagaaaagattctcccatagacccgtgcaggagaagttcgtgtgcctgaactgcggcttcgagacacacgcagccgagcaagccgccctgaacatcgccagatcctggctgttcctgcggagccaggagtacaagaaataccagacaaacaagacaaccggcaacaccgataagagagccttcgtcgagacctggcagtccttttaccggaagaagcttaaggaggtgtggaaacctgccgtgcggtctggcggatctggcggaggctccaccagccccaagaaaaagagaaaagtctaagctgccttctgcggggcttgccttctggccatgcccttcttctctcccttgcacctgtacctcttggtctttgaataaagcctgagtaggaaggctagcaaaaaaaaaaaaaaaaaaaaaaaaaaaaaaaaaaaaaaaaaaaaaaaaaaaaaaaaaaaaaaaaaaaaaaaaaaaaaaaa

SEQ ID NO: 12553 - RNA, 5785 nt, synthetic construct
  source 1..5785: mol_type = other RNA
aggaaataagagagaaaagaagagtaagaagaaatataagagccaccatggcccctaagaagaagcgtaaagtgagccggatggaacgcctcgtctacgaggtgcggcagaagtgcagaaacatcgaggacatctgcatctcctgcggatctctgaacgtgaccctggagcacccactgttcatcggcggcatgtgccagaactgtaaaaactgttttctggagtgtgcctatcaatacgacgatgacggctaccagagctactgcaccatctgttgcggcggaagagaggtgctgatgtgtggaaataacaactgctgccggtgcttctgcgtggaatgcgtggacctgctggtgggccccggcgccgcccaggccgctattaaggaagatccttggaactgctacatgtgcggccacaagggcacatacggcctgctgagacggagagaggactggcctagcagactgcagatgttcttcgccaataaccacgaccaggagttcgacccccctaaggtgtaccctcccgtccccgccgagaagagaaagcccatccgggtcctgagcctgttcgatggcatcgccaccggtctgctggtgctgaaggacctgggcatccaggtggataggtacattgcctccgaggtgtgcgaggactccatcaccgtgggaatggtgcgtcatcagggcaagatcatgtacgtgggcgacgtgcggagcgtgacacagaagcatatccaggagtggggccctttcgacctggtgatcggcggcagcccttgcaatgacctgagcatcgtgaacccagcccggaagggcctgtacgagggaaccggcagactgttcttcgagttttacagactgctgcacgacgcccggcctaaggaaggcgacgaccggcccttcttttggctgttcgagaatgtggtggccatgggagtcagcgacaagcgggatattagccggttcctggagagcaaccccgtgatgatcgatgccaaggaagtgagcgccgcccaccgggccagatacttctggggcaatctgcctggcatgaacagacccctggccagcaccgtgaacgacaagctggagctgcaggagtgcctggagcacggccggatcgccaagttcagcaaggtgagaaccatcaccacccgaagcaacagcatcaaacaaggcaaggaccagcactttcctgtgttcatgaacgagaaggaggacatcctgtggtgtaccgagatggagagagtgttcgggttcccagtccactacacagatgtcagcaacatgtctagactggccagacagagactgctgggaagaagctggtccgtccctgtgatcagacacctgttcgcccctctgaaggagtacttcgcctgcgtgagcagcggcaacagcaacgccaacagccggggccccagcttctctagcggcctggtgccactgtccctgagagggagccacatgggccccatggagatctacaaaaccgtgagcgcctggaagcggcagcctgtgcgcgtgctgagcctgtttcggaatatcgataaagtcctgaaaagcctgggattcctggagagcggctctggctccggcggtggcaccctgaagtacgtggaggatgtgacaaacgtggtcagacgggatgtggagaagtggggccccttcgatctggtgtacggcagcacccaacccctgggcagctcttgtgaccggtgccctggctggtacatgtttcagttccaccggatcctgcagtacgccctgccgagacaggagtcccagcggccattcttttggattttcatggacaacttgctgctgaccgaggatgaccaggaaactaccactcggttcctgcagaccgaagccgtgaccctgcaggacgtgagaggccgggactaccagaacgccatgcgggtgtggtccaacatccctggactgaaaagcaagcacgcacctctgacccctaaagaagaggagtacctgcaggcccaggtgcggagcagaagcaagctggacgcccctaaggtggatctgctggtgaagaattgcctcctgcccctgagagagtacttcaagtatttcagccagaatagtctgcccctgggaggcagcggcggcggccaggagatccccgtgagcttcaaggacgtggtggtgggcttcacccaggaggagtggcactggctgaaccccgtgcagagggccctgtacagggacgtgatgctggagacctacagcaacctggtgagcgtgggctacgagggcaccaagcccgacgtgatcctgaggctggagcaggaggaggccccctgggtgtgcgaggccccctgccccggctgctgctgctgggaggacatctggcagggcggcccaagcagcggcgcccctcctcccagcggcggcagcccagccggctccccaacctctaccgaggagggcacctctgagtccgccacccccgagagcggccctggcacctccaccgagcccagcgagggcagcgcacccggcagccctgccggcagccccacctccacagaggagggaaccagcaccgagcccagcgaaggcagcgccccaggcaccagcaccgagcctagtgagcaggagattaaacggatcaacaagatcagaagaagacttgtgaaagacagcaacaccaagaaggccggcaagacaggccccatgaaaaccctgctggttagagtgatgacacccgatctgagagagcggctggaaaacctgagaaagaagcctgaaaatatcccccagcccatcagcaatacatctagagccaacctgaataagctgctgaccgattacaccgaaatgaagaaggcgatcctgcatgtgtactgggaagagttccagaaggaccctgtgggcctgatgagccgggtggcccagcctgccagcaagaagatcgatcagaacaagctgaaacctgagatggacgagaagggcaacctgaccaccgccggctttgcctgctctcagtgtggccagcccctgttcgtgtacaagctggagcaggtgtctgagaagggcaaggcttacaccaactacttcggacggtgcaatgtggccgagcacgaaaagctgatcctgctggcccagctgaagcccgagaaggatagcgacgaagccgtgacatatagcctgggaaagtttgggcagagggccctggatttctacagcattcatgtgaccaaggagtccacccaccccgtgaagcccctggcccagatcgccggaaacagatacgcctccggacctgtgggaaaggccctgagcgacgcatgtatgggcacaatcgcctccttcctgtctaagtaccaggacatcatcatcgaacaccagaaggtggtgaagggcaaccagaagagactggagagcctgcgggagctggccggcaaggaaaacctggaataccctagcgtgaccctgccacctcagcctcacaccaaggagggcgttgatgcctacaacgaagtgatcgcccgggtgcgaatgtgggtgaacctgaacctgtggcagaagctgaagctaagcagagatgatgccaagcctctgctgagactgaagggattcccttcctttcctctggtcgagagacaggccaacgaagtggactggtgggacatggtgtgtaacgtgaagaagctgatcaacgagaaaaaggaggatggcaaggtgttttggcagaatctggctggctacaagagacaggaagccctgagaccatacctgagcagcgaggaagatcggaagaagggaaagaaattcgctcggtaccagctgggcgacctgctgctgcacctggaaaagaagcacggcgaggactggggaaaggtgtacgacgaggcctgggagcggattgacaagaaagtggaaggcctgagcaagcacatcaagctggaagaggaacggagaagcgaggacgcccagagcaaggccgccctgaccgactggctgcgggctaaggccagcttcgtgatcgagggcctgaaggaggccgacaaggacgagttctgcagatgcgagctgaagctgcagaagtggtacggggacctgcggggaaagcccttcgccatcgaagccgagaacagcatcctggacatcagcggcttcagcaagcagtacaactgtgccttcatctggcagaaggacggcgtgaagaagctgaacctgtacctgatcatcaactacttcaagggcggcaagctgcggttcaagaagatcaaacctgaagccttcgaagccaacagattctacaccgtgatcaacaaaaagagcggcgagatcgtgcccatggaggtgaacttcaacttcgacgaccccaacctgatcatcctgcctctggcctttggcaagagacagggcagagaattcatctggaacgacctgctgtccctggaaaccggcagcctgaagctggccaacggaagagtgatcgagaagacactgtacaacagaagaacccggcaggatgagcctgccctgttcgtggccctgaccttcgagcggcgggaggtcctggactcctccaatatcaaaccaatgaacctgatcggcgtggcaagaggcgaaaacatccccgccgtgatcgccctgaccgaccccgagggctgcccactgagccggtttaaggatagcctgggaaacccaacccacatcctgagaatcggcgagagctataaggagaagcagcggaccatccaggccaagaaggaggtggagcagcggagagccggcggctacagccggaagtacgccagcaaagccaagaatctggcagacgatatggtgagaaacaccgctagagatctgctgtactacgccgtgacccaggatgccatgctgatcttcgccaacctgagccggggcttcggccggcagggcaagcggaccttcatggccgagagacagtacacacggatggaggactggctgaccgccaagctggcctacgagggcctgagcaagacctacctgtccaagacactggcccagtacacctccaagacatgcagcaactgtgggtttaccatcaccagcgccgactacgacagggtgctggagaagctgaagaagacagcaacaggctggatgaccacaattaacggcaaggagctgaaggtggagggccagattacctactacaacagatacaagagacagaacgtagtcaaggacctgtccgtcgagctggatagactgagcgaagaatctgtgaacaacgacatctcctcctggacaaagggcagaagcggagaagctctgagcctcctgaagaaaagattctcccatagacccgtgcaggagaagttcgtgtgcctgaactgcggcttcgagacacacgcagccgagcaagccgccctgaacatcgccagatcctggctgttcctgcggagccaggagtacaagaaataccagacaaacaagacaaccggcaacaccgataagagagccttcgtcgagacctggcagtccttttaccggaagaagcttaaggaggtgtggaaacctgccgtgcggtctggcggatctggcggaggctccaccagccccaagaaaaagagaaaagtctaagctgccttctgcggggcttgccttctggccatgcccttcttctctcccttgcacctgtacctcttggtctttgaataaagcctgagtaggaaggctagcaaaaaaaaaaaaaaaaaaaaaaaaaaaaaaaaaaaaaaaaaaaaaaaaaaaaaaaaaaaaaaaaaaaaaaaaaaaaaaaa

SEQ ID NO: 12554 - RNA, 5785 nt, synthetic construct
  source 1..5785: mol_type = other RNA
aggaaataagagagaaaagaagagtaagaagaaatataagagccaccatggcccctaagaagaagcgtaaagtgagccggatggaacgcctcgtctacgaggtgcggcagaagtgcagaaacatcgaggacatctgcatctcctgcggatctctgaacgtgaccctggagcacccactgttcatcggcggcatgtgccagaactgtaaaaactgttttctggagtgtgcctatcaatacgacgatgacggctaccagagctactgcaccatctgttgcggcggaagagaggtgctgatgtgtggaaataacaactgctgccggtgcttctgcgtggaatgcgtggacctgctggtgggccccggcgccgcccaggccgctattaaggaagatccttggaactgctacatgtgcggccacaagggcacatacggcctgctgagacggagagaggactggcctagcagactgcagatgttcttcgccaataaccacgaccaggagttcgacccccctaaggtgtaccctcccgtccccgccgagaagagaaagcccatccgggtcctgagcctgttcgatggcatcgccaccggtctgctggtgctgaaggacctgggcatccaggtggataggtacattgcctccgaggtgtgcgaggactccatcaccgtgggaatggtgcgtcatcagggcaagatcatgtacgtgggcgacgtgcggagcgtgacacagaagcatatccaggagtggggccctttcgacctggtgatcggcggcagcccttgcaatgacctgagcatcgtgaacccagcccggaagggcctgtacgagggaaccggcagactgttcttcgagttttacagactgctgcacgacgcccggcctaaggaaggcgacgaccggcccttcttttggctgttcgagaatgtggtggccatgggagtcagcgacaagcgggatattagccggttcctggagagcaaccccgtgatgatcgatgccaaggaagtgagcgccgcccaccgggccagatacttctggggcaatctgcctggcatgaacagacccctggccagcaccgtgaacgacaagctggagctgcaggagtgcctggagcacggccggatcgccaagttcagcaaggtgagaaccatcaccacccgaagcaacagcatcaaacaaggcaaggaccagcactttcctgtgttcatgaacgagaaggaggacatcctgtggtgtaccgagatggagagagtgttcgggttcccagtccactacacagatgtcagcaacatgtctagactggccagacagagactgctgggaagaagctggtccgtccctgtgatcagacacctgttcgcccctctgaaggagtacttcgcctgcgtgagcagcggcaacagcaacgccaacagccggggccccagcttctctagcggcctggtgccactgtccctgagagggagccacatgggccccatggagatctacaaaaccgtgagcgcctggaagcggcagcctgtgcgcgtgctgagcctgtttcggaatatcgataaagtcctgaaaagcctgggattcctggagagcggctctggctccggcggtggcaccctgaagtacgtggaggatgtgacaaacgtggtcagacgggatgtggagaagtggggccccttcgatctggtgtacggcagcacccaacccctgggcagctcttgtgaccggtgccctggctggtacatgtttcagttccaccggatcctgcagtacgccctgccgagacaggagtcccagcggccattcttttggattttcatggacaacttgctgctgaccgaggatgaccaggaaactaccactcggttcctgcagaccgaagccgtgaccctgcaggacgtgagaggccgggactaccagaacgccatgcgggtgtggtccaacatccctggactgaaaagcaagcacgcacctctgacccctaaagaagaggagtacctgcaggcccaggtgcggagcagaagcaagctggacgcccctaaggtggatctgctggtgaagaattgcctcctgcccctgagagagtacttcaagtatttcagccagaatagtctgcccctgggaggcagcggcggcggcagccagggcagcgtgaccttcagggacgtggccatcgacttcagccaggaggagtggaagtggctgcagcccgcccagagggacctgtacaggtgcgtgatgctggagaactacggccacctggtgagcctgggcctgagcatcagcaagcccgacgtggtgagcctgctggagcagggcaaggagccctggctgggcaagagggacgtgaagagggacctgttccccgccctgagcccccagggcggcccaagcagcggcgcccctcctcccagcggcggcagcccagccggctccccaacctctaccgaggagggcacctctgagtccgccacccccgagagcggccctggcacctccaccgagcccagcgagggcagcgcacccggcagccctgccggcagccccacctccacagaggagggaaccagcaccgagcccagcgaaggcagcgccccaggcaccagcaccgagcctagtgagcaggagattaaacggatcaacaagatcagaagaagacttgtgaaagacagcaacaccaagaaggccggcaagacaggccccatgaaaaccctgctggttagagtgatgacacccgatctgagagagcggctggaaaacctgagaaagaagcctgaaaatatcccccagcccatcagcaatacatctagagccaacctgaataagctgctgaccgattacaccgaaatgaagaaggcgatcctgcatgtgtactgggaagagttccagaaggaccctgtgggcctgatgagccgggtggcccagcctgccagcaagaagatcgatcagaacaagctgaaacctgagatggacgagaagggcaacctgaccaccgccggctttgcctgctctcagtgtggccagcccctgttcgtgtacaagctggagcaggtgtctgagaagggcaaggcttacaccaactacttcggacggtgcaatgtggccgagcacgaaaagctgatcctgctggcccagctgaagcccgagaaggatagcgacgaagccgtgacatatagcctgggaaagtttgggcagagggccctggatttctacagcattcatgtgaccaaggagtccacccaccccgtgaagcccctggcccagatcgccggaaacagatacgcctccggacctgtgggaaaggccctgagcgacgcatgtatgggcacaatcgcctccttcctgtctaagtaccaggacatcatcatcgaacaccagaaggtggtgaagggcaaccagaagagactggagagcctgcgggagctggccggcaaggaaaacctggaataccctagcgtgaccctgccacctcagcctcacaccaaggagggcgttgatgcctacaacgaagtgatcgcccgggtgcgaatgtgggtgaacctgaacctgtggcagaagctgaagctaagcagagatgatgccaagcctctgctgagactgaagggattcccttcctttcctctggtcgagagacaggccaacgaagtggactggtgggacatggtgtgtaacgtgaagaagctgatcaacgagaaaaaggaggatggcaaggtgttttggcagaatctggctggctacaagagacaggaagccctgagaccatacctgagcagcgaggaagatcggaagaagggaaagaaattcgctcggtaccagctgggcgacctgctgctgcacctggaaaagaagcacggcgaggactggggaaaggtgtacgacgaggcctgggagcggattgacaagaaagtggaaggcctgagcaagcacatcaagctggaagaggaacggagaagcgaggacgcccagagcaaggccgccctgaccgactggctgcgggctaaggccagcttcgtgatcgagggcctgaaggaggccgacaaggacgagttctgcagatgcgagctgaagctgcagaagtggtacggggacctgcggggaaagcccttcgccatcgaagccgagaacagcatcctggacatcagcggcttcagcaagcagtacaactgtgccttcatctggcagaaggacggcgtgaagaagctgaacctgtacctgatcatcaactacttcaagggcggcaagctgcggttcaagaagatcaaacctgaagccttcgaagccaacagattctacaccgtgatcaacaaaaagagcggcgagatcgtgcccatggaggtgaacttcaacttcgacgaccccaacctgatcatcctgcctctggcctttggcaagagacagggcagagaattcatctggaacgacctgctgtccctggaaaccggcagcctgaagctggccaacggaagagtgatcgagaagacactgtacaacagaagaacccggcaggatgagcctgccctgttcgtggccctgaccttcgagcggcgggaggtcctggactcctccaatatcaaaccaatgaacctgatcggcgtggcaagaggcgaaaacatccccgccgtgatcgccctgaccgaccccgagggctgcccactgagccggtttaaggatagcctgggaaacccaacccacatcctgagaatcggcgagagctataaggagaagcagcggaccatccaggccaagaaggaggtggagcagcggagagccggcggctacagccggaagtacgccagcaaagccaagaatctggcagacgatatggtgagaaacaccgctagagatctgctgtactacgccgtgacccaggatgccatgctgatcttcgccaacctgagccggggcttcggccggcagggcaagcggaccttcatggccgagagacagtacacacggatggaggactggctgaccgccaagctggcctacgagggcctgagcaagacctacctgtccaagacactggcccagtacacctccaagacatgcagcaactgtgggtttaccatcaccagcgccgactacgacagggtgctggagaagctgaagaagacagcaacaggctggatgaccacaattaacggcaaggagctgaaggtggagggccagattacctactacaacagatacaagagacagaacgtagtcaaggacctgtccgtcgagctggatagactgagcgaagaatctgtgaacaacgacatctcctcctggacaaagggcagaagcggagaagctctgagcctcctgaagaaaagattctcccatagacccgtgcaggagaagttcgtgtgcctgaactgcggcttcgagacacacgcagccgagcaagccgccctgaacatcgccagatcctggctgttcctgcggagccaggagtacaagaaataccagacaaacaagacaaccggcaacaccgataagagagccttcgtcgagacctggcagtccttttaccggaagaagcttaaggaggtgtggaaacctgccgtgcggtctggcggatctggcggaggctccaccagccccaagaaaaagagaaaagtctaagctgccttctgcggggcttgccttctggccatgcccttcttctctcccttgcacctgtacctcttggtctttgaataaagcctgagtaggaaggctagcaaaaaaaaaaaaaaaaaaaaaaaaaaaaaaaaaaaaaaaaaaaaaaaaaaaaaaaaaaaaaaaaaaaaaaaaaaaaaaaa

SEQ ID NO: 12555 - RNA, 5785 nt, synthetic construct
  source 1..5785: mol_type = other RNA
aggaaataagagagaaaagaagagtaagaagaaatataagagccaccatggcccctaagaagaagcgtaaagtgagccggatggaacgcctcgtctacgaggtgcggcagaagtgcagaaacatcgaggacatctgcatctcctgcggatctctgaacgtgaccctggagcacccactgttcatcggcggcatgtgccagaactgtaaaaactgttttctggagtgtgcctatcaatacgacgatgacggctaccagagctactgcaccatctgttgcggcggaagagaggtgctgatgtgtggaaataacaactgctgccggtgcttctgcgtggaatgcgtggacctgctggtgggccccggcgccgcccaggccgctattaaggaagatccttggaactgctacatgtgcggccacaagggcacatacggcctgctgagacggagagaggactggcctagcagactgcagatgttcttcgccaataaccacgaccaggagttcgacccccctaaggtgtaccctcccgtccccgccgagaagagaaagcccatccgggtcctgagcctgttcgatggcatcgccaccggtctgctggtgctgaaggacctgggcatccaggtggataggtacattgcctccgaggtgtgcgaggactccatcaccgtgggaatggtgcgtcatcagggcaagatcatgtacgtgggcgacgtgcggagcgtgacacagaagcatatccaggagtggggccctttcgacctggtgatcggcggcagcccttgcaatgacctgagcatcgtgaacccagcccggaagggcctgtacgagggaaccggcagactgttcttcgagttttacagactgctgcacgacgcccggcctaaggaaggcgacgaccggcccttcttttggctgttcgagaatgtggtggccatgggagtcagcgacaagcgggatattagccggttcctggagagcaaccccgtgatgatcgatgccaaggaagtgagcgccgcccaccgggccagatacttctggggcaatctgcctggcatgaacagacccctggccagcaccgtgaacgacaagctggagctgcaggagtgcctggagcacggccggatcgccaagttcagcaaggtgagaaccatcaccacccgaagcaacagcatcaaacaaggcaaggaccagcactttcctgtgttcatgaacgagaaggaggacatcctgtggtgtaccgagatggagagagtgttcgggttcccagtccactacacagatgtcagcaacatgtctagactggccagacagagactgctgggaagaagctggtccgtccctgtgatcagacacctgttcgcccctctgaaggagtacttcgcctgcgtgagcagcggcaacagcaacgccaacagccggggccccagcttctctagcggcctggtgccactgtccctgagagggagccacatgggccccatggagatctacaaaaccgtgagcgcctggaagcggcagcctgtgcgcgtgctgagcctgtttcggaatatcgataaagtcctgaaaagcctgggattcctggagagcggctctggctccggcggtggcaccctgaagtacgtggaggatgtgacaaacgtggtcagacgggatgtggagaagtggggccccttcgatctggtgtacggcagcacccaacccctgggcagctcttgtgaccggtgccctggctggtacatgtttcagttccaccggatcctgcagtacgccctgccgagacaggagtcccagcggccattcttttggattttcatggacaacttgctgctgaccgaggatgaccaggaaactaccactcggttcctgcagaccgaagccgtgaccctgcaggacgtgagaggccgggactaccagaacgccatgcgggtgtggtccaacatccctggactgaaaagcaagcacgcacctctgacccctaaagaagaggagtacctgcaggcccaggtgcggagcagaagcaagctggacgcccctaaggtggatctgctggtgaagaattgcctcctgcccctgagagagtacttcaagtatttcagccagaatagtctgcccctgggaggcagcggcggcggcaggcccggcgccgtgagcttcgccgacgtggccgtgtacttcagccccgaggagtggggctgcctgaggcccgcccagagggccctgtacagggacgtgatgagggagacctacggccacctgggcgccctgggcttcgccgacgccaagcccgtgctgatcgcctggctggagaggaaggccgaggtgtggacccccgaggccgaggaccccgaggagggcgccaggcaccccggcagcggcggcggcccaagcagcggcgcccctcctcccagcggcggcagcccagccggctccccaacctctaccgaggagggcacctctgagtccgccacccccgagagcggccctggcacctccaccgagcccagcgagggcagcgcacccggcagccctgccggcagccccacctccacagaggagggaaccagcaccgagcccagcgaaggcagcgccccaggcaccagcaccgagcctagtgagcaggagattaaacggatcaacaagatcagaagaagacttgtgaaagacagcaacaccaagaaggccggcaagacaggccccatgaaaaccctgctggttagagtgatgacacccgatctgagagagcggctggaaaacctgagaaagaagcctgaaaatatcccccagcccatcagcaatacatctagagccaacctgaataagctgctgaccgattacaccgaaatgaagaaggcgatcctgcatgtgtactgggaagagttccagaaggaccctgtgggcctgatgagccgggtggcccagcctgccagcaagaagatcgatcagaacaagctgaaacctgagatggacgagaagggcaacctgaccaccgccggctttgcctgctctcagtgtggccagcccctgttcgtgtacaagctggagcaggtgtctgagaagggcaaggcttacaccaactacttcggacggtgcaatgtggccgagcacgaaaagctgatcctgctggcccagctgaagcccgagaaggatagcgacgaagccgtgacatatagcctgggaaagtttgggcagagggccctggatttctacagcattcatgtgaccaaggagtccacccaccccgtgaagcccctggcccagatcgccggaaacagatacgcctccggacctgtgggaaaggccctgagcgacgcatgtatgggcacaatcgcctccttcctgtctaagtaccaggacatcatcatcgaacaccagaaggtggtgaagggcaaccagaagagactggagagcctgcgggagctggccggcaaggaaaacctggaataccctagcgtgaccctgccacctcagcctcacaccaaggagggcgttgatgcctacaacgaagtgatcgcccgggtgcgaatgtgggtgaacctgaacctgtggcagaagctgaagctaagcagagatgatgccaagcctctgctgagactgaagggattcccttcctttcctctggtcgagagacaggccaacgaagtggactggtgggacatggtgtgtaacgtgaagaagctgatcaacgagaaaaaggaggatggcaaggtgttttggcagaatctggctggctacaagagacaggaagccctgagaccatacctgagcagcgaggaagatcggaagaagggaaagaaattcgctcggtaccagctgggcgacctgctgctgcacctggaaaagaagcacggcgaggactggggaaaggtgtacgacgaggcctgggagcggattgacaagaaagtggaaggcctgagcaagcacatcaagctggaagaggaacggagaagcgaggacgcccagagcaaggccgccctgaccgactggctgcgggctaaggccagcttcgtgatcgagggcctgaaggaggccgacaaggacgagttctgcagatgcgagctgaagctgcagaagtggtacggggacctgcggggaaagcccttcgccatcgaagccgagaacagcatcctggacatcagcggcttcagcaagcagtacaactgtgccttcatctggcagaaggacggcgtgaagaagctgaacctgtacctgatcatcaactacttcaagggcggcaagctgcggttcaagaagatcaaacctgaagccttcgaagccaacagattctacaccgtgatcaacaaaaagagcggcgagatcgtgcccatggaggtgaacttcaacttcgacgaccccaacctgatcatcctgcctctggcctttggcaagagacagggcagagaattcatctggaacgacctgctgtccctggaaaccggcagcctgaagctggccaacggaagagtgatcgagaagacactgtacaacagaagaacccggcaggatgagcctgccctgttcgtggccctgaccttcgagcggcgggaggtcctggactcctccaatatcaaaccaatgaacctgatcggcgtggcaagaggcgaaaacatccccgccgtgatcgccctgaccgaccccgagggctgcccactgagccggtttaaggatagcctgggaaacccaacccacatcctgagaatcggcgagagctataaggagaagcagcggaccatccaggccaagaaggaggtggagcagcggagagccggcggctacagccggaagtacgccagcaaagccaagaatctggcagacgatatggtgagaaacaccgctagagatctgctgtactacgccgtgacccaggatgccatgctgatcttcgccaacctgagccggggcttcggccggcagggcaagcggaccttcatggccgagagacagtacacacggatggaggactggctgaccgccaagctggcctacgagggcctgagcaagacctacctgtccaagacactggcccagtacacctccaagacatgcagcaactgtgggtttaccatcaccagcgccgactacgacagggtgctggagaagctgaagaagacagcaacaggctggatgaccacaattaacggcaaggagctgaaggtggagggccagattacctactacaacagatacaagagacagaacgtagtcaaggacctgtccgtcgagctggatagactgagcgaagaatctgtgaacaacgacatctcctcctggacaaagggcagaagcggagaagctctgagcctcctgaagaaaagattctcccatagacccgtgcaggagaagttcgtgtgcctgaactgcggcttcgagacacacgcagccgagcaagccgccctgaacatcgccagatcctggctgttcctgcggagccaggagtacaagaaataccagacaaacaagacaaccggcaacaccgataagagagccttcgtcgagacctggcagtccttttaccggaagaagcttaaggaggtgtggaaacctgccgtgcggtctggcggatctggcggaggctccaccagccccaagaaaaagagaaaagtctaagctgccttctgcggggcttgccttctggccatgcccttcttctctcccttgcacctgtacctcttggtctttgaataaagcctgagtaggaaggctagcaaaaaaaaaaaaaaaaaaaaaaaaaaaaaaaaaaaaaaaaaaaaaaaaaaaaaaaaaaaaaaaaaaaaaaaaaaaaaaaa

SEQ ID NO: 12556 - RNA, 5785 nt, synthetic construct
  source 1..5785: mol_type = other RNA
aggaaataagagagaaaagaagagtaagaagaaatataagagccaccatggcccctaagaagaagcgtaaagtgagccggatggaacgcctcgtctacgaggtgcggcagaagtgcagaaacatcgaggacatctgcatctcctgcggatctctgaacgtgaccctggagcacccactgttcatcggcggcatgtgccagaactgtaaaaactgttttctggagtgtgcctatcaatacgacgatgacggctaccagagctactgcaccatctgttgcggcggaagagaggtgctgatgtgtggaaataacaactgctgccggtgcttctgcgtggaatgcgtggacctgctggtgggccccggcgccgcccaggccgctattaaggaagatccttggaactgctacatgtgcggccacaagggcacatacggcctgctgagacggagagaggactggcctagcagactgcagatgttcttcgccaataaccacgaccaggagttcgacccccctaaggtgtaccctcccgtccccgccgagaagagaaagcccatccgggtcctgagcctgttcgatggcatcgccaccggtctgctggtgctgaaggacctgggcatccaggtggataggtacattgcctccgaggtgtgcgaggactccatcaccgtgggaatggtgcgtcatcagggcaagatcatgtacgtgggcgacgtgcggagcgtgacacagaagcatatccaggagtggggccctttcgacctggtgatcggcggcagcccttgcaatgacctgagcatcgtgaacccagcccggaagggcctgtacgagggaaccggcagactgttcttcgagttttacagactgctgcacgacgcccggcctaaggaaggcgacgaccggcccttcttttggctgttcgagaatgtggtggccatgggagtcagcgacaagcgggatattagccggttcctggagagcaaccccgtgatgatcgatgccaaggaagtgagcgccgcccaccgggccagatacttctggggcaatctgcctggcatgaacagacccctggccagcaccgtgaacgacaagctggagctgcaggagtgcctggagcacggccggatcgccaagttcagcaaggtgagaaccatcaccacccgaagcaacagcatcaaacaaggcaaggaccagcactttcctgtgttcatgaacgagaaggaggacatcctgtggtgtaccgagatggagagagtgttcgggttcccagtccactacacagatgtcagcaacatgtctagactggccagacagagactgctgggaagaagctggtccgtccctgtgatcagacacctgttcgcccctctgaaggagtacttcgcctgcgtgagcagcggcaacagcaacgccaacagccggggccccagcttctctagcggcctggtgccactgtccctgagagggagccacatgggccccatggagatctacaaaaccgtgagcgcctggaagcggcagcctgtgcgcgtgctgagcctgtttcggaatatcgataaagtcctgaaaagcctgggattcctggagagcggctctggctccggcggtggcaccctgaagtacgtggaggatgtgacaaacgtggtcagacgggatgtggagaagtggggccccttcgatctggtgtacggcagcacccaacccctgggcagctcttgtgaccggtgccctggctggtacatgtttcagttccaccggatcctgcagtacgccctgccgagacaggagtcccagcggccattcttttggattttcatggacaacttgctgctgaccgaggatgaccaggaaactaccactcggttcctgcagaccgaagccgtgaccctgcaggacgtgagaggccgggactaccagaacgccatgcgggtgtggtccaacatccctggactgaaaagcaagcacgcacctctgacccctaaagaagaggagtacctgcaggcccaggtgcggagcagaagcaagctggacgcccctaaggtggatctgctggtgaagaattgcctcctgcccctgagagagtacttcaagtatttcagccagaatagtctgcccctgggaggcagcggcggcggcagcctgggcagcgagctgttcagggacgtggccatcgtgttcagccaggaggagtggcagtggctggcccccgcccagagggacctgtacagggacgtgatgctggagacctacagcaacctggtgagcctgggcctggccgtgagcaagcccgacgtgatcagcttcctggagcagggcaaggagccctggatggtggagagggtggtgagcggcggcctgtgccccgtgctggagagcaggggcggcccaagcagcggcgcccctcctcccagcggcggcagcccagccggctccccaacctctaccgaggagggcacctctgagtccgccacccccgagagcggccctggcacctccaccgagcccagcgagggcagcgcacccggcagccctgccggcagccccacctccacagaggagggaaccagcaccgagcccagcgaaggcagcgccccaggcaccagcaccgagcctagtgagcaggagattaaacggatcaacaagatcagaagaagacttgtgaaagacagcaacaccaagaaggccggcaagacaggccccatgaaaaccctgctggttagagtgatgacacccgatctgagagagcggctggaaaacctgagaaagaagcctgaaaatatcccccagcccatcagcaatacatctagagccaacctgaataagctgctgaccgattacaccgaaatgaagaaggcgatcctgcatgtgtactgggaagagttccagaaggaccctgtgggcctgatgagccgggtggcccagcctgccagcaagaagatcgatcagaacaagctgaaacctgagatggacgagaagggcaacctgaccaccgccggctttgcctgctctcagtgtggccagcccctgttcgtgtacaagctggagcaggtgtctgagaagggcaaggcttacaccaactacttcggacggtgcaatgtggccgagcacgaaaagctgatcctgctggcccagctgaagcccgagaaggatagcgacgaagccgtgacatatagcctgggaaagtttgggcagagggccctggatttctacagcattcatgtgaccaaggagtccacccaccccgtgaagcccctggcccagatcgccggaaacagatacgcctccggacctgtgggaaaggccctgagcgacgcatgtatgggcacaatcgcctccttcctgtctaagtaccaggacatcatcatcgaacaccagaaggtggtgaagggcaaccagaagagactggagagcctgcgggagctggccggcaaggaaaacctggaataccctagcgtgaccctgccacctcagcctcacaccaaggagggcgttgatgcctacaacgaagtgatcgcccgggtgcgaatgtgggtgaacctgaacctgtggcagaagctgaagctaagcagagatgatgccaagcctctgctgagactgaagggattcccttcctttcctctggtcgagagacaggccaacgaagtggactggtgggacatggtgtgtaacgtgaagaagctgatcaacgagaaaaaggaggatggcaaggtgttttggcagaatctggctggctacaagagacaggaagccctgagaccatacctgagcagcgaggaagatcggaagaagggaaagaaattcgctcggtaccagctgggcgacctgctgctgcacctggaaaagaagcacggcgaggactggggaaaggtgtacgacgaggcctgggagcggattgacaagaaagtggaaggcctgagcaagcacatcaagctggaagaggaacggagaagcgaggacgcccagagcaaggccgccctgaccgactggctgcgggctaaggccagcttcgtgatcgagggcctgaaggaggccgacaaggacgagttctgcagatgcgagctgaagctgcagaagtggtacggggacctgcggggaaagcccttcgccatcgaagccgagaacagcatcctggacatcagcggcttcagcaagcagtacaactgtgccttcatctggcagaaggacggcgtgaagaagctgaacctgtacctgatcatcaactacttcaagggcggcaagctgcggttcaagaagatcaaacctgaagccttcgaagccaacagattctacaccgtgatcaacaaaaagagcggcgagatcgtgcccatggaggtgaacttcaacttcgacgaccccaacctgatcatcctgcctctggcctttggcaagagacagggcagagaattcatctggaacgacctgctgtccctggaaaccggcagcctgaagctggccaacggaagagtgatcgagaagacactgtacaacagaagaacccggcaggatgagcctgccctgttcgtggccctgaccttcgagcggcgggaggtcctggactcctccaatatcaaaccaatgaacctgatcggcgtggcaagaggcgaaaacatccccgccgtgatcgccctgaccgaccccgagggctgcccactgagccggtttaaggatagcctgggaaacccaacccacatcctgagaatcggcgagagctataaggagaagcagcggaccatccaggccaagaaggaggtggagcagcggagagccggcggctacagccggaagtacgccagcaaagccaagaatctggcagacgatatggtgagaaacaccgctagagatctgctgtactacgccgtgacccaggatgccatgctgatcttcgccaacctgagccggggcttcggccggcagggcaagcggaccttcatggccgagagacagtacacacggatggaggactggctgaccgccaagctggcctacgagggcctgagcaagacctacctgtccaagacactggcccagtacacctccaagacatgcagcaactgtgggtttaccatcaccagcgccgactacgacagggtgctggagaagctgaagaagacagcaacaggctggatgaccacaattaacggcaaggagctgaaggtggagggccagattacctactacaacagatacaagagacagaacgtagtcaaggacctgtccgtcgagctggatagactgagcgaagaatctgtgaacaacgacatctcctcctggacaaagggcagaagcggagaagctctgagcctcctgaagaaaagattctcccatagacccgtgcaggagaagttcgtgtgcctgaactgcggcttcgagacacacgcagccgagcaagccgccctgaacatcgccagatcctggctgttcctgcggagccaggagtacaagaaataccagacaaacaagacaaccggcaacaccgataagagagccttcgtcgagacctggcagtccttttaccggaagaagcttaaggaggtgtggaaacctgccgtgcggtctggcggatctggcggaggctccaccagccccaagaaaaagagaaaagtctaagctgccttctgcggggcttgccttctggccatgcccttcttctctcccttgcacctgtacctcttggtctttgaataaagcctgagtaggaaggctagcaaaaaaaaaaaaaaaaaaaaaaaaaaaaaaaaaaaaaaaaaaaaaaaaaaaaaaaaaaaaaaaaaaaaaaaaaaaaaaaa

SEQ ID NO: 12557 - RNA, 5785 nt, synthetic construct
  source 1..5785: mol_type = other RNA
aggaaataagagagaaaagaagagtaagaagaaatataagagccaccatggcccctaagaagaagcgtaaagtgagccggatggaacgcctcgtctacgaggtgcggcagaagtgcagaaacatcgaggacatctgcatctcctgcggatctctgaacgtgaccctggagcacccactgttcatcggcggcatgtgccagaactgtaaaaactgttttctggagtgtgcctatcaatacgacgatgacggctaccagagctactgcaccatctgttgcggcggaagagaggtgctgatgtgtggaaataacaactgctgccggtgcttctgcgtggaatgcgtggacctgctggtgggccccggcgccgcccaggccgctattaaggaagatccttggaactgctacatgtgcggccacaagggcacatacggcctgctgagacggagagaggactggcctagcagactgcagatgttcttcgccaataaccacgaccaggagttcgacccccctaaggtgtaccctcccgtccccgccgagaagagaaagcccatccgggtcctgagcctgttcgatggcatcgccaccggtctgctggtgctgaaggacctgggcatccaggtggataggtacattgcctccgaggtgtgcgaggactccatcaccgtgggaatggtgcgtcatcagggcaagatcatgtacgtgggcgacgtgcggagcgtgacacagaagcatatccaggagtggggccctttcgacctggtgatcggcggcagcccttgcaatgacctgagcatcgtgaacccagcccggaagggcctgtacgagggaaccggcagactgttcttcgagttttacagactgctgcacgacgcccggcctaaggaaggcgacgaccggcccttcttttggctgttcgagaatgtggtggccatgggagtcagcgacaagcgggatattagccggttcctggagagcaaccccgtgatgatcgatgccaaggaagtgagcgccgcccaccgggccagatacttctggggcaatctgcctggcatgaacagacccctggccagcaccgtgaacgacaagctggagctgcaggagtgcctggagcacggccggatcgccaagttcagcaaggtgagaaccatcaccacccgaagcaacagcatcaaacaaggcaaggaccagcactttcctgtgttcatgaacgagaaggaggacatcctgtggtgtaccgagatggagagagtgttcgggttcccagtccactacacagatgtcagcaacatgtctagactggccagacagagactgctgggaagaagctggtccgtccctgtgatcagacacctgttcgcccctctgaaggagtacttcgcctgcgtgagcagcggcaacagcaacgccaacagccggggccccagcttctctagcggcctggtgccactgtccctgagagggagccacatgggccccatggagatctacaaaaccgtgagcgcctggaagcggcagcctgtgcgcgtgctgagcctgtttcggaatatcgataaagtcctgaaaagcctgggattcctggagagcggctctggctccggcggtggcaccctgaagtacgtggaggatgtgacaaacgtggtcagacgggatgtggagaagtggggccccttcgatctggtgtacggcagcacccaacccctgggcagctcttgtgaccggtgccctggctggtacatgtttcagttccaccggatcctgcagtacgccctgccgagacaggagtcccagcggccattcttttggattttcatggacaacttgctgctgaccgaggatgaccaggaaactaccactcggttcctgcagaccgaagccgtgaccctgcaggacgtgagaggccgggactaccagaacgccatgcgggtgtggtccaacatccctggactgaaaagcaagcacgcacctctgacccctaaagaagaggagtacctgcaggcccaggtgcggagcagaagcaagctggacgcccctaaggtggatctgctggtgaagaattgcctcctgcccctgagagagtacttcaagtatttcagccagaatagtctgcccctgggaggcagcggcggcggccccctgggcagcgagctgttcagggacgtggccatcgtgttcagccaggaggagtggcagtggctggcccccgcccagagggacctgtacagggacgtgatgctggagacctacagcaacctggtgagcctgggcctggccatcagcaagcccgacgtgatcagcttcctggagcagggcaaggagccctggatggtggagagggtggtggccggcggcctgtgccccgtgctggagagcaggggcggcccaagcagcggcgcccctcctcccagcggcggcagcccagccggctccccaacctctaccgaggagggcacctctgagtccgccacccccgagagcggccctggcacctccaccgagcccagcgagggcagcgcacccggcagccctgccggcagccccacctccacagaggagggaaccagcaccgagcccagcgaaggcagcgccccaggcaccagcaccgagcctagtgagcaggagattaaacggatcaacaagatcagaagaagacttgtgaaagacagcaacaccaagaaggccggcaagacaggccccatgaaaaccctgctggttagagtgatgacacccgatctgagagagcggctggaaaacctgagaaagaagcctgaaaatatcccccagcccatcagcaatacatctagagccaacctgaataagctgctgaccgattacaccgaaatgaagaaggcgatcctgcatgtgtactgggaagagttccagaaggaccctgtgggcctgatgagccgggtggcccagcctgccagcaagaagatcgatcagaacaagctgaaacctgagatggacgagaagggcaacctgaccaccgccggctttgcctgctctcagtgtggccagcccctgttcgtgtacaagctggagcaggtgtctgagaagggcaaggcttacaccaactacttcggacggtgcaatgtggccgagcacgaaaagctgatcctgctggcccagctgaagcccgagaaggatagcgacgaagccgtgacatatagcctgggaaagtttgggcagagggccctggatttctacagcattcatgtgaccaaggagtccacccaccccgtgaagcccctggcccagatcgccggaaacagatacgcctccggacctgtgggaaaggccctgagcgacgcatgtatgggcacaatcgcctccttcctgtctaagtaccaggacatcatcatcgaacaccagaaggtggtgaagggcaaccagaagagactggagagcctgcgggagctggccggcaaggaaaacctggaataccctagcgtgaccctgccacctcagcctcacaccaaggagggcgttgatgcctacaacgaagtgatcgcccgggtgcgaatgtgggtgaacctgaacctgtggcagaagctgaagctaagcagagatgatgccaagcctctgctgagactgaagggattcccttcctttcctctggtcgagagacaggccaacgaagtggactggtgggacatggtgtgtaacgtgaagaagctgatcaacgagaaaaaggaggatggcaaggtgttttggcagaatctggctggctacaagagacaggaagccctgagaccatacctgagcagcgaggaagatcggaagaagggaaagaaattcgctcggtaccagctgggcgacctgctgctgcacctggaaaagaagcacggcgaggactggggaaaggtgtacgacgaggcctgggagcggattgacaagaaagtggaaggcctgagcaagcacatcaagctggaagaggaacggagaagcgaggacgcccagagcaaggccgccctgaccgactggctgcgggctaaggccagcttcgtgatcgagggcctgaaggaggccgacaaggacgagttctgcagatgcgagctgaagctgcagaagtggtacggggacctgcggggaaagcccttcgccatcgaagccgagaacagcatcctggacatcagcggcttcagcaagcagtacaactgtgccttcatctggcagaaggacggcgtgaagaagctgaacctgtacctgatcatcaactacttcaagggcggcaagctgcggttcaagaagatcaaacctgaagccttcgaagccaacagattctacaccgtgatcaacaaaaagagcggcgagatcgtgcccatggaggtgaacttcaacttcgacgaccccaacctgatcatcctgcctctggcctttggcaagagacagggcagagaattcatctggaacgacctgctgtccctggaaaccggcagcctgaagctggccaacggaagagtgatcgagaagacactgtacaacagaagaacccggcaggatgagcctgccctgttcgtggccctgaccttcgagcggcgggaggtcctggactcctccaatatcaaaccaatgaacctgatcggcgtggcaagaggcgaaaacatccccgccgtgatcgccctgaccgaccccgagggctgcccactgagccggtttaaggatagcctgggaaacccaacccacatcctgagaatcggcgagagctataaggagaagcagcggaccatccaggccaagaaggaggtggagcagcggagagccggcggctacagccggaagtacgccagcaaagccaagaatctggcagacgatatggtgagaaacaccgctagagatctgctgtactacgccgtgacccaggatgccatgctgatcttcgccaacctgagccggggcttcggccggcagggcaagcggaccttcatggccgagagacagtacacacggatggaggactggctgaccgccaagctggcctacgagggcctgagcaagacctacctgtccaagacactggcccagtacacctccaagacatgcagcaactgtgggtttaccatcaccagcgccgactacgacagggtgctggagaagctgaagaagacagcaacaggctggatgaccacaattaacggcaaggagctgaaggtggagggccagattacctactacaacagatacaagagacagaacgtagtcaaggacctgtccgtcgagctggatagactgagcgaagaatctgtgaacaacgacatctcctcctggacaaagggcagaagcggagaagctctgagcctcctgaagaaaagattctcccatagacccgtgcaggagaagttcgtgtgcctgaactgcggcttcgagacacacgcagccgagcaagccgccctgaacatcgccagatcctggctgttcctgcggagccaggagtacaagaaataccagacaaacaagacaaccggcaacaccgataagagagccttcgtcgagacctggcagtccttttaccggaagaagcttaaggaggtgtggaaacctgccgtgcggtctggcggatctggcggaggctccaccagccccaagaaaaagagaaaagtctaagctgccttctgcggggcttgccttctggccatgcccttcttctctcccttgcacctgtacctcttggtctttgaataaagcctgagtaggaaggctagcaaaaaaaaaaaaaaaaaaaaaaaaaaaaaaaaaaaaaaaaaaaaaaaaaaaaaaaaaaaaaaaaaaaaaaaaaaaaaaaa

SEQ ID NO: 12558 - RNA, 5785 nt, synthetic construct
  source 1..5785: mol_type = other RNA
aggaaataagagagaaaagaagagtaagaagaaatataagagccaccatggcccctaagaagaagcgtaaagtgagccggatggaacgcctcgtctacgaggtgcggcagaagtgcagaaacatcgaggacatctgcatctcctgcggatctctgaacgtgaccctggagcacccactgttcatcggcggcatgtgccagaactgtaaaaactgttttctggagtgtgcctatcaatacgacgatgacggctaccagagctactgcaccatctgttgcggcggaagagaggtgctgatgtgtggaaataacaactgctgccggtgcttctgcgtggaatgcgtggacctgctggtgggccccggcgccgcccaggccgctattaaggaagatccttggaactgctacatgtgcggccacaagggcacatacggcctgctgagacggagagaggactggcctagcagactgcagatgttcttcgccaataaccacgaccaggagttcgacccccctaaggtgtaccctcccgtccccgccgagaagagaaagcccatccgggtcctgagcctgttcgatggcatcgccaccggtctgctggtgctgaaggacctgggcatccaggtggataggtacattgcctccgaggtgtgcgaggactccatcaccgtgggaatggtgcgtcatcagggcaagatcatgtacgtgggcgacgtgcggagcgtgacacagaagcatatccaggagtggggccctttcgacctggtgatcggcggcagcccttgcaatgacctgagcatcgtgaacccagcccggaagggcctgtacgagggaaccggcagactgttcttcgagttttacagactgctgcacgacgcccggcctaaggaaggcgacgaccggcccttcttttggctgttcgagaatgtggtggccatgggagtcagcgacaagcgggatattagccggttcctggagagcaaccccgtgatgatcgatgccaaggaagtgagcgccgcccaccgggccagatacttctggggcaatctgcctggcatgaacagacccctggccagcaccgtgaacgacaagctggagctgcaggagtgcctggagcacggccggatcgccaagttcagcaaggtgagaaccatcaccacccgaagcaacagcatcaaacaaggcaaggaccagcactttcctgtgttcatgaacgagaaggaggacatcctgtggtgtaccgagatggagagagtgttcgggttcccagtccactacacagatgtcagcaacatgtctagactggccagacagagactgctgggaagaagctggtccgtccctgtgatcagacacctgttcgcccctctgaaggagtacttcgcctgcgtgagcagcggcaacagcaacgccaacagccggggccccagcttctctagcggcctggtgccactgtccctgagagggagccacatgggccccatggagatctacaaaaccgtgagcgcctggaagcggcagcctgtgcgcgtgctgagcctgtttcggaatatcgataaagtcctgaaaagcctgggattcctggagagcggctctggctccggcggtggcaccctgaagtacgtggaggatgtgacaaacgtggtcagacgggatgtggagaagtggggccccttcgatctggtgtacggcagcacccaacccctgggcagctcttgtgaccggtgccctggctggtacatgtttcagttccaccggatcctgcagtacgccctgccgagacaggagtcccagcggccattcttttggattttcatggacaacttgctgctgaccgaggatgaccaggaaactaccactcggttcctgcagaccgaagccgtgaccctgcaggacgtgagaggccgggactaccagaacgccatgcgggtgtggtccaacatccctggactgaaaagcaagcacgcacctctgacccctaaagaagaggagtacctgcaggcccaggtgcggagcagaagcaagctggacgcccctaaggtggatctgctggtgaagaattgcctcctgcccctgagagagtacttcaagtatttcagccagaatagtctgcccctgggaggcagcggcggcggcctgctgaccttcgaggacgtggccgtgagcttcagcgaggaggagtggaggctgctggaccccacccagaagagcctgtacaacgacgtgatgcaggagaactacgagaccgtggtgagcctgggcctgaagctgaagaacgacaccggcaacgaccagcccatcagcctgagcgccctggagatccaggccagcggctgcagggtgctgaggaaggccaggatgaaggtggcccagaagaccggcggcccaagcagcggcgcccctcctcccagcggcggcagcccagccggctccccaacctctaccgaggagggcacctctgagtccgccacccccgagagcggccctggcacctccaccgagcccagcgagggcagcgcacccggcagccctgccggcagccccacctccacagaggagggaaccagcaccgagcccagcgaaggcagcgccccaggcaccagcaccgagcctagtgagcaggagattaaacggatcaacaagatcagaagaagacttgtgaaagacagcaacaccaagaaggccggcaagacaggccccatgaaaaccctgctggttagagtgatgacacccgatctgagagagcggctggaaaacctgagaaagaagcctgaaaatatcccccagcccatcagcaatacatctagagccaacctgaataagctgctgaccgattacaccgaaatgaagaaggcgatcctgcatgtgtactgggaagagttccagaaggaccctgtgggcctgatgagccgggtggcccagcctgccagcaagaagatcgatcagaacaagctgaaacctgagatggacgagaagggcaacctgaccaccgccggctttgcctgctctcagtgtggccagcccctgttcgtgtacaagctggagcaggtgtctgagaagggcaaggcttacaccaactacttcggacggtgcaatgtggccgagcacgaaaagctgatcctgctggcccagctgaagcccgagaaggatagcgacgaagccgtgacatatagcctgggaaagtttgggcagagggccctggatttctacagcattcatgtgaccaaggagtccacccaccccgtgaagcccctggcccagatcgccggaaacagatacgcctccggacctgtgggaaaggccctgagcgacgcatgtatgggcacaatcgcctccttcctgtctaagtaccaggacatcatcatcgaacaccagaaggtggtgaagggcaaccagaagagactggagagcctgcgggagctggccggcaaggaaaacctggaataccctagcgtgaccctgccacctcagcctcacaccaaggagggcgttgatgcctacaacgaagtgatcgcccgggtgcgaatgtgggtgaacctgaacctgtggcagaagctgaagctaagcagagatgatgccaagcctctgctgagactgaagggattcccttcctttcctctggtcgagagacaggccaacgaagtggactggtgggacatggtgtgtaacgtgaagaagctgatcaacgagaaaaaggaggatggcaaggtgttttggcagaatctggctggctacaagagacaggaagccctgagaccatacctgagcagcgaggaagatcggaagaagggaaagaaattcgctcggtaccagctgggcgacctgctgctgcacctggaaaagaagcacggcgaggactggggaaaggtgtacgacgaggcctgggagcggattgacaagaaagtggaaggcctgagcaagcacatcaagctggaagaggaacggagaagcgaggacgcccagagcaaggccgccctgaccgactggctgcgggctaaggccagcttcgtgatcgagggcctgaaggaggccgacaaggacgagttctgcagatgcgagctgaagctgcagaagtggtacggggacctgcggggaaagcccttcgccatcgaagccgagaacagcatcctggacatcagcggcttcagcaagcagtacaactgtgccttcatctggcagaaggacggcgtgaagaagctgaacctgtacctgatcatcaactacttcaagggcggcaagctgcggttcaagaagatcaaacctgaagccttcgaagccaacagattctacaccgtgatcaacaaaaagagcggcgagatcgtgcccatggaggtgaacttcaacttcgacgaccccaacctgatcatcctgcctctggcctttggcaagagacagggcagagaattcatctggaacgacctgctgtccctggaaaccggcagcctgaagctggccaacggaagagtgatcgagaagacactgtacaacagaagaacccggcaggatgagcctgccctgttcgtggccctgaccttcgagcggcgggaggtcctggactcctccaatatcaaaccaatgaacctgatcggcgtggcaagaggcgaaaacatccccgccgtgatcgccctgaccgaccccgagggctgcccactgagccggtttaaggatagcctgggaaacccaacccacatcctgagaatcggcgagagctataaggagaagcagcggaccatccaggccaagaaggaggtggagcagcggagagccggcggctacagccggaagtacgccagcaaagccaagaatctggcagacgatatggtgagaaacaccgctagagatctgctgtactacgccgtgacccaggatgccatgctgatcttcgccaacctgagccggggcttcggccggcagggcaagcggaccttcatggccgagagacagtacacacggatggaggactggctgaccgccaagctggcctacgagggcctgagcaagacctacctgtccaagacactggcccagtacacctccaagacatgcagcaactgtgggtttaccatcaccagcgccgactacgacagggtgctggagaagctgaagaagacagcaacaggctggatgaccacaattaacggcaaggagctgaaggtggagggccagattacctactacaacagatacaagagacagaacgtagtcaaggacctgtccgtcgagctggatagactgagcgaagaatctgtgaacaacgacatctcctcctggacaaagggcagaagcggagaagctctgagcctcctgaagaaaagattctcccatagacccgtgcaggagaagttcgtgtgcctgaactgcggcttcgagacacacgcagccgagcaagccgccctgaacatcgccagatcctggctgttcctgcggagccaggagtacaagaaataccagacaaacaagacaaccggcaacaccgataagagagccttcgtcgagacctggcagtccttttaccggaagaagcttaaggaggtgtggaaacctgccgtgcggtctggcggatctggcggaggctccaccagccccaagaaaaagagaaaagtctaagctgccttctgcggggcttgccttctggccatgcccttcttctctcccttgcacctgtacctcttggtctttgaataaagcctgagtaggaaggctagcaaaaaaaaaaaaaaaaaaaaaaaaaaaaaaaaaaaaaaaaaaaaaaaaaaaaaaaaaaaaaaaaaaaaaaaaaaaaaaaa

SEQ ID NO: 12559 - RNA, 5785 nt, synthetic construct
  source 1..5785: mol_type = other RNA
aggaaataagagagaaaagaagagtaagaagaaatataagagccaccatggcccctaagaagaagcgtaaagtgagccggatggaacgcctcgtctacgaggtgcggcagaagtgcagaaacatcgaggacatctgcatctcctgcggatctctgaacgtgaccctggagcacccactgttcatcggcggcatgtgccagaactgtaaaaactgttttctggagtgtgcctatcaatacgacgatgacggctaccagagctactgcaccatctgttgcggcggaagagaggtgctgatgtgtggaaataacaactgctgccggtgcttctgcgtggaatgcgtggacctgctggtgggccccggcgccgcccaggccgctattaaggaagatccttggaactgctacatgtgcggccacaagggcacatacggcctgctgagacggagagaggactggcctagcagactgcagatgttcttcgccaataaccacgaccaggagttcgacccccctaaggtgtaccctcccgtccccgccgagaagagaaagcccatccgggtcctgagcctgttcgatggcatcgccaccggtctgctggtgctgaaggacctgggcatccaggtggataggtacattgcctccgaggtgtgcgaggactccatcaccgtgggaatggtgcgtcatcagggcaagatcatgtacgtgggcgacgtgcggagcgtgacacagaagcatatccaggagtggggccctttcgacctggtgatcggcggcagcccttgcaatgacctgagcatcgtgaacccagcccggaagggcctgtacgagggaaccggcagactgttcttcgagttttacagactgctgcacgacgcccggcctaaggaaggcgacgaccggcccttcttttggctgttcgagaatgtggtggccatgggagtcagcgacaagcgggatattagccggttcctggagagcaaccccgtgatgatcgatgccaaggaagtgagcgccgcccaccgggccagatacttctggggcaatctgcctggcatgaacagacccctggccagcaccgtgaacgacaagctggagctgcaggagtgcctggagcacggccggatcgccaagttcagcaaggtgagaaccatcaccacccgaagcaacagcatcaaacaaggcaaggaccagcactttcctgtgttcatgaacgagaaggaggacatcctgtggtgtaccgagatggagagagtgttcgggttcccagtccactacacagatgtcagcaacatgtctagactggccagacagagactgctgggaagaagctggtccgtccctgtgatcagacacctgttcgcccctctgaaggagtacttcgcctgcgtgagcagcggcaacagcaacgccaacagccggggccccagcttctctagcggcctggtgccactgtccctgagagggagccacatgggccccatggagatctacaaaaccgtgagcgcctggaagcggcagcctgtgcgcgtgctgagcctgtttcggaatatcgataaagtcctgaaaagcctgggattcctggagagcggctctggctccggcggtggcaccctgaagtacgtggaggatgtgacaaacgtggtcagacgggatgtggagaagtggggccccttcgatctggtgtacggcagcacccaacccctgggcagctcttgtgaccggtgccctggctggtacatgtttcagttccaccggatcctgcagtacgccctgccgagacaggagtcccagcggccattcttttggattttcatggacaacttgctgctgaccgaggatgaccaggaaactaccactcggttcctgcagaccgaagccgtgaccctgcaggacgtgagaggccgggactaccagaacgccatgcgggtgtggtccaacatccctggactgaaaagcaagcacgcacctctgacccctaaagaagaggagtacctgcaggcccaggtgcggagcagaagcaagctggacgcccctaaggtggatctgctggtgaagaattgcctcctgcccctgagagagtacttcaagtatttcagccagaatagtctgcccctgggaggcagcggcggcggcaccgagggccccctgaccttcagggacgtggccatcgagttcagccaggaggagtggaagttcctggtgcccgcccagagggccctgtacagggacgtgatgctggagacctacaggaacctggtgttcctgggcacctgccccagcgacctgagcgtgctgagctggctggagcagggcagggagctgtggaccgtgaacggccccgaggagatcagcaggcccgccaacgagtgggcctgcggcggcccaagcagcggcgcccctcctcccagcggcggcagcccagccggctccccaacctctaccgaggagggcacctctgagtccgccacccccgagagcggccctggcacctccaccgagcccagcgagggcagcgcacccggcagccctgccggcagccccacctccacagaggagggaaccagcaccgagcccagcgaaggcagcgccccaggcaccagcaccgagcctagtgagcaggagattaaacggatcaacaagatcagaagaagacttgtgaaagacagcaacaccaagaaggccggcaagacaggccccatgaaaaccctgctggttagagtgatgacacccgatctgagagagcggctggaaaacctgagaaagaagcctgaaaatatcccccagcccatcagcaatacatctagagccaacctgaataagctgctgaccgattacaccgaaatgaagaaggcgatcctgcatgtgtactgggaagagttccagaaggaccctgtgggcctgatgagccgggtggcccagcctgccagcaagaagatcgatcagaacaagctgaaacctgagatggacgagaagggcaacctgaccaccgccggctttgcctgctctcagtgtggccagcccctgttcgtgtacaagctggagcaggtgtctgagaagggcaaggcttacaccaactacttcggacggtgcaatgtggccgagcacgaaaagctgatcctgctggcccagctgaagcccgagaaggatagcgacgaagccgtgacatatagcctgggaaagtttgggcagagggccctggatttctacagcattcatgtgaccaaggagtccacccaccccgtgaagcccctggcccagatcgccggaaacagatacgcctccggacctgtgggaaaggccctgagcgacgcatgtatgggcacaatcgcctccttcctgtctaagtaccaggacatcatcatcgaacaccagaaggtggtgaagggcaaccagaagagactggagagcctgcgggagctggccggcaaggaaaacctggaataccctagcgtgaccctgccacctcagcctcacaccaaggagggcgttgatgcctacaacgaagtgatcgcccgggtgcgaatgtgggtgaacctgaacctgtggcagaagctgaagctaagcagagatgatgccaagcctctgctgagactgaagggattcccttcctttcctctggtcgagagacaggccaacgaagtggactggtgggacatggtgtgtaacgtgaagaagctgatcaacgagaaaaaggaggatggcaaggtgttttggcagaatctggctggctacaagagacaggaagccctgagaccatacctgagcagcgaggaagatcggaagaagggaaagaaattcgctcggtaccagctgggcgacctgctgctgcacctggaaaagaagcacggcgaggactggggaaaggtgtacgacgaggcctgggagcggattgacaagaaagtggaaggcctgagcaagcacatcaagctggaagaggaacggagaagcgaggacgcccagagcaaggccgccctgaccgactggctgcgggctaaggccagcttcgtgatcgagggcctgaaggaggccgacaaggacgagttctgcagatgcgagctgaagctgcagaagtggtacggggacctgcggggaaagcccttcgccatcgaagccgagaacagcatcctggacatcagcggcttcagcaagcagtacaactgtgccttcatctggcagaaggacggcgtgaagaagctgaacctgtacctgatcatcaactacttcaagggcggcaagctgcggttcaagaagatcaaacctgaagccttcgaagccaacagattctacaccgtgatcaacaaaaagagcggcgagatcgtgcccatggaggtgaacttcaacttcgacgaccccaacctgatcatcctgcctctggcctttggcaagagacagggcagagaattcatctggaacgacctgctgtccctggaaaccggcagcctgaagctggccaacggaagagtgatcgagaagacactgtacaacagaagaacccggcaggatgagcctgccctgttcgtggccctgaccttcgagcggcgggaggtcctggactcctccaatatcaaaccaatgaacctgatcggcgtggcaagaggcgaaaacatccccgccgtgatcgccctgaccgaccccgagggctgcccactgagccggtttaaggatagcctgggaaacccaacccacatcctgagaatcggcgagagctataaggagaagcagcggaccatccaggccaagaaggaggtggagcagcggagagccggcggctacagccggaagtacgccagcaaagccaagaatctggcagacgatatggtgagaaacaccgctagagatctgctgtactacgccgtgacccaggatgccatgctgatcttcgccaacctgagccggggcttcggccggcagggcaagcggaccttcatggccgagagacagtacacacggatggaggactggctgaccgccaagctggcctacgagggcctgagcaagacctacctgtccaagacactggcccagtacacctccaagacatgcagcaactgtgggtttaccatcaccagcgccgactacgacagggtgctggagaagctgaagaagacagcaacaggctggatgaccacaattaacggcaaggagctgaaggtggagggccagattacctactacaacagatacaagagacagaacgtagtcaaggacctgtccgtcgagctggatagactgagcgaagaatctgtgaacaacgacatctcctcctggacaaagggcagaagcggagaagctctgagcctcctgaagaaaagattctcccatagacccgtgcaggagaagttcgtgtgcctgaactgcggcttcgagacacacgcagccgagcaagccgccctgaacatcgccagatcctggctgttcctgcggagccaggagtacaagaaataccagacaaacaagacaaccggcaacaccgataagagagccttcgtcgagacctggcagtccttttaccggaagaagcttaaggaggtgtggaaacctgccgtgcggtctggcggatctggcggaggctccaccagccccaagaaaaagagaaaagtctaagctgccttctgcggggcttgccttctggccatgcccttcttctctcccttgcacctgtacctcttggtctttgaataaagcctgagtaggaaggctagcaaaaaaaaaaaaaaaaaaaaaaaaaaaaaaaaaaaaaaaaaaaaaaaaaaaaaaaaaaaaaaaaaaaaaaaaaaaaaaaa

SEQ ID NO: 12560 - RNA, 5785 nt, synthetic construct
  source 1..5785: mol_type = other RNA
aggaaataagagagaaaagaagagtaagaagaaatataagagccaccatggcccctaagaagaagcgtaaagtgagccggatggaacgcctcgtctacgaggtgcggcagaagtgcagaaacatcgaggacatctgcatctcctgcggatctctgaacgtgaccctggagcacccactgttcatcggcggcatgtgccagaactgtaaaaactgttttctggagtgtgcctatcaatacgacgatgacggctaccagagctactgcaccatctgttgcggcggaagagaggtgctgatgtgtggaaataacaactgctgccggtgcttctgcgtggaatgcgtggacctgctggtgggccccggcgccgcccaggccgctattaaggaagatccttggaactgctacatgtgcggccacaagggcacatacggcctgctgagacggagagaggactggcctagcagactgcagatgttcttcgccaataaccacgaccaggagttcgacccccctaaggtgtaccctcccgtccccgccgagaagagaaagcccatccgggtcctgagcctgttcgatggcatcgccaccggtctgctggtgctgaaggacctgggcatccaggtggataggtacattgcctccgaggtgtgcgaggactccatcaccgtgggaatggtgcgtcatcagggcaagatcatgtacgtgggcgacgtgcggagcgtgacacagaagcatatccaggagtggggccctttcgacctggtgatcggcggcagcccttgcaatgacctgagcatcgtgaacccagcccggaagggcctgtacgagggaaccggcagactgttcttcgagttttacagactgctgcacgacgcccggcctaaggaaggcgacgaccggcccttcttttggctgttcgagaatgtggtggccatgggagtcagcgacaagcgggatattagccggttcctggagagcaaccccgtgatgatcgatgccaaggaagtgagcgccgcccaccgggccagatacttctggggcaatctgcctggcatgaacagacccctggccagcaccgtgaacgacaagctggagctgcaggagtgcctggagcacggccggatcgccaagttcagcaaggtgagaaccatcaccacccgaagcaacagcatcaaacaaggcaaggaccagcactttcctgtgttcatgaacgagaaggaggacatcctgtggtgtaccgagatggagagagtgttcgggttcccagtccactacacagatgtcagcaacatgtctagactggccagacagagactgctgggaagaagctggtccgtccctgtgatcagacacctgttcgcccctctgaaggagtacttcgcctgcgtgagcagcggcaacagcaacgccaacagccggggccccagcttctctagcggcctggtgccactgtccctgagagggagccacatgggccccatggagatctacaaaaccgtgagcgcctggaagcggcagcctgtgcgcgtgctgagcctgtttcggaatatcgataaagtcctgaaaagcctgggattcctggagagcggctctggctccggcggtggcaccctgaagtacgtggaggatgtgacaaacgtggtcagacgggatgtggagaagtggggccccttcgatctggtgtacggcagcacccaacccctgggcagctcttgtgaccggtgccctggctggtacatgtttcagttccaccggatcctgcagtacgccctgccgagacaggagtcccagcggccattcttttggattttcatggacaacttgctgctgaccgaggatgaccaggaaactaccactcggttcctgcagaccgaagccgtgaccctgcaggacgtgagaggccgggactaccagaacgccatgcgggtgtggtccaacatccctggactgaaaagcaagcacgcacctctgacccctaaagaagaggagtacctgcaggcccaggtgcggagcagaagcaagctggacgcccctaaggtggatctgctggtgaagaattgcctcctgcccctgagagagtacttcaagtatttcagccagaatagtctgcccctgggaggcagcggcggcggcgccgagggccacgtgaccttcgaggacgtggccgtgtacttcagctgggaggagtggggcctgctggacgaggcccagaggctgctgtacagggacgtgatgctggagaacctggccctgatggccagcctgggcctggccagcagcaggacccacgagatcacccagctggagtggtggagggagcccttcctgcccccctgcggcgtggtgaccgccgccatgcccaggggctggaggaggggcggcccaagcagcggcgcccctcctcccagcggcggcagcccagccggctccccaacctctaccgaggagggcacctctgagtccgccacccccgagagcggccctggcacctccaccgagcccagcgagggcagcgcacccggcagccctgccggcagccccacctccacagaggagggaaccagcaccgagcccagcgaaggcagcgccccaggcaccagcaccgagcctagtgagcaggagattaaacggatcaacaagatcagaagaagacttgtgaaagacagcaacaccaagaaggccggcaagacaggccccatgaaaaccctgctggttagagtgatgacacccgatctgagagagcggctggaaaacctgagaaagaagcctgaaaatatcccccagcccatcagcaatacatctagagccaacctgaataagctgctgaccgattacaccgaaatgaagaaggcgatcctgcatgtgtactgggaagagttccagaaggaccctgtgggcctgatgagccgggtggcccagcctgccagcaagaagatcgatcagaacaagctgaaacctgagatggacgagaagggcaacctgaccaccgccggctttgcctgctctcagtgtggccagcccctgttcgtgtacaagctggagcaggtgtctgagaagggcaaggcttacaccaactacttcggacggtgcaatgtggccgagcacgaaaagctgatcctgctggcccagctgaagcccgagaaggatagcgacgaagccgtgacatatagcctgggaaagtttgggcagagggccctggatttctacagcattcatgtgaccaaggagtccacccaccccgtgaagcccctggcccagatcgccggaaacagatacgcctccggacctgtgggaaaggccctgagcgacgcatgtatgggcacaatcgcctccttcctgtctaagtaccaggacatcatcatcgaacaccagaaggtggtgaagggcaaccagaagagactggagagcctgcgggagctggccggcaaggaaaacctggaataccctagcgtgaccctgccacctcagcctcacaccaaggagggcgttgatgcctacaacgaagtgatcgcccgggtgcgaatgtgggtgaacctgaacctgtggcagaagctgaagctaagcagagatgatgccaagcctctgctgagactgaagggattcccttcctttcctctggtcgagagacaggccaacgaagtggactggtgggacatggtgtgtaacgtgaagaagctgatcaacgagaaaaaggaggatggcaaggtgttttggcagaatctggctggctacaagagacaggaagccctgagaccatacctgagcagcgaggaagatcggaagaagggaaagaaattcgctcggtaccagctgggcgacctgctgctgcacctggaaaagaagcacggcgaggactggggaaaggtgtacgacgaggcctgggagcggattgacaagaaagtggaaggcctgagcaagcacatcaagctggaagaggaacggagaagcgaggacgcccagagcaaggccgccctgaccgactggctgcgggctaaggccagcttcgtgatcgagggcctgaaggaggccgacaaggacgagttctgcagatgcgagctgaagctgcagaagtggtacggggacctgcggggaaagcccttcgccatcgaagccgagaacagcatcctggacatcagcggcttcagcaagcagtacaactgtgccttcatctggcagaaggacggcgtgaagaagctgaacctgtacctgatcatcaactacttcaagggcggcaagctgcggttcaagaagatcaaacctgaagccttcgaagccaacagattctacaccgtgatcaacaaaaagagcggcgagatcgtgcccatggaggtgaacttcaacttcgacgaccccaacctgatcatcctgcctctggcctttggcaagagacagggcagagaattcatctggaacgacctgctgtccctggaaaccggcagcctgaagctggccaacggaagagtgatcgagaagacactgtacaacagaagaacccggcaggatgagcctgccctgttcgtggccctgaccttcgagcggcgggaggtcctggactcctccaatatcaaaccaatgaacctgatcggcgtggcaagaggcgaaaacatccccgccgtgatcgccctgaccgaccccgagggctgcccactgagccggtttaaggatagcctgggaaacccaacccacatcctgagaatcggcgagagctataaggagaagcagcggaccatccaggccaagaaggaggtggagcagcggagagccggcggctacagccggaagtacgccagcaaagccaagaatctggcagacgatatggtgagaaacaccgctagagatctgctgtactacgccgtgacccaggatgccatgctgatcttcgccaacctgagccggggcttcggccggcagggcaagcggaccttcatggccgagagacagtacacacggatggaggactggctgaccgccaagctggcctacgagggcctgagcaagacctacctgtccaagacactggcccagtacacctccaagacatgcagcaactgtgggtttaccatcaccagcgccgactacgacagggtgctggagaagctgaagaagacagcaacaggctggatgaccacaattaacggcaaggagctgaaggtggagggccagattacctactacaacagatacaagagacagaacgtagtcaaggacctgtccgtcgagctggatagactgagcgaagaatctgtgaacaacgacatctcctcctggacaaagggcagaagcggagaagctctgagcctcctgaagaaaagattctcccatagacccgtgcaggagaagttcgtgtgcctgaactgcggcttcgagacacacgcagccgagcaagccgccctgaacatcgccagatcctggctgttcctgcggagccaggagtacaagaaataccagacaaacaagacaaccggcaacaccgataagagagccttcgtcgagacctggcagtccttttaccggaagaagcttaaggaggtgtggaaacctgccgtgcggtctggcggatctggcggaggctccaccagccccaagaaaaagagaaaagtctaagctgccttctgcggggcttgccttctggccatgcccttcttctctcccttgcacctgtacctcttggtctttgaataaagcctgagtaggaaggctagcaaaaaaaaaaaaaaaaaaaaaaaaaaaaaaaaaaaaaaaaaaaaaaaaaaaaaaaaaaaaaaaaaaaaaaaaaaaaaaaa

SEQ ID NO: 12561 - RNA, 5785 nt, synthetic construct
  source 1..5785: mol_type = other RNA
aggaaataagagagaaaagaagagtaagaagaaatataagagccaccatggcccctaagaagaagcgtaaagtgagccggatggaacgcctcgtctacgaggtgcggcagaagtgcagaaacatcgaggacatctgcatctcctgcggatctctgaacgtgaccctggagcacccactgttcatcggcggcatgtgccagaactgtaaaaactgttttctggagtgtgcctatcaatacgacgatgacggctaccagagctactgcaccatctgttgcggcggaagagaggtgctgatgtgtggaaataacaactgctgccggtgcttctgcgtggaatgcgtggacctgctggtgggccccggcgccgcccaggccgctattaaggaagatccttggaactgctacatgtgcggccacaagggcacatacggcctgctgagacggagagaggactggcctagcagactgcagatgttcttcgccaataaccacgaccaggagttcgacccccctaaggtgtaccctcccgtccccgccgagaagagaaagcccatccgggtcctgagcctgttcgatggcatcgccaccggtctgctggtgctgaaggacctgggcatccaggtggataggtacattgcctccgaggtgtgcgaggactccatcaccgtgggaatggtgcgtcatcagggcaagatcatgtacgtgggcgacgtgcggagcgtgacacagaagcatatccaggagtggggccctttcgacctggtgatcggcggcagcccttgcaatgacctgagcatcgtgaacccagcccggaagggcctgtacgagggaaccggcagactgttcttcgagttttacagactgctgcacgacgcccggcctaaggaaggcgacgaccggcccttcttttggctgttcgagaatgtggtggccatgggagtcagcgacaagcgggatattagccggttcctggagagcaaccccgtgatgatcgatgccaaggaagtgagcgccgcccaccgggccagatacttctggggcaatctgcctggcatgaacagacccctggccagcaccgtgaacgacaagctggagctgcaggagtgcctggagcacggccggatcgccaagttcagcaaggtgagaaccatcaccacccgaagcaacagcatcaaacaaggcaaggaccagcactttcctgtgttcatgaacgagaaggaggacatcctgtggtgtaccgagatggagagagtgttcgggttcccagtccactacacagatgtcagcaacatgtctagactggccagacagagactgctgggaagaagctggtccgtccctgtgatcagacacctgttcgcccctctgaaggagtacttcgcctgcgtgagcagcggcaacagcaacgccaacagccggggccccagcttctctagcggcctggtgccactgtccctgagagggagccacatgggccccatggagatctacaaaaccgtgagcgcctggaagcggcagcctgtgcgcgtgctgagcctgtttcggaatatcgataaagtcctgaaaagcctgggattcctggagagcggctctggctccggcggtggcaccctgaagtacgtggaggatgtgacaaacgtggtcagacgggatgtggagaagtggggccccttcgatctggtgtacggcagcacccaacccctgggcagctcttgtgaccggtgccctggctggtacatgtttcagttccaccggatcctgcagtacgccctgccgagacaggagtcccagcggccattcttttggattttcatggacaacttgctgctgaccgaggatgaccaggaaactaccactcggttcctgcagaccgaagccgtgaccctgcaggacgtgagaggccgggactaccagaacgccatgcgggtgtggtccaacatccctggactgaaaagcaagcacgcacctctgacccctaaagaagaggagtacctgcaggcccaggtgcggagcagaagcaagctggacgcccctaaggtggatctgctggtgaagaattgcctcctgcccctgagagagtacttcaagtatttcagccagaatagtctgcccctgggaggcagcggcggcggcccccaggacctggtgaccttcaaggacgtggccatcgacttcagccaggaggagtgggagtggctgaaccccgcccagaggagcctgtacaggagcatgatgctggagaactaccagagcctggtgagcgtgggcctgtgcgtgagcaagccctacgtgatcagcctgctggagcagggcaaggagccctgggagatgaagagcgagatgaggaggacccccttccccgactgggagagcgtgggcggcccaagcagcggcgcccctcctcccagcggcggcagcccagccggctccccaacctctaccgaggagggcacctctgagtccgccacccccgagagcggccctggcacctccaccgagcccagcgagggcagcgcacccggcagccctgccggcagccccacctccacagaggagggaaccagcaccgagcccagcgaaggcagcgccccaggcaccagcaccgagcctagtgagcaggagattaaacggatcaacaagatcagaagaagacttgtgaaagacagcaacaccaagaaggccggcaagacaggccccatgaaaaccctgctggttagagtgatgacacccgatctgagagagcggctggaaaacctgagaaagaagcctgaaaatatcccccagcccatcagcaatacatctagagccaacctgaataagctgctgaccgattacaccgaaatgaagaaggcgatcctgcatgtgtactgggaagagttccagaaggaccctgtgggcctgatgagccgggtggcccagcctgccagcaagaagatcgatcagaacaagctgaaacctgagatggacgagaagggcaacctgaccaccgccggctttgcctgctctcagtgtggccagcccctgttcgtgtacaagctggagcaggtgtctgagaagggcaaggcttacaccaactacttcggacggtgcaatgtggccgagcacgaaaagctgatcctgctggcccagctgaagcccgagaaggatagcgacgaagccgtgacatatagcctgggaaagtttgggcagagggccctggatttctacagcattcatgtgaccaaggagtccacccaccccgtgaagcccctggcccagatcgccggaaacagatacgcctccggacctgtgggaaaggccctgagcgacgcatgtatgggcacaatcgcctccttcctgtctaagtaccaggacatcatcatcgaacaccagaaggtggtgaagggcaaccagaagagactggagagcctgcgggagctggccggcaaggaaaacctggaataccctagcgtgaccctgccacctcagcctcacaccaaggagggcgttgatgcctacaacgaagtgatcgcccgggtgcgaatgtgggtgaacctgaacctgtggcagaagctgaagctaagcagagatgatgccaagcctctgctgagactgaagggattcccttcctttcctctggtcgagagacaggccaacgaagtggactggtgggacatggtgtgtaacgtgaagaagctgatcaacgagaaaaaggaggatggcaaggtgttttggcagaatctggctggctacaagagacaggaagccctgagaccatacctgagcagcgaggaagatcggaagaagggaaagaaattcgctcggtaccagctgggcgacctgctgctgcacctggaaaagaagcacggcgaggactggggaaaggtgtacgacgaggcctgggagcggattgacaagaaagtggaaggcctgagcaagcacatcaagctggaagaggaacggagaagcgaggacgcccagagcaaggccgccctgaccgactggctgcgggctaaggccagcttcgtgatcgagggcctgaaggaggccgacaaggacgagttctgcagatgcgagctgaagctgcagaagtggtacggggacctgcggggaaagcccttcgccatcgaagccgagaacagcatcctggacatcagcggcttcagcaagcagtacaactgtgccttcatctggcagaaggacggcgtgaagaagctgaacctgtacctgatcatcaactacttcaagggcggcaagctgcggttcaagaagatcaaacctgaagccttcgaagccaacagattctacaccgtgatcaacaaaaagagcggcgagatcgtgcccatggaggtgaacttcaacttcgacgaccccaacctgatcatcctgcctctggcctttggcaagagacagggcagagaattcatctggaacgacctgctgtccctggaaaccggcagcctgaagctggccaacggaagagtgatcgagaagacactgtacaacagaagaacccggcaggatgagcctgccctgttcgtggccctgaccttcgagcggcgggaggtcctggactcctccaatatcaaaccaatgaacctgatcggcgtggcaagaggcgaaaacatccccgccgtgatcgccctgaccgaccccgagggctgcccactgagccggtttaaggatagcctgggaaacccaacccacatcctgagaatcggcgagagctataaggagaagcagcggaccatccaggccaagaaggaggtggagcagcggagagccggcggctacagccggaagtacgccagcaaagccaagaatctggcagacgatatggtgagaaacaccgctagagatctgctgtactacgccgtgacccaggatgccatgctgatcttcgccaacctgagccggggcttcggccggcagggcaagcggaccttcatggccgagagacagtacacacggatggaggactggctgaccgccaagctggcctacgagggcctgagcaagacctacctgtccaagacactggcccagtacacctccaagacatgcagcaactgtgggtttaccatcaccagcgccgactacgacagggtgctggagaagctgaagaagacagcaacaggctggatgaccacaattaacggcaaggagctgaaggtggagggccagattacctactacaacagatacaagagacagaacgtagtcaaggacctgtccgtcgagctggatagactgagcgaagaatctgtgaacaacgacatctcctcctggacaaagggcagaagcggagaagctctgagcctcctgaagaaaagattctcccatagacccgtgcaggagaagttcgtgtgcctgaactgcggcttcgagacacacgcagccgagcaagccgccctgaacatcgccagatcctggctgttcctgcggagccaggagtacaagaaataccagacaaacaagacaaccggcaacaccgataagagagccttcgtcgagacctggcagtccttttaccggaagaagcttaaggaggtgtggaaacctgccgtgcggtctggcggatctggcggaggctccaccagccccaagaaaaagagaaaagtctaagctgccttctgcggggcttgccttctggccatgcccttcttctctcccttgcacctgtacctcttggtctttgaataaagcctgagtaggaaggctagcaaaaaaaaaaaaaaaaaaaaaaaaaaaaaaaaaaaaaaaaaaaaaaaaaaaaaaaaaaaaaaaaaaaaaaaaaaaaaaaa

SEQ ID NO: 12562 - RNA, 5785 nt, synthetic construct
  source 1..5785: mol_type = other RNA
aggaaataagagagaaaagaagagtaagaagaaatataagagccaccatggcccctaagaagaagcgtaaagtgagccggatggaacgcctcgtctacgaggtgcggcagaagtgcagaaacatcgaggacatctgcatctcctgcggatctctgaacgtgaccctggagcacccactgttcatcggcggcatgtgccagaactgtaaaaactgttttctggagtgtgcctatcaatacgacgatgacggctaccagagctactgcaccatctgttgcggcggaagagaggtgctgatgtgtggaaataacaactgctgccggtgcttctgcgtggaatgcgtggacctgctggtgggccccggcgccgcccaggccgctattaaggaagatccttggaactgctacatgtgcggccacaagggcacatacggcctgctgagacggagagaggactggcctagcagactgcagatgttcttcgccaataaccacgaccaggagttcgacccccctaaggtgtaccctcccgtccccgccgagaagagaaagcccatccgggtcctgagcctgttcgatggcatcgccaccggtctgctggtgctgaaggacctgggcatccaggtggataggtacattgcctccgaggtgtgcgaggactccatcaccgtgggaatggtgcgtcatcagggcaagatcatgtacgtgggcgacgtgcggagcgtgacacagaagcatatccaggagtggggccctttcgacctggtgatcggcggcagcccttgcaatgacctgagcatcgtgaacccagcccggaagggcctgtacgagggaaccggcagactgttcttcgagttttacagactgctgcacgacgcccggcctaaggaaggcgacgaccggcccttcttttggctgttcgagaatgtggtggccatgggagtcagcgacaagcgggatattagccggttcctggagagcaaccccgtgatgatcgatgccaaggaagtgagcgccgcccaccgggccagatacttctggggcaatctgcctggcatgaacagacccctggccagcaccgtgaacgacaagctggagctgcaggagtgcctggagcacggccggatcgccaagttcagcaaggtgagaaccatcaccacccgaagcaacagcatcaaacaaggcaaggaccagcactttcctgtgttcatgaacgagaaggaggacatcctgtggtgtaccgagatggagagagtgttcgggttcccagtccactacacagatgtcagcaacatgtctagactggccagacagagactgctgggaagaagctggtccgtccctgtgatcagacacctgttcgcccctctgaaggagtacttcgcctgcgtgagcagcggcaacagcaacgccaacagccggggccccagcttctctagcggcctggtgccactgtccctgagagggagccacatgggccccatggagatctacaaaaccgtgagcgcctggaagcggcagcctgtgcgcgtgctgagcctgtttcggaatatcgataaagtcctgaaaagcctgggattcctggagagcggctctggctccggcggtggcaccctgaagtacgtggaggatgtgacaaacgtggtcagacgggatgtggagaagtggggccccttcgatctggtgtacggcagcacccaacccctgggcagctcttgtgaccggtgccctggctggtacatgtttcagttccaccggatcctgcagtacgccctgccgagacaggagtcccagcggccattcttttggattttcatggacaacttgctgctgaccgaggatgaccaggaaactaccactcggttcctgcagaccgaagccgtgaccctgcaggacgtgagaggccgggactaccagaacgccatgcgggtgtggtccaacatccctggactgaaaagcaagcacgcacctctgacccctaaagaagaggagtacctgcaggcccaggtgcggagcagaagcaagctggacgcccctaaggtggatctgctggtgaagaattgcctcctgcccctgagagagtacttcaagtatttcagccagaatagtctgcccctgggaggcagcggcggcggcttccagggcagcatcagcttcaaggacgtgaccgtgggcttcagccaggaggagtggcagcacctgaaccccagccagagggccctgtacagggacgtgatgctggagaactacagcaacctggtgagcgtgggctactgcgtgcacaagcccgaggtgatcagcaggctggagcagggcgaggagccctggaggctggaggaggagttccccagccagagcttcagcgaggtgtggaccgccggcggcccaagcagcggcgcccctcctcccagcggcggcagcccagccggctccccaacctctaccgaggagggcacctctgagtccgccacccccgagagcggccctggcacctccaccgagcccagcgagggcagcgcacccggcagccctgccggcagccccacctccacagaggagggaaccagcaccgagcccagcgaaggcagcgccccaggcaccagcaccgagcctagtgagcaggagattaaacggatcaacaagatcagaagaagacttgtgaaagacagcaacaccaagaaggccggcaagacaggccccatgaaaaccctgctggttagagtgatgacacccgatctgagagagcggctggaaaacctgagaaagaagcctgaaaatatcccccagcccatcagcaatacatctagagccaacctgaataagctgctgaccgattacaccgaaatgaagaaggcgatcctgcatgtgtactgggaagagttccagaaggaccctgtgggcctgatgagccgggtggcccagcctgccagcaagaagatcgatcagaacaagctgaaacctgagatggacgagaagggcaacctgaccaccgccggctttgcctgctctcagtgtggccagcccctgttcgtgtacaagctggagcaggtgtctgagaagggcaaggcttacaccaactacttcggacggtgcaatgtggccgagcacgaaaagctgatcctgctggcccagctgaagcccgagaaggatagcgacgaagccgtgacatatagcctgggaaagtttgggcagagggccctggatttctacagcattcatgtgaccaaggagtccacccaccccgtgaagcccctggcccagatcgccggaaacagatacgcctccggacctgtgggaaaggccctgagcgacgcatgtatgggcacaatcgcctccttcctgtctaagtaccaggacatcatcatcgaacaccagaaggtggtgaagggcaaccagaagagactggagagcctgcgggagctggccggcaaggaaaacctggaataccctagcgtgaccctgccacctcagcctcacaccaaggagggcgttgatgcctacaacgaagtgatcgcccgggtgcgaatgtgggtgaacctgaacctgtggcagaagctgaagctaagcagagatgatgccaagcctctgctgagactgaagggattcccttcctttcctctggtcgagagacaggccaacgaagtggactggtgggacatggtgtgtaacgtgaagaagctgatcaacgagaaaaaggaggatggcaaggtgttttggcagaatctggctggctacaagagacaggaagccctgagaccatacctgagcagcgaggaagatcggaagaagggaaagaaattcgctcggtaccagctgggcgacctgctgctgcacctggaaaagaagcacggcgaggactggggaaaggtgtacgacgaggcctgggagcggattgacaagaaagtggaaggcctgagcaagcacatcaagctggaagaggaacggagaagcgaggacgcccagagcaaggccgccctgaccgactggctgcgggctaaggccagcttcgtgatcgagggcctgaaggaggccgacaaggacgagttctgcagatgcgagctgaagctgcagaagtggtacggggacctgcggggaaagcccttcgccatcgaagccgagaacagcatcctggacatcagcggcttcagcaagcagtacaactgtgccttcatctggcagaaggacggcgtgaagaagctgaacctgtacctgatcatcaactacttcaagggcggcaagctgcggttcaagaagatcaaacctgaagccttcgaagccaacagattctacaccgtgatcaacaaaaagagcggcgagatcgtgcccatggaggtgaacttcaacttcgacgaccccaacctgatcatcctgcctctggcctttggcaagagacagggcagagaattcatctggaacgacctgctgtccctggaaaccggcagcctgaagctggccaacggaagagtgatcgagaagacactgtacaacagaagaacccggcaggatgagcctgccctgttcgtggccctgaccttcgagcggcgggaggtcctggactcctccaatatcaaaccaatgaacctgatcggcgtggcaagaggcgaaaacatccccgccgtgatcgccctgaccgaccccgagggctgcccactgagccggtttaaggatagcctgggaaacccaacccacatcctgagaatcggcgagagctataaggagaagcagcggaccatccaggccaagaaggaggtggagcagcggagagccggcggctacagccggaagtacgccagcaaagccaagaatctggcagacgatatggtgagaaacaccgctagagatctgctgtactacgccgtgacccaggatgccatgctgatcttcgccaacctgagccggggcttcggccggcagggcaagcggaccttcatggccgagagacagtacacacggatggaggactggctgaccgccaagctggcctacgagggcctgagcaagacctacctgtccaagacactggcccagtacacctccaagacatgcagcaactgtgggtttaccatcaccagcgccgactacgacagggtgctggagaagctgaagaagacagcaacaggctggatgaccacaattaacggcaaggagctgaaggtggagggccagattacctactacaacagatacaagagacagaacgtagtcaaggacctgtccgtcgagctggatagactgagcgaagaatctgtgaacaacgacatctcctcctggacaaagggcagaagcggagaagctctgagcctcctgaagaaaagattctcccatagacccgtgcaggagaagttcgtgtgcctgaactgcggcttcgagacacacgcagccgagcaagccgccctgaacatcgccagatcctggctgttcctgcggagccaggagtacaagaaataccagacaaacaagacaaccggcaacaccgataagagagccttcgtcgagacctggcagtccttttaccggaagaagcttaaggaggtgtggaaacctgccgtgcggtctggcggatctggcggaggctccaccagccccaagaaaaagagaaaagtctaagctgccttctgcggggcttgccttctggccatgcccttcttctctcccttgcacctgtacctcttggtctttgaataaagcctgagtaggaaggctagcaaaaaaaaaaaaaaaaaaaaaaaaaaaaaaaaaaaaaaaaaaaaaaaaaaaaaaaaaaaaaaaaaaaaaaaaaaaaaaaa

SEQ ID NO: 12563 - RNA, 5785 nt, synthetic construct
  source 1..5785: mol_type = other RNA
aggaaataagagagaaaagaagagtaagaagaaatataagagccaccatggcccctaagaagaagcgtaaagtgagccggatggaacgcctcgtctacgaggtgcggcagaagtgcagaaacatcgaggacatctgcatctcctgcggatctctgaacgtgaccctggagcacccactgttcatcggcggcatgtgccagaactgtaaaaactgttttctggagtgtgcctatcaatacgacgatgacggctaccagagctactgcaccatctgttgcggcggaagagaggtgctgatgtgtggaaataacaactgctgccggtgcttctgcgtggaatgcgtggacctgctggtgggccccggcgccgcccaggccgctattaaggaagatccttggaactgctacatgtgcggccacaagggcacatacggcctgctgagacggagagaggactggcctagcagactgcagatgttcttcgccaataaccacgaccaggagttcgacccccctaaggtgtaccctcccgtccccgccgagaagagaaagcccatccgggtcctgagcctgttcgatggcatcgccaccggtctgctggtgctgaaggacctgggcatccaggtggataggtacattgcctccgaggtgtgcgaggactccatcaccgtgggaatggtgcgtcatcagggcaagatcatgtacgtgggcgacgtgcggagcgtgacacagaagcatatccaggagtggggccctttcgacctggtgatcggcggcagcccttgcaatgacctgagcatcgtgaacccagcccggaagggcctgtacgagggaaccggcagactgttcttcgagttttacagactgctgcacgacgcccggcctaaggaaggcgacgaccggcccttcttttggctgttcgagaatgtggtggccatgggagtcagcgacaagcgggatattagccggttcctggagagcaaccccgtgatgatcgatgccaaggaagtgagcgccgcccaccgggccagatacttctggggcaatctgcctggcatgaacagacccctggccagcaccgtgaacgacaagctggagctgcaggagtgcctggagcacggccggatcgccaagttcagcaaggtgagaaccatcaccacccgaagcaacagcatcaaacaaggcaaggaccagcactttcctgtgttcatgaacgagaaggaggacatcctgtggtgtaccgagatggagagagtgttcgggttcccagtccactacacagatgtcagcaacatgtctagactggccagacagagactgctgggaagaagctggtccgtccctgtgatcagacacctgttcgcccctctgaaggagtacttcgcctgcgtgagcagcggcaacagcaacgccaacagccggggccccagcttctctagcggcctggtgccactgtccctgagagggagccacatgggccccatggagatctacaaaaccgtgagcgcctggaagcggcagcctgtgcgcgtgctgagcctgtttcggaatatcgataaagtcctgaaaagcctgggattcctggagagcggctctggctccggcggtggcaccctgaagtacgtggaggatgtgacaaacgtggtcagacgggatgtggagaagtggggccccttcgatctggtgtacggcagcacccaacccctgggcagctcttgtgaccggtgccctggctggtacatgtttcagttccaccggatcctgcagtacgccctgccgagacaggagtcccagcggccattcttttggattttcatggacaacttgctgctgaccgaggatgaccaggaaactaccactcggttcctgcagaccgaagccgtgaccctgcaggacgtgagaggccgggactaccagaacgccatgcgggtgtggtccaacatccctggactgaaaagcaagcacgcacctctgacccctaaagaagaggagtacctgcaggcccaggtgcggagcagaagcaagctggacgcccctaaggtggatctgctggtgaagaattgcctcctgcccctgagagagtacttcaagtatttcagccagaatagtctgcccctgggaggcagcggcggcggcacccagcccgacgaggacctgcacctgcaggtggaggagacccagctggtgaaggagagcgtgaccttcaaggacgtggccatcgacttcaccctggaggagtggaggctgatggaccccacccagaggaacctgcacaaggacgtgatgctggagaactacaggaacctggtgagcctgggcctggccgtgagcaagcccgacatgatcagccacctggagaacggcaagggcccctgggtgggcggcccaagcagcggcgcccctcctcccagcggcggcagcccagccggctccccaacctctaccgaggagggcacctctgagtccgccacccccgagagcggccctggcacctccaccgagcccagcgagggcagcgcacccggcagccctgccggcagccccacctccacagaggagggaaccagcaccgagcccagcgaaggcagcgccccaggcaccagcaccgagcctagtgagcaggagattaaacggatcaacaagatcagaagaagacttgtgaaagacagcaacaccaagaaggccggcaagacaggccccatgaaaaccctgctggttagagtgatgacacccgatctgagagagcggctggaaaacctgagaaagaagcctgaaaatatcccccagcccatcagcaatacatctagagccaacctgaataagctgctgaccgattacaccgaaatgaagaaggcgatcctgcatgtgtactgggaagagttccagaaggaccctgtgggcctgatgagccgggtggcccagcctgccagcaagaagatcgatcagaacaagctgaaacctgagatggacgagaagggcaacctgaccaccgccggctttgcctgctctcagtgtggccagcccctgttcgtgtacaagctggagcaggtgtctgagaagggcaaggcttacaccaactacttcggacggtgcaatgtggccgagcacgaaaagctgatcctgctggcccagctgaagcccgagaaggatagcgacgaagccgtgacatatagcctgggaaagtttgggcagagggccctggatttctacagcattcatgtgaccaaggagtccacccaccccgtgaagcccctggcccagatcgccggaaacagatacgcctccggacctgtgggaaaggccctgagcgacgcatgtatgggcacaatcgcctccttcctgtctaagtaccaggacatcatcatcgaacaccagaaggtggtgaagggcaaccagaagagactggagagcctgcgggagctggccggcaaggaaaacctggaataccctagcgtgaccctgccacctcagcctcacaccaaggagggcgttgatgcctacaacgaagtgatcgcccgggtgcgaatgtgggtgaacctgaacctgtggcagaagctgaagctaagcagagatgatgccaagcctctgctgagactgaagggattcccttcctttcctctggtcgagagacaggccaacgaagtggactggtgggacatggtgtgtaacgtgaagaagctgatcaacgagaaaaaggaggatggcaaggtgttttggcagaatctggctggctacaagagacaggaagccctgagaccatacctgagcagcgaggaagatcggaagaagggaaagaaattcgctcggtaccagctgggcgacctgctgctgcacctggaaaagaagcacggcgaggactggggaaaggtgtacgacgaggcctgggagcggattgacaagaaagtggaaggcctgagcaagcacatcaagctggaagaggaacggagaagcgaggacgcccagagcaaggccgccctgaccgactggctgcgggctaaggccagcttcgtgatcgagggcctgaaggaggccgacaaggacgagttctgcagatgcgagctgaagctgcagaagtggtacggggacctgcggggaaagcccttcgccatcgaagccgagaacagcatcctggacatcagcggcttcagcaagcagtacaactgtgccttcatctggcagaaggacggcgtgaagaagctgaacctgtacctgatcatcaactacttcaagggcggcaagctgcggttcaagaagatcaaacctgaagccttcgaagccaacagattctacaccgtgatcaacaaaaagagcggcgagatcgtgcccatggaggtgaacttcaacttcgacgaccccaacctgatcatcctgcctctggcctttggcaagagacagggcagagaattcatctggaacgacctgctgtccctggaaaccggcagcctgaagctggccaacggaagagtgatcgagaagacactgtacaacagaagaacccggcaggatgagcctgccctgttcgtggccctgaccttcgagcggcgggaggtcctggactcctccaatatcaaaccaatgaacctgatcggcgtggcaagaggcgaaaacatccccgccgtgatcgccctgaccgaccccgagggctgcccactgagccggtttaaggatagcctgggaaacccaacccacatcctgagaatcggcgagagctataaggagaagcagcggaccatccaggccaagaaggaggtggagcagcggagagccggcggctacagccggaagtacgccagcaaagccaagaatctggcagacgatatggtgagaaacaccgctagagatctgctgtactacgccgtgacccaggatgccatgctgatcttcgccaacctgagccggggcttcggccggcagggcaagcggaccttcatggccgagagacagtacacacggatggaggactggctgaccgccaagctggcctacgagggcctgagcaagacctacctgtccaagacactggcccagtacacctccaagacatgcagcaactgtgggtttaccatcaccagcgccgactacgacagggtgctggagaagctgaagaagacagcaacaggctggatgaccacaattaacggcaaggagctgaaggtggagggccagattacctactacaacagatacaagagacagaacgtagtcaaggacctgtccgtcgagctggatagactgagcgaagaatctgtgaacaacgacatctcctcctggacaaagggcagaagcggagaagctctgagcctcctgaagaaaagattctcccatagacccgtgcaggagaagttcgtgtgcctgaactgcggcttcgagacacacgcagccgagcaagccgccctgaacatcgccagatcctggctgttcctgcggagccaggagtacaagaaataccagacaaacaagacaaccggcaacaccgataagagagccttcgtcgagacctggcagtccttttaccggaagaagcttaaggaggtgtggaaacctgccgtgcggtctggcggatctggcggaggctccaccagccccaagaaaaagagaaaagtctaagctgccttctgcggggcttgccttctggccatgcccttcttctctcccttgcacctgtacctcttggtctttgaataaagcctgagtaggaaggctagcaaaaaaaaaaaaaaaaaaaaaaaaaaaaaaaaaaaaaaaaaaaaaaaaaaaaaaaaaaaaaaaaaaaaaaaaaaaaaaaa

SEQ ID NO: 12564 - RNA, 5785 nt, synthetic construct
  source 1..5785: mol_type = other RNA
aggaaataagagagaaaagaagagtaagaagaaatataagagccaccatggcccctaagaagaagcgtaaagtgagccggatggaacgcctcgtctacgaggtgcggcagaagtgcagaaacatcgaggacatctgcatctcctgcggatctctgaacgtgaccctggagcacccactgttcatcggcggcatgtgccagaactgtaaaaactgttttctggagtgtgcctatcaatacgacgatgacggctaccagagctactgcaccatctgttgcggcggaagagaggtgctgatgtgtggaaataacaactgctgccggtgcttctgcgtggaatgcgtggacctgctggtgggccccggcgccgcccaggccgctattaaggaagatccttggaactgctacatgtgcggccacaagggcacatacggcctgctgagacggagagaggactggcctagcagactgcagatgttcttcgccaataaccacgaccaggagttcgacccccctaaggtgtaccctcccgtccccgccgagaagagaaagcccatccgggtcctgagcctgttcgatggcatcgccaccggtctgctggtgctgaaggacctgggcatccaggtggataggtacattgcctccgaggtgtgcgaggactccatcaccgtgggaatggtgcgtcatcagggcaagatcatgtacgtgggcgacgtgcggagcgtgacacagaagcatatccaggagtggggccctttcgacctggtgatcggcggcagcccttgcaatgacctgagcatcgtgaacccagcccggaagggcctgtacgagggaaccggcagactgttcttcgagttttacagactgctgcacgacgcccggcctaaggaaggcgacgaccggcccttcttttggctgttcgagaatgtggtggccatgggagtcagcgacaagcgggatattagccggttcctggagagcaaccccgtgatgatcgatgccaaggaagtgagcgccgcccaccgggccagatacttctggggcaatctgcctggcatgaacagacccctggccagcaccgtgaacgacaagctggagctgcaggagtgcctggagcacggccggatcgccaagttcagcaaggtgagaaccatcaccacccgaagcaacagcatcaaacaaggcaaggaccagcactttcctgtgttcatgaacgagaaggaggacatcctgtggtgtaccgagatggagagagtgttcgggttcccagtccactacacagatgtcagcaacatgtctagactggccagacagagactgctgggaagaagctggtccgtccctgtgatcagacacctgttcgcccctctgaaggagtacttcgcctgcgtgagcagcggcaacagcaacgccaacagccggggccccagcttctctagcggcctggtgccactgtccctgagagggagccacatgggccccatggagatctacaaaaccgtgagcgcctggaagcggcagcctgtgcgcgtgctgagcctgtttcggaatatcgataaagtcctgaaaagcctgggattcctggagagcggctctggctccggcggtggcaccctgaagtacgtggaggatgtgacaaacgtggtcagacgggatgtggagaagtggggccccttcgatctggtgtacggcagcacccaacccctgggcagctcttgtgaccggtgccctggctggtacatgtttcagttccaccggatcctgcagtacgccctgccgagacaggagtcccagcggccattcttttggattttcatggacaacttgctgctgaccgaggatgaccaggaaactaccactcggttcctgcagaccgaagccgtgaccctgcaggacgtgagaggccgggactaccagaacgccatgcgggtgtggtccaacatccctggactgaaaagcaagcacgcacctctgacccctaaagaagaggagtacctgcaggcccaggtgcggagcagaagcaagctggacgcccctaaggtggatctgctggtgaagaattgcctcctgcccctgagagagtacttcaagtatttcagccagaatagtctgcccctgggaggcagcggcggcggcgcccaggagttcgtgatgttcagggacgtggccgtgttcttcagccaggaggagtggggccacctggaccccgcccagagggccctgtacagggaggtgatgctggagaactacagcaacctggtgagcctgggcatcaggttcagcaagcccaaggtgatcagccagctgcagcagggcgaggacccctggatggtggacaggggcgtgccccagggcgcctgccagggctggaagagcctgggcggcccaagcagcggcgcccctcctcccagcggcggcagcccagccggctccccaacctctaccgaggagggcacctctgagtccgccacccccgagagcggccctggcacctccaccgagcccagcgagggcagcgcacccggcagccctgccggcagccccacctccacagaggagggaaccagcaccgagcccagcgaaggcagcgccccaggcaccagcaccgagcctagtgagcaggagattaaacggatcaacaagatcagaagaagacttgtgaaagacagcaacaccaagaaggccggcaagacaggccccatgaaaaccctgctggttagagtgatgacacccgatctgagagagcggctggaaaacctgagaaagaagcctgaaaatatcccccagcccatcagcaatacatctagagccaacctgaataagctgctgaccgattacaccgaaatgaagaaggcgatcctgcatgtgtactgggaagagttccagaaggaccctgtgggcctgatgagccgggtggcccagcctgccagcaagaagatcgatcagaacaagctgaaacctgagatggacgagaagggcaacctgaccaccgccggctttgcctgctctcagtgtggccagcccctgttcgtgtacaagctggagcaggtgtctgagaagggcaaggcttacaccaactacttcggacggtgcaatgtggccgagcacgaaaagctgatcctgctggcccagctgaagcccgagaaggatagcgacgaagccgtgacatatagcctgggaaagtttgggcagagggccctggatttctacagcattcatgtgaccaaggagtccacccaccccgtgaagcccctggcccagatcgccggaaacagatacgcctccggacctgtgggaaaggccctgagcgacgcatgtatgggcacaatcgcctccttcctgtctaagtaccaggacatcatcatcgaacaccagaaggtggtgaagggcaaccagaagagactggagagcctgcgggagctggccggcaaggaaaacctggaataccctagcgtgaccctgccacctcagcctcacaccaaggagggcgttgatgcctacaacgaagtgatcgcccgggtgcgaatgtgggtgaacctgaacctgtggcagaagctgaagctaagcagagatgatgccaagcctctgctgagactgaagggattcccttcctttcctctggtcgagagacaggccaacgaagtggactggtgggacatggtgtgtaacgtgaagaagctgatcaacgagaaaaaggaggatggcaaggtgttttggcagaatctggctggctacaagagacaggaagccctgagaccatacctgagcagcgaggaagatcggaagaagggaaagaaattcgctcggtaccagctgggcgacctgctgctgcacctggaaaagaagcacggcgaggactggggaaaggtgtacgacgaggcctgggagcggattgacaagaaagtggaaggcctgagcaagcacatcaagctggaagaggaacggagaagcgaggacgcccagagcaaggccgccctgaccgactggctgcgggctaaggccagcttcgtgatcgagggcctgaaggaggccgacaaggacgagttctgcagatgcgagctgaagctgcagaagtggtacggggacctgcggggaaagcccttcgccatcgaagccgagaacagcatcctggacatcagcggcttcagcaagcagtacaactgtgccttcatctggcagaaggacggcgtgaagaagctgaacctgtacctgatcatcaactacttcaagggcggcaagctgcggttcaagaagatcaaacctgaagccttcgaagccaacagattctacaccgtgatcaacaaaaagagcggcgagatcgtgcccatggaggtgaacttcaacttcgacgaccccaacctgatcatcctgcctctggcctttggcaagagacagggcagagaattcatctggaacgacctgctgtccctggaaaccggcagcctgaagctggccaacggaagagtgatcgagaagacactgtacaacagaagaacccggcaggatgagcctgccctgttcgtggccctgaccttcgagcggcgggaggtcctggactcctccaatatcaaaccaatgaacctgatcggcgtggcaagaggcgaaaacatccccgccgtgatcgccctgaccgaccccgagggctgcccactgagccggtttaaggatagcctgggaaacccaacccacatcctgagaatcggcgagagctataaggagaagcagcggaccatccaggccaagaaggaggtggagcagcggagagccggcggctacagccggaagtacgccagcaaagccaagaatctggcagacgatatggtgagaaacaccgctagagatctgctgtactacgccgtgacccaggatgccatgctgatcttcgccaacctgagccggggcttcggccggcagggcaagcggaccttcatggccgagagacagtacacacggatggaggactggctgaccgccaagctggcctacgagggcctgagcaagacctacctgtccaagacactggcccagtacacctccaagacatgcagcaactgtgggtttaccatcaccagcgccgactacgacagggtgctggagaagctgaagaagacagcaacaggctggatgaccacaattaacggcaaggagctgaaggtggagggccagattacctactacaacagatacaagagacagaacgtagtcaaggacctgtccgtcgagctggatagactgagcgaagaatctgtgaacaacgacatctcctcctggacaaagggcagaagcggagaagctctgagcctcctgaagaaaagattctcccatagacccgtgcaggagaagttcgtgtgcctgaactgcggcttcgagacacacgcagccgagcaagccgccctgaacatcgccagatcctggctgttcctgcggagccaggagtacaagaaataccagacaaacaagacaaccggcaacaccgataagagagccttcgtcgagacctggcagtccttttaccggaagaagcttaaggaggtgtggaaacctgccgtgcggtctggcggatctggcggaggctccaccagccccaagaaaaagagaaaagtctaagctgccttctgcggggcttgccttctggccatgcccttcttctctcccttgcacctgtacctcttggtctttgaataaagcctgagtaggaaggctagcaaaaaaaaaaaaaaaaaaaaaaaaaaaaaaaaaaaaaaaaaaaaaaaaaaaaaaaaaaaaaaaaaaaaaaaaaaaaaaaa

SEQ ID NO: 12565 - RNA, 5785 nt, synthetic construct
  source 1..5785: mol_type = other RNA
aggaaataagagagaaaagaagagtaagaagaaatataagagccaccatggcccctaagaagaagcgtaaagtgagccggatggaacgcctcgtctacgaggtgcggcagaagtgcagaaacatcgaggacatctgcatctcctgcggatctctgaacgtgaccctggagcacccactgttcatcggcggcatgtgccagaactgtaaaaactgttttctggagtgtgcctatcaatacgacgatgacggctaccagagctactgcaccatctgttgcggcggaagagaggtgctgatgtgtggaaataacaactgctgccggtgcttctgcgtggaatgcgtggacctgctggtgggccccggcgccgcccaggccgctattaaggaagatccttggaactgctacatgtgcggccacaagggcacatacggcctgctgagacggagagaggactggcctagcagactgcagatgttcttcgccaataaccacgaccaggagttcgacccccctaaggtgtaccctcccgtccccgccgagaagagaaagcccatccgggtcctgagcctgttcgatggcatcgccaccggtctgctggtgctgaaggacctgggcatccaggtggataggtacattgcctccgaggtgtgcgaggactccatcaccgtgggaatggtgcgtcatcagggcaagatcatgtacgtgggcgacgtgcggagcgtgacacagaagcatatccaggagtggggccctttcgacctggtgatcggcggcagcccttgcaatgacctgagcatcgtgaacccagcccggaagggcctgtacgagggaaccggcagactgttcttcgagttttacagactgctgcacgacgcccggcctaaggaaggcgacgaccggcccttcttttggctgttcgagaatgtggtggccatgggagtcagcgacaagcgggatattagccggttcctggagagcaaccccgtgatgatcgatgccaaggaagtgagcgccgcccaccgggccagatacttctggggcaatctgcctggcatgaacagacccctggccagcaccgtgaacgacaagctggagctgcaggagtgcctggagcacggccggatcgccaagttcagcaaggtgagaaccatcaccacccgaagcaacagcatcaaacaaggcaaggaccagcactttcctgtgttcatgaacgagaaggaggacatcctgtggtgtaccgagatggagagagtgttcgggttcccagtccactacacagatgtcagcaacatgtctagactggccagacagagactgctgggaagaagctggtccgtccctgtgatcagacacctgttcgcccctctgaaggagtacttcgcctgcgtgagcagcggcaacagcaacgccaacagccggggccccagcttctctagcggcctggtgccactgtccctgagagggagccacatgggccccatggagatctacaaaaccgtgagcgcctggaagcggcagcctgtgcgcgtgctgagcctgtttcggaatatcgataaagtcctgaaaagcctgggattcctggagagcggctctggctccggcggtggcaccctgaagtacgtggaggatgtgacaaacgtggtcagacgggatgtggagaagtggggccccttcgatctggtgtacggcagcacccaacccctgggcagctcttgtgaccggtgccctggctggtacatgtttcagttccaccggatcctgcagtacgccctgccgagacaggagtcccagcggccattcttttggattttcatggacaacttgctgctgaccgaggatgaccaggaaactaccactcggttcctgcagaccgaagccgtgaccctgcaggacgtgagaggccgggactaccagaacgccatgcgggtgtggtccaacatccctggactgaaaagcaagcacgcacctctgacccctaaagaagaggagtacctgcaggcccaggtgcggagcagaagcaagctggacgcccctaaggtggatctgctggtgaagaattgcctcctgcccctgagagagtacttcaagtatttcagccagaatagtctgcccctgggaggcagcggcggcggcatggacagcgtggccttcgaggacgtggccgtgagcttcacccaggaggagtgggccctgctggaccccagccagaagaacctgtacagggacgtgatgcaggagaccttcaagaacctgaccagcgtgggcaagacctggaaggtgcagaacatcgaggacgagtacaagaaccccaggaggaacctgaggaggagcttcaccctggtggcccaggccggcgtgaggcaggacctgggcagcggcggcccaagcagcggcgcccctcctcccagcggcggcagcccagccggctccccaacctctaccgaggagggcacctctgagtccgccacccccgagagcggccctggcacctccaccgagcccagcgagggcagcgcacccggcagccctgccggcagccccacctccacagaggagggaaccagcaccgagcccagcgaaggcagcgccccaggcaccagcaccgagcctagtgagcaggagattaaacggatcaacaagatcagaagaagacttgtgaaagacagcaacaccaagaaggccggcaagacaggccccatgaaaaccctgctggttagagtgatgacacccgatctgagagagcggctggaaaacctgagaaagaagcctgaaaatatcccccagcccatcagcaatacatctagagccaacctgaataagctgctgaccgattacaccgaaatgaagaaggcgatcctgcatgtgtactgggaagagttccagaaggaccctgtgggcctgatgagccgggtggcccagcctgccagcaagaagatcgatcagaacaagctgaaacctgagatggacgagaagggcaacctgaccaccgccggctttgcctgctctcagtgtggccagcccctgttcgtgtacaagctggagcaggtgtctgagaagggcaaggcttacaccaactacttcggacggtgcaatgtggccgagcacgaaaagctgatcctgctggcccagctgaagcccgagaaggatagcgacgaagccgtgacatatagcctgggaaagtttgggcagagggccctggatttctacagcattcatgtgaccaaggagtccacccaccccgtgaagcccctggcccagatcgccggaaacagatacgcctccggacctgtgggaaaggccctgagcgacgcatgtatgggcacaatcgcctccttcctgtctaagtaccaggacatcatcatcgaacaccagaaggtggtgaagggcaaccagaagagactggagagcctgcgggagctggccggcaaggaaaacctggaataccctagcgtgaccctgccacctcagcctcacaccaaggagggcgttgatgcctacaacgaagtgatcgcccgggtgcgaatgtgggtgaacctgaacctgtggcagaagctgaagctaagcagagatgatgccaagcctctgctgagactgaagggattcccttcctttcctctggtcgagagacaggccaacgaagtggactggtgggacatggtgtgtaacgtgaagaagctgatcaacgagaaaaaggaggatggcaaggtgttttggcagaatctggctggctacaagagacaggaagccctgagaccatacctgagcagcgaggaagatcggaagaagggaaagaaattcgctcggtaccagctgggcgacctgctgctgcacctggaaaagaagcacggcgaggactggggaaaggtgtacgacgaggcctgggagcggattgacaagaaagtggaaggcctgagcaagcacatcaagctggaagaggaacggagaagcgaggacgcccagagcaaggccgccctgaccgactggctgcgggctaaggccagcttcgtgatcgagggcctgaaggaggccgacaaggacgagttctgcagatgcgagctgaagctgcagaagtggtacggggacctgcggggaaagcccttcgccatcgaagccgagaacagcatcctggacatcagcggcttcagcaagcagtacaactgtgccttcatctggcagaaggacggcgtgaagaagctgaacctgtacctgatcatcaactacttcaagggcggcaagctgcggttcaagaagatcaaacctgaagccttcgaagccaacagattctacaccgtgatcaacaaaaagagcggcgagatcgtgcccatggaggtgaacttcaacttcgacgaccccaacctgatcatcctgcctctggcctttggcaagagacagggcagagaattcatctggaacgacctgctgtccctggaaaccggcagcctgaagctggccaacggaagagtgatcgagaagacactgtacaacagaagaacccggcaggatgagcctgccctgttcgtggccctgaccttcgagcggcgggaggtcctggactcctccaatatcaaaccaatgaacctgatcggcgtggcaagaggcgaaaacatccccgccgtgatcgccctgaccgaccccgagggctgcccactgagccggtttaaggatagcctgggaaacccaacccacatcctgagaatcggcgagagctataaggagaagcagcggaccatccaggccaagaaggaggtggagcagcggagagccggcggctacagccggaagtacgccagcaaagccaagaatctggcagacgatatggtgagaaacaccgctagagatctgctgtactacgccgtgacccaggatgccatgctgatcttcgccaacctgagccggggcttcggccggcagggcaagcggaccttcatggccgagagacagtacacacggatggaggactggctgaccgccaagctggcctacgagggcctgagcaagacctacctgtccaagacactggcccagtacacctccaagacatgcagcaactgtgggtttaccatcaccagcgccgactacgacagggtgctggagaagctgaagaagacagcaacaggctggatgaccacaattaacggcaaggagctgaaggtggagggccagattacctactacaacagatacaagagacagaacgtagtcaaggacctgtccgtcgagctggatagactgagcgaagaatctgtgaacaacgacatctcctcctggacaaagggcagaagcggagaagctctgagcctcctgaagaaaagattctcccatagacccgtgcaggagaagttcgtgtgcctgaactgcggcttcgagacacacgcagccgagcaagccgccctgaacatcgccagatcctggctgttcctgcggagccaggagtacaagaaataccagacaaacaagacaaccggcaacaccgataagagagccttcgtcgagacctggcagtccttttaccggaagaagcttaaggaggtgtggaaacctgccgtgcggtctggcggatctggcggaggctccaccagccccaagaaaaagagaaaagtctaagctgccttctgcggggcttgccttctggccatgcccttcttctctcccttgcacctgtacctcttggtctttgaataaagcctgagtaggaaggctagcaaaaaaaaaaaaaaaaaaaaaaaaaaaaaaaaaaaaaaaaaaaaaaaaaaaaaaaaaaaaaaaaaaaaaaaaaaaaaaaa

SEQ ID NO: 12566 - RNA, 5785 nt, synthetic construct
  source 1..5785: mol_type = other RNA
aggaaataagagagaaaagaagagtaagaagaaatataagagccaccatggcccctaagaagaagcgtaaagtgagccggatggaacgcctcgtctacgaggtgcggcagaagtgcagaaacatcgaggacatctgcatctcctgcggatctctgaacgtgaccctggagcacccactgttcatcggcggcatgtgccagaactgtaaaaactgttttctggagtgtgcctatcaatacgacgatgacggctaccagagctactgcaccatctgttgcggcggaagagaggtgctgatgtgtggaaataacaactgctgccggtgcttctgcgtggaatgcgtggacctgctggtgggccccggcgccgcccaggccgctattaaggaagatccttggaactgctacatgtgcggccacaagggcacatacggcctgctgagacggagagaggactggcctagcagactgcagatgttcttcgccaataaccacgaccaggagttcgacccccctaaggtgtaccctcccgtccccgccgagaagagaaagcccatccgggtcctgagcctgttcgatggcatcgccaccggtctgctggtgctgaaggacctgggcatccaggtggataggtacattgcctccgaggtgtgcgaggactccatcaccgtgggaatggtgcgtcatcagggcaagatcatgtacgtgggcgacgtgcggagcgtgacacagaagcatatccaggagtggggccctttcgacctggtgatcggcggcagcccttgcaatgacctgagcatcgtgaacccagcccggaagggcctgtacgagggaaccggcagactgttcttcgagttttacagactgctgcacgacgcccggcctaaggaaggcgacgaccggcccttcttttggctgttcgagaatgtggtggccatgggagtcagcgacaagcgggatattagccggttcctggagagcaaccccgtgatgatcgatgccaaggaagtgagcgccgcccaccgggccagatacttctggggcaatctgcctggcatgaacagacccctggccagcaccgtgaacgacaagctggagctgcaggagtgcctggagcacggccggatcgccaagttcagcaaggtgagaaccatcaccacccgaagcaacagcatcaaacaaggcaaggaccagcactttcctgtgttcatgaacgagaaggaggacatcctgtggtgtaccgagatggagagagtgttcgggttcccagtccactacacagatgtcagcaacatgtctagactggccagacagagactgctgggaagaagctggtccgtccctgtgatcagacacctgttcgcccctctgaaggagtacttcgcctgcgtgagcagcggcaacagcaacgccaacagccggggccccagcttctctagcggcctggtgccactgtccctgagagggagccacatgggccccatggagatctacaaaaccgtgagcgcctggaagcggcagcctgtgcgcgtgctgagcctgtttcggaatatcgataaagtcctgaaaagcctgggattcctggagagcggctctggctccggcggtggcaccctgaagtacgtggaggatgtgacaaacgtggtcagacgggatgtggagaagtggggccccttcgatctggtgtacggcagcacccaacccctgggcagctcttgtgaccggtgccctggctggtacatgtttcagttccaccggatcctgcagtacgccctgccgagacaggagtcccagcggccattcttttggattttcatggacaacttgctgctgaccgaggatgaccaggaaactaccactcggttcctgcagaccgaagccgtgaccctgcaggacgtgagaggccgggactaccagaacgccatgcgggtgtggtccaacatccctggactgaaaagcaagcacgcacctctgacccctaaagaagaggagtacctgcaggcccaggtgcggagcagaagcaagctggacgcccctaaggtggatctgctggtgaagaattgcctcctgcccctgagagagtacttcaagtatttcagccagaatagtctgcccctgggaggcagcggcggcggcacccaggaccccgtggtgttcgaggacgtggccgtggacttcacccaggaggagtgggccctgctgaacctggcccagaggaacctgtacagggacgtgatgctggagaacttccagaacctggccagcctgggctaccccctgcacatcccctacctgatcagccagtggaagcaggaggaggacctgggcaccgtggagaggggcaccatccagggcgagcaccaggagggcttcgagaccggcggcccaagcagcggcgcccctcctcccagcggcggcagcccagccggctccccaacctctaccgaggagggcacctctgagtccgccacccccgagagcggccctggcacctccaccgagcccagcgagggcagcgcacccggcagccctgccggcagccccacctccacagaggagggaaccagcaccgagcccagcgaaggcagcgccccaggcaccagcaccgagcctagtgagcaggagattaaacggatcaacaagatcagaagaagacttgtgaaagacagcaacaccaagaaggccggcaagacaggccccatgaaaaccctgctggttagagtgatgacacccgatctgagagagcggctggaaaacctgagaaagaagcctgaaaatatcccccagcccatcagcaatacatctagagccaacctgaataagctgctgaccgattacaccgaaatgaagaaggcgatcctgcatgtgtactgggaagagttccagaaggaccctgtgggcctgatgagccgggtggcccagcctgccagcaagaagatcgatcagaacaagctgaaacctgagatggacgagaagggcaacctgaccaccgccggctttgcctgctctcagtgtggccagcccctgttcgtgtacaagctggagcaggtgtctgagaagggcaaggcttacaccaactacttcggacggtgcaatgtggccgagcacgaaaagctgatcctgctggcccagctgaagcccgagaaggatagcgacgaagccgtgacatatagcctgggaaagtttgggcagagggccctggatttctacagcattcatgtgaccaaggagtccacccaccccgtgaagcccctggcccagatcgccggaaacagatacgcctccggacctgtgggaaaggccctgagcgacgcatgtatgggcacaatcgcctccttcctgtctaagtaccaggacatcatcatcgaacaccagaaggtggtgaagggcaaccagaagagactggagagcctgcgggagctggccggcaaggaaaacctggaataccctagcgtgaccctgccacctcagcctcacaccaaggagggcgttgatgcctacaacgaagtgatcgcccgggtgcgaatgtgggtgaacctgaacctgtggcagaagctgaagctaagcagagatgatgccaagcctctgctgagactgaagggattcccttcctttcctctggtcgagagacaggccaacgaagtggactggtgggacatggtgtgtaacgtgaagaagctgatcaacgagaaaaaggaggatggcaaggtgttttggcagaatctggctggctacaagagacaggaagccctgagaccatacctgagcagcgaggaagatcggaagaagggaaagaaattcgctcggtaccagctgggcgacctgctgctgcacctggaaaagaagcacggcgaggactggggaaaggtgtacgacgaggcctgggagcggattgacaagaaagtggaaggcctgagcaagcacatcaagctggaagaggaacggagaagcgaggacgcccagagcaaggccgccctgaccgactggctgcgggctaaggccagcttcgtgatcgagggcctgaaggaggccgacaaggacgagttctgcagatgcgagctgaagctgcagaagtggtacggggacctgcggggaaagcccttcgccatcgaagccgagaacagcatcctggacatcagcggcttcagcaagcagtacaactgtgccttcatctggcagaaggacggcgtgaagaagctgaacctgtacctgatcatcaactacttcaagggcggcaagctgcggttcaagaagatcaaacctgaagccttcgaagccaacagattctacaccgtgatcaacaaaaagagcggcgagatcgtgcccatggaggtgaacttcaacttcgacgaccccaacctgatcatcctgcctctggcctttggcaagagacagggcagagaattcatctggaacgacctgctgtccctggaaaccggcagcctgaagctggccaacggaagagtgatcgagaagacactgtacaacagaagaacccggcaggatgagcctgccctgttcgtggccctgaccttcgagcggcgggaggtcctggactcctccaatatcaaaccaatgaacctgatcggcgtggcaagaggcgaaaacatccccgccgtgatcgccctgaccgaccccgagggctgcccactgagccggtttaaggatagcctgggaaacccaacccacatcctgagaatcggcgagagctataaggagaagcagcggaccatccaggccaagaaggaggtggagcagcggagagccggcggctacagccggaagtacgccagcaaagccaagaatctggcagacgatatggtgagaaacaccgctagagatctgctgtactacgccgtgacccaggatgccatgctgatcttcgccaacctgagccggggcttcggccggcagggcaagcggaccttcatggccgagagacagtacacacggatggaggactggctgaccgccaagctggcctacgagggcctgagcaagacctacctgtccaagacactggcccagtacacctccaagacatgcagcaactgtgggtttaccatcaccagcgccgactacgacagggtgctggagaagctgaagaagacagcaacaggctggatgaccacaattaacggcaaggagctgaaggtggagggccagattacctactacaacagatacaagagacagaacgtagtcaaggacctgtccgtcgagctggatagactgagcgaagaatctgtgaacaacgacatctcctcctggacaaagggcagaagcggagaagctctgagcctcctgaagaaaagattctcccatagacccgtgcaggagaagttcgtgtgcctgaactgcggcttcgagacacacgcagccgagcaagccgccctgaacatcgccagatcctggctgttcctgcggagccaggagtacaagaaataccagacaaacaagacaaccggcaacaccgataagagagccttcgtcgagacctggcagtccttttaccggaagaagcttaaggaggtgtggaaacctgccgtgcggtctggcggatctggcggaggctccaccagccccaagaaaaagagaaaagtctaagctgccttctgcggggcttgccttctggccatgcccttcttctctcccttgcacctgtacctcttggtctttgaataaagcctgagtaggaaggctagcaaaaaaaaaaaaaaaaaaaaaaaaaaaaaaaaaaaaaaaaaaaaaaaaaaaaaaaaaaaaaaaaaaaaaaaaaaaaaaaa

SEQ ID NO: 12567 - RNA, 5785 nt, synthetic construct
  source 1..5785: mol_type = other RNA
aggaaataagagagaaaagaagagtaagaagaaatataagagccaccatggcccctaagaagaagcgtaaagtgagccggatggaacgcctcgtctacgaggtgcggcagaagtgcagaaacatcgaggacatctgcatctcctgcggatctctgaacgtgaccctggagcacccactgttcatcggcggcatgtgccagaactgtaaaaactgttttctggagtgtgcctatcaatacgacgatgacggctaccagagctactgcaccatctgttgcggcggaagagaggtgctgatgtgtggaaataacaactgctgccggtgcttctgcgtggaatgcgtggacctgctggtgggccccggcgccgcccaggccgctattaaggaagatccttggaactgctacatgtgcggccacaagggcacatacggcctgctgagacggagagaggactggcctagcagactgcagatgttcttcgccaataaccacgaccaggagttcgacccccctaaggtgtaccctcccgtccccgccgagaagagaaagcccatccgggtcctgagcctgttcgatggcatcgccaccggtctgctggtgctgaaggacctgggcatccaggtggataggtacattgcctccgaggtgtgcgaggactccatcaccgtgggaatggtgcgtcatcagggcaagatcatgtacgtgggcgacgtgcggagcgtgacacagaagcatatccaggagtggggccctttcgacctggtgatcggcggcagcccttgcaatgacctgagcatcgtgaacccagcccggaagggcctgtacgagggaaccggcagactgttcttcgagttttacagactgctgcacgacgcccggcctaaggaaggcgacgaccggcccttcttttggctgttcgagaatgtggtggccatgggagtcagcgacaagcgggatattagccggttcctggagagcaaccccgtgatgatcgatgccaaggaagtgagcgccgcccaccgggccagatacttctggggcaatctgcctggcatgaacagacccctggccagcaccgtgaacgacaagctggagctgcaggagtgcctggagcacggccggatcgccaagttcagcaaggtgagaaccatcaccacccgaagcaacagcatcaaacaaggcaaggaccagcactttcctgtgttcatgaacgagaaggaggacatcctgtggtgtaccgagatggagagagtgttcgggttcccagtccactacacagatgtcagcaacatgtctagactggccagacagagactgctgggaagaagctggtccgtccctgtgatcagacacctgttcgcccctctgaaggagtacttcgcctgcgtgagcagcggcaacagcaacgccaacagccggggccccagcttctctagcggcctggtgccactgtccctgagagggagccacatgggccccatggagatctacaaaaccgtgagcgcctggaagcggcagcctgtgcgcgtgctgagcctgtttcggaatatcgataaagtcctgaaaagcctgggattcctggagagcggctctggctccggcggtggcaccctgaagtacgtggaggatgtgacaaacgtggtcagacgggatgtggagaagtggggccccttcgatctggtgtacggcagcacccaacccctgggcagctcttgtgaccggtgccctggctggtacatgtttcagttccaccggatcctgcagtacgccctgccgagacaggagtcccagcggccattcttttggattttcatggacaacttgctgctgaccgaggatgaccaggaaactaccactcggttcctgcagaccgaagccgtgaccctgcaggacgtgagaggccgggactaccagaacgccatgcgggtgtggtccaacatccctggactgaaaagcaagcacgcacctctgacccctaaagaagaggagtacctgcaggcccaggtgcggagcagaagcaagctggacgcccctaaggtggatctgctggtgaagaattgcctcctgcccctgagagagtacttcaagtatttcagccagaatagtctgcccctgggaggcagcggcggcggcagcaaggtgcccgtgaccttcggcgacctggccatctacttcagccaggaggagtgggagtggctgagccccatccagaaggacctgtacgaggacgtgatgctggagaactaccagaacctggtgagcctgggcctgagcttcaggaggcccaacgtgatcaccctgctggagaagggcagggccccctggatggtggagcccgtgaggaagaggaggggcctggacagcaggagcaagtacggcggcccaagcagcggcgcccctcctcccagcggcggcagcccagccggctccccaacctctaccgaggagggcacctctgagtccgccacccccgagagcggccctggcacctccaccgagcccagcgagggcagcgcacccggcagccctgccggcagccccacctccacagaggagggaaccagcaccgagcccagcgaaggcagcgccccaggcaccagcaccgagcctagtgagcaggagattaaacggatcaacaagatcagaagaagacttgtgaaagacagcaacaccaagaaggccggcaagacaggccccatgaaaaccctgctggttagagtgatgacacccgatctgagagagcggctggaaaacctgagaaagaagcctgaaaatatcccccagcccatcagcaatacatctagagccaacctgaataagctgctgaccgattacaccgaaatgaagaaggcgatcctgcatgtgtactgggaagagttccagaaggaccctgtgggcctgatgagccgggtggcccagcctgccagcaagaagatcgatcagaacaagctgaaacctgagatggacgagaagggcaacctgaccaccgccggctttgcctgctctcagtgtggccagcccctgttcgtgtacaagctggagcaggtgtctgagaagggcaaggcttacaccaactacttcggacggtgcaatgtggccgagcacgaaaagctgatcctgctggcccagctgaagcccgagaaggatagcgacgaagccgtgacatatagcctgggaaagtttgggcagagggccctggatttctacagcattcatgtgaccaaggagtccacccaccccgtgaagcccctggcccagatcgccggaaacagatacgcctccggacctgtgggaaaggccctgagcgacgcatgtatgggcacaatcgcctccttcctgtctaagtaccaggacatcatcatcgaacaccagaaggtggtgaagggcaaccagaagagactggagagcctgcgggagctggccggcaaggaaaacctggaataccctagcgtgaccctgccacctcagcctcacaccaaggagggcgttgatgcctacaacgaagtgatcgcccgggtgcgaatgtgggtgaacctgaacctgtggcagaagctgaagctaagcagagatgatgccaagcctctgctgagactgaagggattcccttcctttcctctggtcgagagacaggccaacgaagtggactggtgggacatggtgtgtaacgtgaagaagctgatcaacgagaaaaaggaggatggcaaggtgttttggcagaatctggctggctacaagagacaggaagccctgagaccatacctgagcagcgaggaagatcggaagaagggaaagaaattcgctcggtaccagctgggcgacctgctgctgcacctggaaaagaagcacggcgaggactggggaaaggtgtacgacgaggcctgggagcggattgacaagaaagtggaaggcctgagcaagcacatcaagctggaagaggaacggagaagcgaggacgcccagagcaaggccgccctgaccgactggctgcgggctaaggccagcttcgtgatcgagggcctgaaggaggccgacaaggacgagttctgcagatgcgagctgaagctgcagaagtggtacggggacctgcggggaaagcccttcgccatcgaagccgagaacagcatcctggacatcagcggcttcagcaagcagtacaactgtgccttcatctggcagaaggacggcgtgaagaagctgaacctgtacctgatcatcaactacttcaagggcggcaagctgcggttcaagaagatcaaacctgaagccttcgaagccaacagattctacaccgtgatcaacaaaaagagcggcgagatcgtgcccatggaggtgaacttcaacttcgacgaccccaacctgatcatcctgcctctggcctttggcaagagacagggcagagaattcatctggaacgacctgctgtccctggaaaccggcagcctgaagctggccaacggaagagtgatcgagaagacactgtacaacagaagaacccggcaggatgagcctgccctgttcgtggccctgaccttcgagcggcgggaggtcctggactcctccaatatcaaaccaatgaacctgatcggcgtggcaagaggcgaaaacatccccgccgtgatcgccctgaccgaccccgagggctgcccactgagccggtttaaggatagcctgggaaacccaacccacatcctgagaatcggcgagagctataaggagaagcagcggaccatccaggccaagaaggaggtggagcagcggagagccggcggctacagccggaagtacgccagcaaagccaagaatctggcagacgatatggtgagaaacaccgctagagatctgctgtactacgccgtgacccaggatgccatgctgatcttcgccaacctgagccggggcttcggccggcagggcaagcggaccttcatggccgagagacagtacacacggatggaggactggctgaccgccaagctggcctacgagggcctgagcaagacctacctgtccaagacactggcccagtacacctccaagacatgcagcaactgtgggtttaccatcaccagcgccgactacgacagggtgctggagaagctgaagaagacagcaacaggctggatgaccacaattaacggcaaggagctgaaggtggagggccagattacctactacaacagatacaagagacagaacgtagtcaaggacctgtccgtcgagctggatagactgagcgaagaatctgtgaacaacgacatctcctcctggacaaagggcagaagcggagaagctctgagcctcctgaagaaaagattctcccatagacccgtgcaggagaagttcgtgtgcctgaactgcggcttcgagacacacgcagccgagcaagccgccctgaacatcgccagatcctggctgttcctgcggagccaggagtacaagaaataccagacaaacaagacaaccggcaacaccgataagagagccttcgtcgagacctggcagtccttttaccggaagaagcttaaggaggtgtggaaacctgccgtgcggtctggcggatctggcggaggctccaccagccccaagaaaaagagaaaagtctaagctgccttctgcggggcttgccttctggccatgcccttcttctctcccttgcacctgtacctcttggtctttgaataaagcctgagtaggaaggctagcaaaaaaaaaaaaaaaaaaaaaaaaaaaaaaaaaaaaaaaaaaaaaaaaaaaaaaaaaaaaaaaaaaaaaaaaaaaaaaaa

SEQ ID NO: 12568 - RNA, 5785 nt, synthetic construct
  source 1..5785: mol_type = other RNA
aggaaataagagagaaaagaagagtaagaagaaatataagagccaccatggcccctaagaagaagcgtaaagtgagccggatggaacgcctcgtctacgaggtgcggcagaagtgcagaaacatcgaggacatctgcatctcctgcggatctctgaacgtgaccctggagcacccactgttcatcggcggcatgtgccagaactgtaaaaactgttttctggagtgtgcctatcaatacgacgatgacggctaccagagctactgcaccatctgttgcggcggaagagaggtgctgatgtgtggaaataacaactgctgccggtgcttctgcgtggaatgcgtggacctgctggtgggccccggcgccgcccaggccgctattaaggaagatccttggaactgctacatgtgcggccacaagggcacatacggcctgctgagacggagagaggactggcctagcagactgcagatgttcttcgccaataaccacgaccaggagttcgacccccctaaggtgtaccctcccgtccccgccgagaagagaaagcccatccgggtcctgagcctgttcgatggcatcgccaccggtctgctggtgctgaaggacctgggcatccaggtggataggtacattgcctccgaggtgtgcgaggactccatcaccgtgggaatggtgcgtcatcagggcaagatcatgtacgtgggcgacgtgcggagcgtgacacagaagcatatccaggagtggggccctttcgacctggtgatcggcggcagcccttgcaatgacctgagcatcgtgaacccagcccggaagggcctgtacgagggaaccggcagactgttcttcgagttttacagactgctgcacgacgcccggcctaaggaaggcgacgaccggcccttcttttggctgttcgagaatgtggtggccatgggagtcagcgacaagcgggatattagccggttcctggagagcaaccccgtgatgatcgatgccaaggaagtgagcgccgcccaccgggccagatacttctggggcaatctgcctggcatgaacagacccctggccagcaccgtgaacgacaagctggagctgcaggagtgcctggagcacggccggatcgccaagttcagcaaggtgagaaccatcaccacccgaagcaacagcatcaaacaaggcaaggaccagcactttcctgtgttcatgaacgagaaggaggacatcctgtggtgtaccgagatggagagagtgttcgggttcccagtccactacacagatgtcagcaacatgtctagactggccagacagagactgctgggaagaagctggtccgtccctgtgatcagacacctgttcgcccctctgaaggagtacttcgcctgcgtgagcagcggcaacagcaacgccaacagccggggccccagcttctctagcggcctggtgccactgtccctgagagggagccacatgggccccatggagatctacaaaaccgtgagcgcctggaagcggcagcctgtgcgcgtgctgagcctgtttcggaatatcgataaagtcctgaaaagcctgggattcctggagagcggctctggctccggcggtggcaccctgaagtacgtggaggatgtgacaaacgtggtcagacgggatgtggagaagtggggccccttcgatctggtgtacggcagcacccaacccctgggcagctcttgtgaccggtgccctggctggtacatgtttcagttccaccggatcctgcagtacgccctgccgagacaggagtcccagcggccattcttttggattttcatggacaacttgctgctgaccgaggatgaccaggaaactaccactcggttcctgcagaccgaagccgtgaccctgcaggacgtgagaggccgggactaccagaacgccatgcgggtgtggtccaacatccctggactgaaaagcaagcacgcacctctgacccctaaagaagaggagtacctgcaggcccaggtgcggagcagaagcaagctggacgcccctaaggtggatctgctggtgaagaattgcctcctgcccctgagagagtacttcaagtatttcagccagaatagtctgcccctgggaggcagcggcggcggcttccaggagcccgtgaccttcgaggacgtggccgtgtacttcacccagaacgagtgggccagcctgcaccccacccagagggccctgtacaggggcgtgatgctggagaactacgccaacgtgaccagcctgagcgccttccccttccccaagcccgacctgatcttccagctggagcagggcgaggccgcctggggccccgacccctggaccctggacggcggcgaggccctgaggggcatgggcggcccaagcagcggcgcccctcctcccagcggcggcagcccagccggctccccaacctctaccgaggagggcacctctgagtccgccacccccgagagcggccctggcacctccaccgagcccagcgagggcagcgcacccggcagccctgccggcagccccacctccacagaggagggaaccagcaccgagcccagcgaaggcagcgccccaggcaccagcaccgagcctagtgagcaggagattaaacggatcaacaagatcagaagaagacttgtgaaagacagcaacaccaagaaggccggcaagacaggccccatgaaaaccctgctggttagagtgatgacacccgatctgagagagcggctggaaaacctgagaaagaagcctgaaaatatcccccagcccatcagcaatacatctagagccaacctgaataagctgctgaccgattacaccgaaatgaagaaggcgatcctgcatgtgtactgggaagagttccagaaggaccctgtgggcctgatgagccgggtggcccagcctgccagcaagaagatcgatcagaacaagctgaaacctgagatggacgagaagggcaacctgaccaccgccggctttgcctgctctcagtgtggccagcccctgttcgtgtacaagctggagcaggtgtctgagaagggcaaggcttacaccaactacttcggacggtgcaatgtggccgagcacgaaaagctgatcctgctggcccagctgaagcccgagaaggatagcgacgaagccgtgacatatagcctgggaaagtttgggcagagggccctggatttctacagcattcatgtgaccaaggagtccacccaccccgtgaagcccctggcccagatcgccggaaacagatacgcctccggacctgtgggaaaggccctgagcgacgcatgtatgggcacaatcgcctccttcctgtctaagtaccaggacatcatcatcgaacaccagaaggtggtgaagggcaaccagaagagactggagagcctgcgggagctggccggcaaggaaaacctggaataccctagcgtgaccctgccacctcagcctcacaccaaggagggcgttgatgcctacaacgaagtgatcgcccgggtgcgaatgtgggtgaacctgaacctgtggcagaagctgaagctaagcagagatgatgccaagcctctgctgagactgaagggattcccttcctttcctctggtcgagagacaggccaacgaagtggactggtgggacatggtgtgtaacgtgaagaagctgatcaacgagaaaaaggaggatggcaaggtgttttggcagaatctggctggctacaagagacaggaagccctgagaccatacctgagcagcgaggaagatcggaagaagggaaagaaattcgctcggtaccagctgggcgacctgctgctgcacctggaaaagaagcacggcgaggactggggaaaggtgtacgacgaggcctgggagcggattgacaagaaagtggaaggcctgagcaagcacatcaagctggaagaggaacggagaagcgaggacgcccagagcaaggccgccctgaccgactggctgcgggctaaggccagcttcgtgatcgagggcctgaaggaggccgacaaggacgagttctgcagatgcgagctgaagctgcagaagtggtacggggacctgcggggaaagcccttcgccatcgaagccgagaacagcatcctggacatcagcggcttcagcaagcagtacaactgtgccttcatctggcagaaggacggcgtgaagaagctgaacctgtacctgatcatcaactacttcaagggcggcaagctgcggttcaagaagatcaaacctgaagccttcgaagccaacagattctacaccgtgatcaacaaaaagagcggcgagatcgtgcccatggaggtgaacttcaacttcgacgaccccaacctgatcatcctgcctctggcctttggcaagagacagggcagagaattcatctggaacgacctgctgtccctggaaaccggcagcctgaagctggccaacggaagagtgatcgagaagacactgtacaacagaagaacccggcaggatgagcctgccctgttcgtggccctgaccttcgagcggcgggaggtcctggactcctccaatatcaaaccaatgaacctgatcggcgtggcaagaggcgaaaacatccccgccgtgatcgccctgaccgaccccgagggctgcccactgagccggtttaaggatagcctgggaaacccaacccacatcctgagaatcggcgagagctataaggagaagcagcggaccatccaggccaagaaggaggtggagcagcggagagccggcggctacagccggaagtacgccagcaaagccaagaatctggcagacgatatggtgagaaacaccgctagagatctgctgtactacgccgtgacccaggatgccatgctgatcttcgccaacctgagccggggcttcggccggcagggcaagcggaccttcatggccgagagacagtacacacggatggaggactggctgaccgccaagctggcctacgagggcctgagcaagacctacctgtccaagacactggcccagtacacctccaagacatgcagcaactgtgggtttaccatcaccagcgccgactacgacagggtgctggagaagctgaagaagacagcaacaggctggatgaccacaattaacggcaaggagctgaaggtggagggccagattacctactacaacagatacaagagacagaacgtagtcaaggacctgtccgtcgagctggatagactgagcgaagaatctgtgaacaacgacatctcctcctggacaaagggcagaagcggagaagctctgagcctcctgaagaaaagattctcccatagacccgtgcaggagaagttcgtgtgcctgaactgcggcttcgagacacacgcagccgagcaagccgccctgaacatcgccagatcctggctgttcctgcggagccaggagtacaagaaataccagacaaacaagacaaccggcaacaccgataagagagccttcgtcgagacctggcagtccttttaccggaagaagcttaaggaggtgtggaaacctgccgtgcggtctggcggatctggcggaggctccaccagccccaagaaaaagagaaaagtctaagctgccttctgcggggcttgccttctggccatgcccttcttctctcccttgcacctgtacctcttggtctttgaataaagcctgagtaggaaggctagcaaaaaaaaaaaaaaaaaaaaaaaaaaaaaaaaaaaaaaaaaaaaaaaaaaaaaaaaaaaaaaaaaaaaaaaaaaaaaaaa

SEQ ID NO: 12569 - RNA, 5785 nt, synthetic construct
  source 1..5785: mol_type = other RNA
aggaaataagagagaaaagaagagtaagaagaaatataagagccaccatggcccctaagaagaagcgtaaagtgagccggatggaacgcctcgtctacgaggtgcggcagaagtgcagaaacatcgaggacatctgcatctcctgcggatctctgaacgtgaccctggagcacccactgttcatcggcggcatgtgccagaactgtaaaaactgttttctggagtgtgcctatcaatacgacgatgacggctaccagagctactgcaccatctgttgcggcggaagagaggtgctgatgtgtggaaataacaactgctgccggtgcttctgcgtggaatgcgtggacctgctggtgggccccggcgccgcccaggccgctattaaggaagatccttggaactgctacatgtgcggccacaagggcacatacggcctgctgagacggagagaggactggcctagcagactgcagatgttcttcgccaataaccacgaccaggagttcgacccccctaaggtgtaccctcccgtccccgccgagaagagaaagcccatccgggtcctgagcctgttcgatggcatcgccaccggtctgctggtgctgaaggacctgggcatccaggtggataggtacattgcctccgaggtgtgcgaggactccatcaccgtgggaatggtgcgtcatcagggcaagatcatgtacgtgggcgacgtgcggagcgtgacacagaagcatatccaggagtggggccctttcgacctggtgatcggcggcagcccttgcaatgacctgagcatcgtgaacccagcccggaagggcctgtacgagggaaccggcagactgttcttcgagttttacagactgctgcacgacgcccggcctaaggaaggcgacgaccggcccttcttttggctgttcgagaatgtggtggccatgggagtcagcgacaagcgggatattagccggttcctggagagcaaccccgtgatgatcgatgccaaggaagtgagcgccgcccaccgggccagatacttctggggcaatctgcctggcatgaacagacccctggccagcaccgtgaacgacaagctggagctgcaggagtgcctggagcacggccggatcgccaagttcagcaaggtgagaaccatcaccacccgaagcaacagcatcaaacaaggcaaggaccagcactttcctgtgttcatgaacgagaaggaggacatcctgtggtgtaccgagatggagagagtgttcgggttcccagtccactacacagatgtcagcaacatgtctagactggccagacagagactgctgggaagaagctggtccgtccctgtgatcagacacctgttcgcccctctgaaggagtacttcgcctgcgtgagcagcggcaacagcaacgccaacagccggggccccagcttctctagcggcctggtgccactgtccctgagagggagccacatgggccccatggagatctacaaaaccgtgagcgcctggaagcggcagcctgtgcgcgtgctgagcctgtttcggaatatcgataaagtcctgaaaagcctgggattcctggagagcggctctggctccggcggtggcaccctgaagtacgtggaggatgtgacaaacgtggtcagacgggatgtggagaagtggggccccttcgatctggtgtacggcagcacccaacccctgggcagctcttgtgaccggtgccctggctggtacatgtttcagttccaccggatcctgcagtacgccctgccgagacaggagtcccagcggccattcttttggattttcatggacaacttgctgctgaccgaggatgaccaggaaactaccactcggttcctgcagaccgaagccgtgaccctgcaggacgtgagaggccgggactaccagaacgccatgcgggtgtggtccaacatccctggactgaaaagcaagcacgcacctctgacccctaaagaagaggagtacctgcaggcccaggtgcggagcagaagcaagctggacgcccctaaggtggatctgctggtgaagaattgcctcctgcccctgagagagtacttcaagtatttcagccagaatagtctgcccctgggaggcagcggcggcggcatgaccttcgaggacgtgaccgtggagttcaccccctgggagtggggccagctggaccccgcccagaaggacctgtacagggaggtgatgctggagaacttcaggaacctggccagcctgggcctgcccgtgagcaagccccacgtgatctgccagctggaggagggcgaggagccctgcgtgctggagagggagatcagcgtgggcgcccagagcgacctgaagaggaggcccaaggccaagggcggcccaagcagcggcgcccctcctcccagcggcggcagcccagccggctccccaacctctaccgaggagggcacctctgagtccgccacccccgagagcggccctggcacctccaccgagcccagcgagggcagcgcacccggcagccctgccggcagccccacctccacagaggagggaaccagcaccgagcccagcgaaggcagcgccccaggcaccagcaccgagcctagtgagcaggagattaaacggatcaacaagatcagaagaagacttgtgaaagacagcaacaccaagaaggccggcaagacaggccccatgaaaaccctgctggttagagtgatgacacccgatctgagagagcggctggaaaacctgagaaagaagcctgaaaatatcccccagcccatcagcaatacatctagagccaacctgaataagctgctgaccgattacaccgaaatgaagaaggcgatcctgcatgtgtactgggaagagttccagaaggaccctgtgggcctgatgagccgggtggcccagcctgccagcaagaagatcgatcagaacaagctgaaacctgagatggacgagaagggcaacctgaccaccgccggctttgcctgctctcagtgtggccagcccctgttcgtgtacaagctggagcaggtgtctgagaagggcaaggcttacaccaactacttcggacggtgcaatgtggccgagcacgaaaagctgatcctgctggcccagctgaagcccgagaaggatagcgacgaagccgtgacatatagcctgggaaagtttgggcagagggccctggatttctacagcattcatgtgaccaaggagtccacccaccccgtgaagcccctggcccagatcgccggaaacagatacgcctccggacctgtgggaaaggccctgagcgacgcatgtatgggcacaatcgcctccttcctgtctaagtaccaggacatcatcatcgaacaccagaaggtggtgaagggcaaccagaagagactggagagcctgcgggagctggccggcaaggaaaacctggaataccctagcgtgaccctgccacctcagcctcacaccaaggagggcgttgatgcctacaacgaagtgatcgcccgggtgcgaatgtgggtgaacctgaacctgtggcagaagctgaagctaagcagagatgatgccaagcctctgctgagactgaagggattcccttcctttcctctggtcgagagacaggccaacgaagtggactggtgggacatggtgtgtaacgtgaagaagctgatcaacgagaaaaaggaggatggcaaggtgttttggcagaatctggctggctacaagagacaggaagccctgagaccatacctgagcagcgaggaagatcggaagaagggaaagaaattcgctcggtaccagctgggcgacctgctgctgcacctggaaaagaagcacggcgaggactggggaaaggtgtacgacgaggcctgggagcggattgacaagaaagtggaaggcctgagcaagcacatcaagctggaagaggaacggagaagcgaggacgcccagagcaaggccgccctgaccgactggctgcgggctaaggccagcttcgtgatcgagggcctgaaggaggccgacaaggacgagttctgcagatgcgagctgaagctgcagaagtggtacggggacctgcggggaaagcccttcgccatcgaagccgagaacagcatcctggacatcagcggcttcagcaagcagtacaactgtgccttcatctggcagaaggacggcgtgaagaagctgaacctgtacctgatcatcaactacttcaagggcggcaagctgcggttcaagaagatcaaacctgaagccttcgaagccaacagattctacaccgtgatcaacaaaaagagcggcgagatcgtgcccatggaggtgaacttcaacttcgacgaccccaacctgatcatcctgcctctggcctttggcaagagacagggcagagaattcatctggaacgacctgctgtccctggaaaccggcagcctgaagctggccaacggaagagtgatcgagaagacactgtacaacagaagaacccggcaggatgagcctgccctgttcgtggccctgaccttcgagcggcgggaggtcctggactcctccaatatcaaaccaatgaacctgatcggcgtggcaagaggcgaaaacatccccgccgtgatcgccctgaccgaccccgagggctgcccactgagccggtttaaggatagcctgggaaacccaacccacatcctgagaatcggcgagagctataaggagaagcagcggaccatccaggccaagaaggaggtggagcagcggagagccggcggctacagccggaagtacgccagcaaagccaagaatctggcagacgatatggtgagaaacaccgctagagatctgctgtactacgccgtgacccaggatgccatgctgatcttcgccaacctgagccggggcttcggccggcagggcaagcggaccttcatggccgagagacagtacacacggatggaggactggctgaccgccaagctggcctacgagggcctgagcaagacctacctgtccaagacactggcccagtacacctccaagacatgcagcaactgtgggtttaccatcaccagcgccgactacgacagggtgctggagaagctgaagaagacagcaacaggctggatgaccacaattaacggcaaggagctgaaggtggagggccagattacctactacaacagatacaagagacagaacgtagtcaaggacctgtccgtcgagctggatagactgagcgaagaatctgtgaacaacgacatctcctcctggacaaagggcagaagcggagaagctctgagcctcctgaagaaaagattctcccatagacccgtgcaggagaagttcgtgtgcctgaactgcggcttcgagacacacgcagccgagcaagccgccctgaacatcgccagatcctggctgttcctgcggagccaggagtacaagaaataccagacaaacaagacaaccggcaacaccgataagagagccttcgtcgagacctggcagtccttttaccggaagaagcttaaggaggtgtggaaacctgccgtgcggtctggcggatctggcggaggctccaccagccccaagaaaaagagaaaagtctaagctgccttctgcggggcttgccttctggccatgcccttcttctctcccttgcacctgtacctcttggtctttgaataaagcctgagtaggaaggctagcaaaaaaaaaaaaaaaaaaaaaaaaaaaaaaaaaaaaaaaaaaaaaaaaaaaaaaaaaaaaaaaaaaaaaaaaaaaaaaaa

SEQ ID NO: 12570 - RNA, 5785 nt, synthetic construct
  source 1..5785: mol_type = other RNA
aggaaataagagagaaaagaagagtaagaagaaatataagagccaccatggcccctaagaagaagcgtaaagtgagccggatggaacgcctcgtctacgaggtgcggcagaagtgcagaaacatcgaggacatctgcatctcctgcggatctctgaacgtgaccctggagcacccactgttcatcggcggcatgtgccagaactgtaaaaactgttttctggagtgtgcctatcaatacgacgatgacggctaccagagctactgcaccatctgttgcggcggaagagaggtgctgatgtgtggaaataacaactgctgccggtgcttctgcgtggaatgcgtggacctgctggtgggccccggcgccgcccaggccgctattaaggaagatccttggaactgctacatgtgcggccacaagggcacatacggcctgctgagacggagagaggactggcctagcagactgcagatgttcttcgccaataaccacgaccaggagttcgacccccctaaggtgtaccctcccgtccccgccgagaagagaaagcccatccgggtcctgagcctgttcgatggcatcgccaccggtctgctggtgctgaaggacctgggcatccaggtggataggtacattgcctccgaggtgtgcgaggactccatcaccgtgggaatggtgcgtcatcagggcaagatcatgtacgtgggcgacgtgcggagcgtgacacagaagcatatccaggagtggggccctttcgacctggtgatcggcggcagcccttgcaatgacctgagcatcgtgaacccagcccggaagggcctgtacgagggaaccggcagactgttcttcgagttttacagactgctgcacgacgcccggcctaaggaaggcgacgaccggcccttcttttggctgttcgagaatgtggtggccatgggagtcagcgacaagcgggatattagccggttcctggagagcaaccccgtgatgatcgatgccaaggaagtgagcgccgcccaccgggccagatacttctggggcaatctgcctggcatgaacagacccctggccagcaccgtgaacgacaagctggagctgcaggagtgcctggagcacggccggatcgccaagttcagcaaggtgagaaccatcaccacccgaagcaacagcatcaaacaaggcaaggaccagcactttcctgtgttcatgaacgagaaggaggacatcctgtggtgtaccgagatggagagagtgttcgggttcccagtccactacacagatgtcagcaacatgtctagactggccagacagagactgctgggaagaagctggtccgtccctgtgatcagacacctgttcgcccctctgaaggagtacttcgcctgcgtgagcagcggcaacagcaacgccaacagccggggccccagcttctctagcggcctggtgccactgtccctgagagggagccacatgggccccatggagatctacaaaaccgtgagcgcctggaagcggcagcctgtgcgcgtgctgagcctgtttcggaatatcgataaagtcctgaaaagcctgggattcctggagagcggctctggctccggcggtggcaccctgaagtacgtggaggatgtgacaaacgtggtcagacgggatgtggagaagtggggccccttcgatctggtgtacggcagcacccaacccctgggcagctcttgtgaccggtgccctggctggtacatgtttcagttccaccggatcctgcagtacgccctgccgagacaggagtcccagcggccattcttttggattttcatggacaacttgctgctgaccgaggatgaccaggaaactaccactcggttcctgcagaccgaagccgtgaccctgcaggacgtgagaggccgggactaccagaacgccatgcgggtgtggtccaacatccctggactgaaaagcaagcacgcacctctgacccctaaagaagaggagtacctgcaggcccaggtgcggagcagaagcaagctggacgcccctaaggtggatctgctggtgaagaattgcctcctgcccctgagagagtacttcaagtatttcagccagaatagtctgcccctgggaggcagcggcggcggctaccagacccccgtgagcttcaaggacgtggtggtgggcttcacccaggaggagtggcacaggctgagccccgcccagagggccctgtacagggacgtgatgctggagacctacagcaacctggtgagcgtgggctacgagggcaccaagcccgacgtgatcctgaggctggagcaggaggaggccccctggatctgcgaggtggcctgccccggctgccacaggtgggaggacatctggcagggcggcccaagcagcggcgcccctcctcccagcggcggcagcccagccggctccccaacctctaccgaggagggcacctctgagtccgccacccccgagagcggccctggcacctccaccgagcccagcgagggcagcgcacccggcagccctgccggcagccccacctccacagaggagggaaccagcaccgagcccagcgaaggcagcgccccaggcaccagcaccgagcctagtgagcaggagattaaacggatcaacaagatcagaagaagacttgtgaaagacagcaacaccaagaaggccggcaagacaggccccatgaaaaccctgctggttagagtgatgacacccgatctgagagagcggctggaaaacctgagaaagaagcctgaaaatatcccccagcccatcagcaatacatctagagccaacctgaataagctgctgaccgattacaccgaaatgaagaaggcgatcctgcatgtgtactgggaagagttccagaaggaccctgtgggcctgatgagccgggtggcccagcctgccagcaagaagatcgatcagaacaagctgaaacctgagatggacgagaagggcaacctgaccaccgccggctttgcctgctctcagtgtggccagcccctgttcgtgtacaagctggagcaggtgtctgagaagggcaaggcttacaccaactacttcggacggtgcaatgtggccgagcacgaaaagctgatcctgctggcccagctgaagcccgagaaggatagcgacgaagccgtgacatatagcctgggaaagtttgggcagagggccctggatttctacagcattcatgtgaccaaggagtccacccaccccgtgaagcccctggcccagatcgccggaaacagatacgcctccggacctgtgggaaaggccctgagcgacgcatgtatgggcacaatcgcctccttcctgtctaagtaccaggacatcatcatcgaacaccagaaggtggtgaagggcaaccagaagagactggagagcctgcgggagctggccggcaaggaaaacctggaataccctagcgtgaccctgccacctcagcctcacaccaaggagggcgttgatgcctacaacgaagtgatcgcccgggtgcgaatgtgggtgaacctgaacctgtggcagaagctgaagctaagcagagatgatgccaagcctctgctgagactgaagggattcccttcctttcctctggtcgagagacaggccaacgaagtggactggtgggacatggtgtgtaacgtgaagaagctgatcaacgagaaaaaggaggatggcaaggtgttttggcagaatctggctggctacaagagacaggaagccctgagaccatacctgagcagcgaggaagatcggaagaagggaaagaaattcgctcggtaccagctgggcgacctgctgctgcacctggaaaagaagcacggcgaggactggggaaaggtgtacgacgaggcctgggagcggattgacaagaaagtggaaggcctgagcaagcacatcaagctggaagaggaacggagaagcgaggacgcccagagcaaggccgccctgaccgactggctgcgggctaaggccagcttcgtgatcgagggcctgaaggaggccgacaaggacgagttctgcagatgcgagctgaagctgcagaagtggtacggggacctgcggggaaagcccttcgccatcgaagccgagaacagcatcctggacatcagcggcttcagcaagcagtacaactgtgccttcatctggcagaaggacggcgtgaagaagctgaacctgtacctgatcatcaactacttcaagggcggcaagctgcggttcaagaagatcaaacctgaagccttcgaagccaacagattctacaccgtgatcaacaaaaagagcggcgagatcgtgcccatggaggtgaacttcaacttcgacgaccccaacctgatcatcctgcctctggcctttggcaagagacagggcagagaattcatctggaacgacctgctgtccctggaaaccggcagcctgaagctggccaacggaagagtgatcgagaagacactgtacaacagaagaacccggcaggatgagcctgccctgttcgtggccctgaccttcgagcggcgggaggtcctggactcctccaatatcaaaccaatgaacctgatcggcgtggcaagaggcgaaaacatccccgccgtgatcgccctgaccgaccccgagggctgcccactgagccggtttaaggatagcctgggaaacccaacccacatcctgagaatcggcgagagctataaggagaagcagcggaccatccaggccaagaaggaggtggagcagcggagagccggcggctacagccggaagtacgccagcaaagccaagaatctggcagacgatatggtgagaaacaccgctagagatctgctgtactacgccgtgacccaggatgccatgctgatcttcgccaacctgagccggggcttcggccggcagggcaagcggaccttcatggccgagagacagtacacacggatggaggactggctgaccgccaagctggcctacgagggcctgagcaagacctacctgtccaagacactggcccagtacacctccaagacatgcagcaactgtgggtttaccatcaccagcgccgactacgacagggtgctggagaagctgaagaagacagcaacaggctggatgaccacaattaacggcaaggagctgaaggtggagggccagattacctactacaacagatacaagagacagaacgtagtcaaggacctgtccgtcgagctggatagactgagcgaagaatctgtgaacaacgacatctcctcctggacaaagggcagaagcggagaagctctgagcctcctgaagaaaagattctcccatagacccgtgcaggagaagttcgtgtgcctgaactgcggcttcgagacacacgcagccgagcaagccgccctgaacatcgccagatcctggctgttcctgcggagccaggagtacaagaaataccagacaaacaagacaaccggcaacaccgataagagagccttcgtcgagacctggcagtccttttaccggaagaagcttaaggaggtgtggaaacctgccgtgcggtctggcggatctggcggaggctccaccagccccaagaaaaagagaaaagtctaagctgccttctgcggggcttgccttctggccatgcccttcttctctcccttgcacctgtacctcttggtctttgaataaagcctgagtaggaaggctagcaaaaaaaaaaaaaaaaaaaaaaaaaaaaaaaaaaaaaaaaaaaaaaaaaaaaaaaaaaaaaaaaaaaaaaaaaaaaaaaa

SEQ ID NO: 12571 - RNA, 5785 nt, synthetic construct
  source 1..5785: mol_type = other RNA
aggaaataagagagaaaagaagagtaagaagaaatataagagccaccatggcccctaagaagaagcgtaaagtgagccggatggaacgcctcgtctacgaggtgcggcagaagtgcagaaacatcgaggacatctgcatctcctgcggatctctgaacgtgaccctggagcacccactgttcatcggcggcatgtgccagaactgtaaaaactgttttctggagtgtgcctatcaatacgacgatgacggctaccagagctactgcaccatctgttgcggcggaagagaggtgctgatgtgtggaaataacaactgctgccggtgcttctgcgtggaatgcgtggacctgctggtgggccccggcgccgcccaggccgctattaaggaagatccttggaactgctacatgtgcggccacaagggcacatacggcctgctgagacggagagaggactggcctagcagactgcagatgttcttcgccaataaccacgaccaggagttcgacccccctaaggtgtaccctcccgtccccgccgagaagagaaagcccatccgggtcctgagcctgttcgatggcatcgccaccggtctgctggtgctgaaggacctgggcatccaggtggataggtacattgcctccgaggtgtgcgaggactccatcaccgtgggaatggtgcgtcatcagggcaagatcatgtacgtgggcgacgtgcggagcgtgacacagaagcatatccaggagtggggccctttcgacctggtgatcggcggcagcccttgcaatgacctgagcatcgtgaacccagcccggaagggcctgtacgagggaaccggcagactgttcttcgagttttacagactgctgcacgacgcccggcctaaggaaggcgacgaccggcccttcttttggctgttcgagaatgtggtggccatgggagtcagcgacaagcgggatattagccggttcctggagagcaaccccgtgatgatcgatgccaaggaagtgagcgccgcccaccgggccagatacttctggggcaatctgcctggcatgaacagacccctggccagcaccgtgaacgacaagctggagctgcaggagtgcctggagcacggccggatcgccaagttcagcaaggtgagaaccatcaccacccgaagcaacagcatcaaacaaggcaaggaccagcactttcctgtgttcatgaacgagaaggaggacatcctgtggtgtaccgagatggagagagtgttcgggttcccagtccactacacagatgtcagcaacatgtctagactggccagacagagactgctgggaagaagctggtccgtccctgtgatcagacacctgttcgcccctctgaaggagtacttcgcctgcgtgagcagcggcaacagcaacgccaacagccggggccccagcttctctagcggcctggtgccactgtccctgagagggagccacatgggccccatggagatctacaaaaccgtgagcgcctggaagcggcagcctgtgcgcgtgctgagcctgtttcggaatatcgataaagtcctgaaaagcctgggattcctggagagcggctctggctccggcggtggcaccctgaagtacgtggaggatgtgacaaacgtggtcagacgggatgtggagaagtggggccccttcgatctggtgtacggcagcacccaacccctgggcagctcttgtgaccggtgccctggctggtacatgtttcagttccaccggatcctgcagtacgccctgccgagacaggagtcccagcggccattcttttggattttcatggacaacttgctgctgaccgaggatgaccaggaaactaccactcggttcctgcagaccgaagccgtgaccctgcaggacgtgagaggccgggactaccagaacgccatgcgggtgtggtccaacatccctggactgaaaagcaagcacgcacctctgacccctaaagaagaggagtacctgcaggcccaggtgcggagcagaagcaagctggacgcccctaaggtggatctgctggtgaagaattgcctcctgcccctgagagagtacttcaagtatttcagccagaatagtctgcccctgggaggcagcggcggcggcaagcccggcgccgtgagcttcgccgacgtggccgtgtacttcagccccgaggagtggggctgcctgaggcccgcccagagggccctgtacagggacgtgatgagggagacctacggccacctgggcgccctgggcttcaggggcaccaagcccgccctgatctgctgggtggaggaggaggccgacctgtggggccccgaggccagggaccccgaggtgggcgcctgcctgaccgaggccgacggcggcccaagcagcggcgcccctcctcccagcggcggcagcccagccggctccccaacctctaccgaggagggcacctctgagtccgccacccccgagagcggccctggcacctccaccgagcccagcgagggcagcgcacccggcagccctgccggcagccccacctccacagaggagggaaccagcaccgagcccagcgaaggcagcgccccaggcaccagcaccgagcctagtgagcaggagattaaacggatcaacaagatcagaagaagacttgtgaaagacagcaacaccaagaaggccggcaagacaggccccatgaaaaccctgctggttagagtgatgacacccgatctgagagagcggctggaaaacctgagaaagaagcctgaaaatatcccccagcccatcagcaatacatctagagccaacctgaataagctgctgaccgattacaccgaaatgaagaaggcgatcctgcatgtgtactgggaagagttccagaaggaccctgtgggcctgatgagccgggtggcccagcctgccagcaagaagatcgatcagaacaagctgaaacctgagatggacgagaagggcaacctgaccaccgccggctttgcctgctctcagtgtggccagcccctgttcgtgtacaagctggagcaggtgtctgagaagggcaaggcttacaccaactacttcggacggtgcaatgtggccgagcacgaaaagctgatcctgctggcccagctgaagcccgagaaggatagcgacgaagccgtgacatatagcctgggaaagtttgggcagagggccctggatttctacagcattcatgtgaccaaggagtccacccaccccgtgaagcccctggcccagatcgccggaaacagatacgcctccggacctgtgggaaaggccctgagcgacgcatgtatgggcacaatcgcctccttcctgtctaagtaccaggacatcatcatcgaacaccagaaggtggtgaagggcaaccagaagagactggagagcctgcgggagctggccggcaaggaaaacctggaataccctagcgtgaccctgccacctcagcctcacaccaaggagggcgttgatgcctacaacgaagtgatcgcccgggtgcgaatgtgggtgaacctgaacctgtggcagaagctgaagctaagcagagatgatgccaagcctctgctgagactgaagggattcccttcctttcctctggtcgagagacaggccaacgaagtggactggtgggacatggtgtgtaacgtgaagaagctgatcaacgagaaaaaggaggatggcaaggtgttttggcagaatctggctggctacaagagacaggaagccctgagaccatacctgagcagcgaggaagatcggaagaagggaaagaaattcgctcggtaccagctgggcgacctgctgctgcacctggaaaagaagcacggcgaggactggggaaaggtgtacgacgaggcctgggagcggattgacaagaaagtggaaggcctgagcaagcacatcaagctggaagaggaacggagaagcgaggacgcccagagcaaggccgccctgaccgactggctgcgggctaaggccagcttcgtgatcgagggcctgaaggaggccgacaaggacgagttctgcagatgcgagctgaagctgcagaagtggtacggggacctgcggggaaagcccttcgccatcgaagccgagaacagcatcctggacatcagcggcttcagcaagcagtacaactgtgccttcatctggcagaaggacggcgtgaagaagctgaacctgtacctgatcatcaactacttcaagggcggcaagctgcggttcaagaagatcaaacctgaagccttcgaagccaacagattctacaccgtgatcaacaaaaagagcggcgagatcgtgcccatggaggtgaacttcaacttcgacgaccccaacctgatcatcctgcctctggcctttggcaagagacagggcagagaattcatctggaacgacctgctgtccctggaaaccggcagcctgaagctggccaacggaagagtgatcgagaagacactgtacaacagaagaacccggcaggatgagcctgccctgttcgtggccctgaccttcgagcggcgggaggtcctggactcctccaatatcaaaccaatgaacctgatcggcgtggcaagaggcgaaaacatccccgccgtgatcgccctgaccgaccccgagggctgcccactgagccggtttaaggatagcctgggaaacccaacccacatcctgagaatcggcgagagctataaggagaagcagcggaccatccaggccaagaaggaggtggagcagcggagagccggcggctacagccggaagtacgccagcaaagccaagaatctggcagacgatatggtgagaaacaccgctagagatctgctgtactacgccgtgacccaggatgccatgctgatcttcgccaacctgagccggggcttcggccggcagggcaagcggaccttcatggccgagagacagtacacacggatggaggactggctgaccgccaagctggcctacgagggcctgagcaagacctacctgtccaagacactggcccagtacacctccaagacatgcagcaactgtgggtttaccatcaccagcgccgactacgacagggtgctggagaagctgaagaagacagcaacaggctggatgaccacaattaacggcaaggagctgaaggtggagggccagattacctactacaacagatacaagagacagaacgtagtcaaggacctgtccgtcgagctggatagactgagcgaagaatctgtgaacaacgacatctcctcctggacaaagggcagaagcggagaagctctgagcctcctgaagaaaagattctcccatagacccgtgcaggagaagttcgtgtgcctgaactgcggcttcgagacacacgcagccgagcaagccgccctgaacatcgccagatcctggctgttcctgcggagccaggagtacaagaaataccagacaaacaagacaaccggcaacaccgataagagagccttcgtcgagacctggcagtccttttaccggaagaagcttaaggaggtgtggaaacctgccgtgcggtctggcggatctggcggaggctccaccagccccaagaaaaagagaaaagtctaagctgccttctgcggggcttgccttctggccatgcccttcttctctcccttgcacctgtacctcttggtctttgaataaagcctgagtaggaaggctagcaaaaaaaaaaaaaaaaaaaaaaaaaaaaaaaaaaaaaaaaaaaaaaaaaaaaaaaaaaaaaaaaaaaaaaaaaaaaaaaa

SEQ ID NO: 12572 - RNA, 5785 nt, synthetic construct
  source 1..5785: mol_type = other RNA
aggaaataagagagaaaagaagagtaagaagaaatataagagccaccatggcccctaagaagaagcgtaaagtgagccggatggaacgcctcgtctacgaggtgcggcagaagtgcagaaacatcgaggacatctgcatctcctgcggatctctgaacgtgaccctggagcacccactgttcatcggcggcatgtgccagaactgtaaaaactgttttctggagtgtgcctatcaatacgacgatgacggctaccagagctactgcaccatctgttgcggcggaagagaggtgctgatgtgtggaaataacaactgctgccggtgcttctgcgtggaatgcgtggacctgctggtgggccccggcgccgcccaggccgctattaaggaagatccttggaactgctacatgtgcggccacaagggcacatacggcctgctgagacggagagaggactggcctagcagactgcagatgttcttcgccaataaccacgaccaggagttcgacccccctaaggtgtaccctcccgtccccgccgagaagagaaagcccatccgggtcctgagcctgttcgatggcatcgccaccggtctgctggtgctgaaggacctgggcatccaggtggataggtacattgcctccgaggtgtgcgaggactccatcaccgtgggaatggtgcgtcatcagggcaagatcatgtacgtgggcgacgtgcggagcgtgacacagaagcatatccaggagtggggccctttcgacctggtgatcggcggcagcccttgcaatgacctgagcatcgtgaacccagcccggaagggcctgtacgagggaaccggcagactgttcttcgagttttacagactgctgcacgacgcccggcctaaggaaggcgacgaccggcccttcttttggctgttcgagaatgtggtggccatgggagtcagcgacaagcgggatattagccggttcctggagagcaaccccgtgatgatcgatgccaaggaagtgagcgccgcccaccgggccagatacttctggggcaatctgcctggcatgaacagacccctggccagcaccgtgaacgacaagctggagctgcaggagtgcctggagcacggccggatcgccaagttcagcaaggtgagaaccatcaccacccgaagcaacagcatcaaacaaggcaaggaccagcactttcctgtgttcatgaacgagaaggaggacatcctgtggtgtaccgagatggagagagtgttcgggttcccagtccactacacagatgtcagcaacatgtctagactggccagacagagactgctgggaagaagctggtccgtccctgtgatcagacacctgttcgcccctctgaaggagtacttcgcctgcgtgagcagcggcaacagcaacgccaacagccggggccccagcttctctagcggcctggtgccactgtccctgagagggagccacatgggccccatggagatctacaaaaccgtgagcgcctggaagcggcagcctgtgcgcgtgctgagcctgtttcggaatatcgataaagtcctgaaaagcctgggattcctggagagcggctctggctccggcggtggcaccctgaagtacgtggaggatgtgacaaacgtggtcagacgggatgtggagaagtggggccccttcgatctggtgtacggcagcacccaacccctgggcagctcttgtgaccggtgccctggctggtacatgtttcagttccaccggatcctgcagtacgccctgccgagacaggagtcccagcggccattcttttggattttcatggacaacttgctgctgaccgaggatgaccaggaaactaccactcggttcctgcagaccgaagccgtgaccctgcaggacgtgagaggccgggactaccagaacgccatgcgggtgtggtccaacatccctggactgaaaagcaagcacgcacctctgacccctaaagaagaggagtacctgcaggcccaggtgcggagcagaagcaagctggacgcccctaaggtggatctgctggtgaagaattgcctcctgcccctgagagagtacttcaagtatttcagccagaatagtctgcccctgggaggcagcggcggcggcccccagaagagcgtgaccttcgaggacgtggccgtgtacttcacccagaccgagtgggacggcctgagccccgcccagagggccctgtacagggacgtgatgctggagaactacggcaacgtggccagcctgggcttccccctgctgaagcccgccgtgatcagccagctggagggcggcggcaagctgggcggccccagccccctggccagcggcaccggcaccggcccccagggcctgtggggcggcccaagcagcggcgcccctcctcccagcggcggcagcccagccggctccccaacctctaccgaggagggcacctctgagtccgccacccccgagagcggccctggcacctccaccgagcccagcgagggcagcgcacccggcagccctgccggcagccccacctccacagaggagggaaccagcaccgagcccagcgaaggcagcgccccaggcaccagcaccgagcctagtgagcaggagattaaacggatcaacaagatcagaagaagacttgtgaaagacagcaacaccaagaaggccggcaagacaggccccatgaaaaccctgctggttagagtgatgacacccgatctgagagagcggctggaaaacctgagaaagaagcctgaaaatatcccccagcccatcagcaatacatctagagccaacctgaataagctgctgaccgattacaccgaaatgaagaaggcgatcctgcatgtgtactgggaagagttccagaaggaccctgtgggcctgatgagccgggtggcccagcctgccagcaagaagatcgatcagaacaagctgaaacctgagatggacgagaagggcaacctgaccaccgccggctttgcctgctctcagtgtggccagcccctgttcgtgtacaagctggagcaggtgtctgagaagggcaaggcttacaccaactacttcggacggtgcaatgtggccgagcacgaaaagctgatcctgctggcccagctgaagcccgagaaggatagcgacgaagccgtgacatatagcctgggaaagtttgggcagagggccctggatttctacagcattcatgtgaccaaggagtccacccaccccgtgaagcccctggcccagatcgccggaaacagatacgcctccggacctgtgggaaaggccctgagcgacgcatgtatgggcacaatcgcctccttcctgtctaagtaccaggacatcatcatcgaacaccagaaggtggtgaagggcaaccagaagagactggagagcctgcgggagctggccggcaaggaaaacctggaataccctagcgtgaccctgccacctcagcctcacaccaaggagggcgttgatgcctacaacgaagtgatcgcccgggtgcgaatgtgggtgaacctgaacctgtggcagaagctgaagctaagcagagatgatgccaagcctctgctgagactgaagggattcccttcctttcctctggtcgagagacaggccaacgaagtggactggtgggacatggtgtgtaacgtgaagaagctgatcaacgagaaaaaggaggatggcaaggtgttttggcagaatctggctggctacaagagacaggaagccctgagaccatacctgagcagcgaggaagatcggaagaagggaaagaaattcgctcggtaccagctgggcgacctgctgctgcacctggaaaagaagcacggcgaggactggggaaaggtgtacgacgaggcctgggagcggattgacaagaaagtggaaggcctgagcaagcacatcaagctggaagaggaacggagaagcgaggacgcccagagcaaggccgccctgaccgactggctgcgggctaaggccagcttcgtgatcgagggcctgaaggaggccgacaaggacgagttctgcagatgcgagctgaagctgcagaagtggtacggggacctgcggggaaagcccttcgccatcgaagccgagaacagcatcctggacatcagcggcttcagcaagcagtacaactgtgccttcatctggcagaaggacggcgtgaagaagctgaacctgtacctgatcatcaactacttcaagggcggcaagctgcggttcaagaagatcaaacctgaagccttcgaagccaacagattctacaccgtgatcaacaaaaagagcggcgagatcgtgcccatggaggtgaacttcaacttcgacgaccccaacctgatcatcctgcctctggcctttggcaagagacagggcagagaattcatctggaacgacctgctgtccctggaaaccggcagcctgaagctggccaacggaagagtgatcgagaagacactgtacaacagaagaacccggcaggatgagcctgccctgttcgtggccctgaccttcgagcggcgggaggtcctggactcctccaatatcaaaccaatgaacctgatcggcgtggcaagaggcgaaaacatccccgccgtgatcgccctgaccgaccccgagggctgcccactgagccggtttaaggatagcctgggaaacccaacccacatcctgagaatcggcgagagctataaggagaagcagcggaccatccaggccaagaaggaggtggagcagcggagagccggcggctacagccggaagtacgccagcaaagccaagaatctggcagacgatatggtgagaaacaccgctagagatctgctgtactacgccgtgacccaggatgccatgctgatcttcgccaacctgagccggggcttcggccggcagggcaagcggaccttcatggccgagagacagtacacacggatggaggactggctgaccgccaagctggcctacgagggcctgagcaagacctacctgtccaagacactggcccagtacacctccaagacatgcagcaactgtgggtttaccatcaccagcgccgactacgacagggtgctggagaagctgaagaagacagcaacaggctggatgaccacaattaacggcaaggagctgaaggtggagggccagattacctactacaacagatacaagagacagaacgtagtcaaggacctgtccgtcgagctggatagactgagcgaagaatctgtgaacaacgacatctcctcctggacaaagggcagaagcggagaagctctgagcctcctgaagaaaagattctcccatagacccgtgcaggagaagttcgtgtgcctgaactgcggcttcgagacacacgcagccgagcaagccgccctgaacatcgccagatcctggctgttcctgcggagccaggagtacaagaaataccagacaaacaagacaaccggcaacaccgataagagagccttcgtcgagacctggcagtccttttaccggaagaagcttaaggaggtgtggaaacctgccgtgcggtctggcggatctggcggaggctccaccagccccaagaaaaagagaaaagtctaagctgccttctgcggggcttgccttctggccatgcccttcttctctcccttgcacctgtacctcttggtctttgaataaagcctgagtaggaaggctagcaaaaaaaaaaaaaaaaaaaaaaaaaaaaaaaaaaaaaaaaaaaaaaaaaaaaaaaaaaaaaaaaaaaaaaaaaaaaaaaa

SEQ ID NO: 12573 - RNA, 5785 nt, synthetic construct
  source 1..5785: mol_type = other RNA
aggaaataagagagaaaagaagagtaagaagaaatataagagccaccatggcccctaagaagaagcgtaaagtgagccggatggaacgcctcgtctacgaggtgcggcagaagtgcagaaacatcgaggacatctgcatctcctgcggatctctgaacgtgaccctggagcacccactgttcatcggcggcatgtgccagaactgtaaaaactgttttctggagtgtgcctatcaatacgacgatgacggctaccagagctactgcaccatctgttgcggcggaagagaggtgctgatgtgtggaaataacaactgctgccggtgcttctgcgtggaatgcgtggacctgctggtgggccccggcgccgcccaggccgctattaaggaagatccttggaactgctacatgtgcggccacaagggcacatacggcctgctgagacggagagaggactggcctagcagactgcagatgttcttcgccaataaccacgaccaggagttcgacccccctaaggtgtaccctcccgtccccgccgagaagagaaagcccatccgggtcctgagcctgttcgatggcatcgccaccggtctgctggtgctgaaggacctgggcatccaggtggataggtacattgcctccgaggtgtgcgaggactccatcaccgtgggaatggtgcgtcatcagggcaagatcatgtacgtgggcgacgtgcggagcgtgacacagaagcatatccaggagtggggccctttcgacctggtgatcggcggcagcccttgcaatgacctgagcatcgtgaacccagcccggaagggcctgtacgagggaaccggcagactgttcttcgagttttacagactgctgcacgacgcccggcctaaggaaggcgacgaccggcccttcttttggctgttcgagaatgtggtggccatgggagtcagcgacaagcgggatattagccggttcctggagagcaaccccgtgatgatcgatgccaaggaagtgagcgccgcccaccgggccagatacttctggggcaatctgcctggcatgaacagacccctggccagcaccgtgaacgacaagctggagctgcaggagtgcctggagcacggccggatcgccaagttcagcaaggtgagaaccatcaccacccgaagcaacagcatcaaacaaggcaaggaccagcactttcctgtgttcatgaacgagaaggaggacatcctgtggtgtaccgagatggagagagtgttcgggttcccagtccactacacagatgtcagcaacatgtctagactggccagacagagactgctgggaagaagctggtccgtccctgtgatcagacacctgttcgcccctctgaaggagtacttcgcctgcgtgagcagcggcaacagcaacgccaacagccggggccccagcttctctagcggcctggtgccactgtccctgagagggagccacatgggccccatggagatctacaaaaccgtgagcgcctggaagcggcagcctgtgcgcgtgctgagcctgtttcggaatatcgataaagtcctgaaaagcctgggattcctggagagcggctctggctccggcggtggcaccctgaagtacgtggaggatgtgacaaacgtggtcagacgggatgtggagaagtggggccccttcgatctggtgtacggcagcacccaacccctgggcagctcttgtgaccggtgccctggctggtacatgtttcagttccaccggatcctgcagtacgccctgccgagacaggagtcccagcggccattcttttggattttcatggacaacttgctgctgaccgaggatgaccaggaaactaccactcggttcctgcagaccgaagccgtgaccctgcaggacgtgagaggccgggactaccagaacgccatgcgggtgtggtccaacatccctggactgaaaagcaagcacgcacctctgacccctaaagaagaggagtacctgcaggcccaggtgcggagcagaagcaagctggacgcccctaaggtggatctgctggtgaagaattgcctcctgcccctgagagagtacttcaagtatttcagccagaatagtctgcccctgggaggcagcggcggcggcgacgccgtgacctacgaggacgtgcacgtgaacttcacccacgaggagtgggccctgctggaccccagccagaagagcctgtacaaggacgtgatgctggagacctactggaacctgaccagcatcggctacaagtgggaggaccacaacttcgaggagaactgccagagcagcaggaggcacggcaggcacatcaactgccccagcggctacaagccctgcgagcacgaggagtacggcaagggcggcccaagcagcggcgcccctcctcccagcggcggcagcccagccggctccccaacctctaccgaggagggcacctctgagtccgccacccccgagagcggccctggcacctccaccgagcccagcgagggcagcgcacccggcagccctgccggcagccccacctccacagaggagggaaccagcaccgagcccagcgaaggcagcgccccaggcaccagcaccgagcctagtgagcaggagattaaacggatcaacaagatcagaagaagacttgtgaaagacagcaacaccaagaaggccggcaagacaggccccatgaaaaccctgctggttagagtgatgacacccgatctgagagagcggctggaaaacctgagaaagaagcctgaaaatatcccccagcccatcagcaatacatctagagccaacctgaataagctgctgaccgattacaccgaaatgaagaaggcgatcctgcatgtgtactgggaagagttccagaaggaccctgtgggcctgatgagccgggtggcccagcctgccagcaagaagatcgatcagaacaagctgaaacctgagatggacgagaagggcaacctgaccaccgccggctttgcctgctctcagtgtggccagcccctgttcgtgtacaagctggagcaggtgtctgagaagggcaaggcttacaccaactacttcggacggtgcaatgtggccgagcacgaaaagctgatcctgctggcccagctgaagcccgagaaggatagcgacgaagccgtgacatatagcctgggaaagtttgggcagagggccctggatttctacagcattcatgtgaccaaggagtccacccaccccgtgaagcccctggcccagatcgccggaaacagatacgcctccggacctgtgggaaaggccctgagcgacgcatgtatgggcacaatcgcctccttcctgtctaagtaccaggacatcatcatcgaacaccagaaggtggtgaagggcaaccagaagagactggagagcctgcgggagctggccggcaaggaaaacctggaataccctagcgtgaccctgccacctcagcctcacaccaaggagggcgttgatgcctacaacgaagtgatcgcccgggtgcgaatgtgggtgaacctgaacctgtggcagaagctgaagctaagcagagatgatgccaagcctctgctgagactgaagggattcccttcctttcctctggtcgagagacaggccaacgaagtggactggtgggacatggtgtgtaacgtgaagaagctgatcaacgagaaaaaggaggatggcaaggtgttttggcagaatctggctggctacaagagacaggaagccctgagaccatacctgagcagcgaggaagatcggaagaagggaaagaaattcgctcggtaccagctgggcgacctgctgctgcacctggaaaagaagcacggcgaggactggggaaaggtgtacgacgaggcctgggagcggattgacaagaaagtggaaggcctgagcaagcacatcaagctggaagaggaacggagaagcgaggacgcccagagcaaggccgccctgaccgactggctgcgggctaaggccagcttcgtgatcgagggcctgaaggaggccgacaaggacgagttctgcagatgcgagctgaagctgcagaagtggtacggggacctgcggggaaagcccttcgccatcgaagccgagaacagcatcctggacatcagcggcttcagcaagcagtacaactgtgccttcatctggcagaaggacggcgtgaagaagctgaacctgtacctgatcatcaactacttcaagggcggcaagctgcggttcaagaagatcaaacctgaagccttcgaagccaacagattctacaccgtgatcaacaaaaagagcggcgagatcgtgcccatggaggtgaacttcaacttcgacgaccccaacctgatcatcctgcctctggcctttggcaagagacagggcagagaattcatctggaacgacctgctgtccctggaaaccggcagcctgaagctggccaacggaagagtgatcgagaagacactgtacaacagaagaacccggcaggatgagcctgccctgttcgtggccctgaccttcgagcggcgggaggtcctggactcctccaatatcaaaccaatgaacctgatcggcgtggcaagaggcgaaaacatccccgccgtgatcgccctgaccgaccccgagggctgcccactgagccggtttaaggatagcctgggaaacccaacccacatcctgagaatcggcgagagctataaggagaagcagcggaccatccaggccaagaaggaggtggagcagcggagagccggcggctacagccggaagtacgccagcaaagccaagaatctggcagacgatatggtgagaaacaccgctagagatctgctgtactacgccgtgacccaggatgccatgctgatcttcgccaacctgagccggggcttcggccggcagggcaagcggaccttcatggccgagagacagtacacacggatggaggactggctgaccgccaagctggcctacgagggcctgagcaagacctacctgtccaagacactggcccagtacacctccaagacatgcagcaactgtgggtttaccatcaccagcgccgactacgacagggtgctggagaagctgaagaagacagcaacaggctggatgaccacaattaacggcaaggagctgaaggtggagggccagattacctactacaacagatacaagagacagaacgtagtcaaggacctgtccgtcgagctggatagactgagcgaagaatctgtgaacaacgacatctcctcctggacaaagggcagaagcggagaagctctgagcctcctgaagaaaagattctcccatagacccgtgcaggagaagttcgtgtgcctgaactgcggcttcgagacacacgcagccgagcaagccgccctgaacatcgccagatcctggctgttcctgcggagccaggagtacaagaaataccagacaaacaagacaaccggcaacaccgataagagagccttcgtcgagacctggcagtccttttaccggaagaagcttaaggaggtgtggaaacctgccgtgcggtctggcggatctggcggaggctccaccagccccaagaaaaagagaaaagtctaagctgccttctgcggggcttgccttctggccatgcccttcttctctcccttgcacctgtacctcttggtctttgaataaagcctgagtaggaaggctagcaaaaaaaaaaaaaaaaaaaaaaaaaaaaaaaaaaaaaaaaaaaaaaaaaaaaaaaaaaaaaaaaaaaaaaaaaaaaaaaa

SEQ ID NO: 12574 - RNA, 5785 nt, synthetic construct
  source 1..5785: mol_type = other RNA
aggaaataagagagaaaagaagagtaagaagaaatataagagccaccatggcccctaagaagaagcgtaaagtgagccggatggaacgcctcgtctacgaggtgcggcagaagtgcagaaacatcgaggacatctgcatctcctgcggatctctgaacgtgaccctggagcacccactgttcatcggcggcatgtgccagaactgtaaaaactgttttctggagtgtgcctatcaatacgacgatgacggctaccagagctactgcaccatctgttgcggcggaagagaggtgctgatgtgtggaaataacaactgctgccggtgcttctgcgtggaatgcgtggacctgctggtgggccccggcgccgcccaggccgctattaaggaagatccttggaactgctacatgtgcggccacaagggcacatacggcctgctgagacggagagaggactggcctagcagactgcagatgttcttcgccaataaccacgaccaggagttcgacccccctaaggtgtaccctcccgtccccgccgagaagagaaagcccatccgggtcctgagcctgttcgatggcatcgccaccggtctgctggtgctgaaggacctgggcatccaggtggataggtacattgcctccgaggtgtgcgaggactccatcaccgtgggaatggtgcgtcatcagggcaagatcatgtacgtgggcgacgtgcggagcgtgacacagaagcatatccaggagtggggccctttcgacctggtgatcggcggcagcccttgcaatgacctgagcatcgtgaacccagcccggaagggcctgtacgagggaaccggcagactgttcttcgagttttacagactgctgcacgacgcccggcctaaggaaggcgacgaccggcccttcttttggctgttcgagaatgtggtggccatgggagtcagcgacaagcgggatattagccggttcctggagagcaaccccgtgatgatcgatgccaaggaagtgagcgccgcccaccgggccagatacttctggggcaatctgcctggcatgaacagacccctggccagcaccgtgaacgacaagctggagctgcaggagtgcctggagcacggccggatcgccaagttcagcaaggtgagaaccatcaccacccgaagcaacagcatcaaacaaggcaaggaccagcactttcctgtgttcatgaacgagaaggaggacatcctgtggtgtaccgagatggagagagtgttcgggttcccagtccactacacagatgtcagcaacatgtctagactggccagacagagactgctgggaagaagctggtccgtccctgtgatcagacacctgttcgcccctctgaaggagtacttcgcctgcgtgagcagcggcaacagcaacgccaacagccggggccccagcttctctagcggcctggtgccactgtccctgagagggagccacatgggccccatggagatctacaaaaccgtgagcgcctggaagcggcagcctgtgcgcgtgctgagcctgtttcggaatatcgataaagtcctgaaaagcctgggattcctggagagcggctctggctccggcggtggcaccctgaagtacgtggaggatgtgacaaacgtggtcagacgggatgtggagaagtggggccccttcgatctggtgtacggcagcacccaacccctgggcagctcttgtgaccggtgccctggctggtacatgtttcagttccaccggatcctgcagtacgccctgccgagacaggagtcccagcggccattcttttggattttcatggacaacttgctgctgaccgaggatgaccaggaaactaccactcggttcctgcagaccgaagccgtgaccctgcaggacgtgagaggccgggactaccagaacgccatgcgggtgtggtccaacatccctggactgaaaagcaagcacgcacctctgacccctaaagaagaggagtacctgcaggcccaggtgcggagcagaagcaagctggacgcccctaaggtggatctgctggtgaagaattgcctcctgcccctgagagagtacttcaagtatttcagccagaatagtctgcccctgggaggcagcggcggcggcttccaggaggccgtgaccttcaaggacgtggccgtgaccttcaccgaggaggagctgggcctgctggacagcacccagaggaagctgtacagggacgtgatgctggagaacttcaggaacctgctgctggtgggcaaccagcccttcaagcccgagctgatcttccagctggagagggaggagatgctgctgatgctggagaccgagatccagaggggcaccaagagccaccacagcctggagggcggcccaagcagcggcgcccctcctcccagcggcggcagcccagccggctccccaacctctaccgaggagggcacctctgagtccgccacccccgagagcggccctggcacctccaccgagcccagcgagggcagcgcacccggcagccctgccggcagccccacctccacagaggagggaaccagcaccgagcccagcgaaggcagcgccccaggcaccagcaccgagcctagtgagcaggagattaaacggatcaacaagatcagaagaagacttgtgaaagacagcaacaccaagaaggccggcaagacaggccccatgaaaaccctgctggttagagtgatgacacccgatctgagagagcggctggaaaacctgagaaagaagcctgaaaatatcccccagcccatcagcaatacatctagagccaacctgaataagctgctgaccgattacaccgaaatgaagaaggcgatcctgcatgtgtactgggaagagttccagaaggaccctgtgggcctgatgagccgggtggcccagcctgccagcaagaagatcgatcagaacaagctgaaacctgagatggacgagaagggcaacctgaccaccgccggctttgcctgctctcagtgtggccagcccctgttcgtgtacaagctggagcaggtgtctgagaagggcaaggcttacaccaactacttcggacggtgcaatgtggccgagcacgaaaagctgatcctgctggcccagctgaagcccgagaaggatagcgacgaagccgtgacatatagcctgggaaagtttgggcagagggccctggatttctacagcattcatgtgaccaaggagtccacccaccccgtgaagcccctggcccagatcgccggaaacagatacgcctccggacctgtgggaaaggccctgagcgacgcatgtatgggcacaatcgcctccttcctgtctaagtaccaggacatcatcatcgaacaccagaaggtggtgaagggcaaccagaagagactggagagcctgcgggagctggccggcaaggaaaacctggaataccctagcgtgaccctgccacctcagcctcacaccaaggagggcgttgatgcctacaacgaagtgatcgcccgggtgcgaatgtgggtgaacctgaacctgtggcagaagctgaagctaagcagagatgatgccaagcctctgctgagactgaagggattcccttcctttcctctggtcgagagacaggccaacgaagtggactggtgggacatggtgtgtaacgtgaagaagctgatcaacgagaaaaaggaggatggcaaggtgttttggcagaatctggctggctacaagagacaggaagccctgagaccatacctgagcagcgaggaagatcggaagaagggaaagaaattcgctcggtaccagctgggcgacctgctgctgcacctggaaaagaagcacggcgaggactggggaaaggtgtacgacgaggcctgggagcggattgacaagaaagtggaaggcctgagcaagcacatcaagctggaagaggaacggagaagcgaggacgcccagagcaaggccgccctgaccgactggctgcgggctaaggccagcttcgtgatcgagggcctgaaggaggccgacaaggacgagttctgcagatgcgagctgaagctgcagaagtggtacggggacctgcggggaaagcccttcgccatcgaagccgagaacagcatcctggacatcagcggcttcagcaagcagtacaactgtgccttcatctggcagaaggacggcgtgaagaagctgaacctgtacctgatcatcaactacttcaagggcggcaagctgcggttcaagaagatcaaacctgaagccttcgaagccaacagattctacaccgtgatcaacaaaaagagcggcgagatcgtgcccatggaggtgaacttcaacttcgacgaccccaacctgatcatcctgcctctggcctttggcaagagacagggcagagaattcatctggaacgacctgctgtccctggaaaccggcagcctgaagctggccaacggaagagtgatcgagaagacactgtacaacagaagaacccggcaggatgagcctgccctgttcgtggccctgaccttcgagcggcgggaggtcctggactcctccaatatcaaaccaatgaacctgatcggcgtggcaagaggcgaaaacatccccgccgtgatcgccctgaccgaccccgagggctgcccactgagccggtttaaggatagcctgggaaacccaacccacatcctgagaatcggcgagagctataaggagaagcagcggaccatccaggccaagaaggaggtggagcagcggagagccggcggctacagccggaagtacgccagcaaagccaagaatctggcagacgatatggtgagaaacaccgctagagatctgctgtactacgccgtgacccaggatgccatgctgatcttcgccaacctgagccggggcttcggccggcagggcaagcggaccttcatggccgagagacagtacacacggatggaggactggctgaccgccaagctggcctacgagggcctgagcaagacctacctgtccaagacactggcccagtacacctccaagacatgcagcaactgtgggtttaccatcaccagcgccgactacgacagggtgctggagaagctgaagaagacagcaacaggctggatgaccacaattaacggcaaggagctgaaggtggagggccagattacctactacaacagatacaagagacagaacgtagtcaaggacctgtccgtcgagctggatagactgagcgaagaatctgtgaacaacgacatctcctcctggacaaagggcagaagcggagaagctctgagcctcctgaagaaaagattctcccatagacccgtgcaggagaagttcgtgtgcctgaactgcggcttcgagacacacgcagccgagcaagccgccctgaacatcgccagatcctggctgttcctgcggagccaggagtacaagaaataccagacaaacaagacaaccggcaacaccgataagagagccttcgtcgagacctggcagtccttttaccggaagaagcttaaggaggtgtggaaacctgccgtgcggtctggcggatctggcggaggctccaccagccccaagaaaaagagaaaagtctaagctgccttctgcggggcttgccttctggccatgcccttcttctctcccttgcacctgtacctcttggtctttgaataaagcctgagtaggaaggctagcaaaaaaaaaaaaaaaaaaaaaaaaaaaaaaaaaaaaaaaaaaaaaaaaaaaaaaaaaaaaaaaaaaaaaaaaaaaaaaaa

SEQ ID NO: 12575 - RNA, 5785 nt, synthetic construct
  source 1..5785: mol_type = other RNA
aggaaataagagagaaaagaagagtaagaagaaatataagagccaccatggcccctaagaagaagcgtaaagtgagccggatggaacgcctcgtctacgaggtgcggcagaagtgcagaaacatcgaggacatctgcatctcctgcggatctctgaacgtgaccctggagcacccactgttcatcggcggcatgtgccagaactgtaaaaactgttttctggagtgtgcctatcaatacgacgatgacggctaccagagctactgcaccatctgttgcggcggaagagaggtgctgatgtgtggaaataacaactgctgccggtgcttctgcgtggaatgcgtggacctgctggtgggccccggcgccgcccaggccgctattaaggaagatccttggaactgctacatgtgcggccacaagggcacatacggcctgctgagacggagagaggactggcctagcagactgcagatgttcttcgccaataaccacgaccaggagttcgacccccctaaggtgtaccctcccgtccccgccgagaagagaaagcccatccgggtcctgagcctgttcgatggcatcgccaccggtctgctggtgctgaaggacctgggcatccaggtggataggtacattgcctccgaggtgtgcgaggactccatcaccgtgggaatggtgcgtcatcagggcaagatcatgtacgtgggcgacgtgcggagcgtgacacagaagcatatccaggagtggggccctttcgacctggtgatcggcggcagcccttgcaatgacctgagcatcgtgaacccagcccggaagggcctgtacgagggaaccggcagactgttcttcgagttttacagactgctgcacgacgcccggcctaaggaaggcgacgaccggcccttcttttggctgttcgagaatgtggtggccatgggagtcagcgacaagcgggatattagccggttcctggagagcaaccccgtgatgatcgatgccaaggaagtgagcgccgcccaccgggccagatacttctggggcaatctgcctggcatgaacagacccctggccagcaccgtgaacgacaagctggagctgcaggagtgcctggagcacggccggatcgccaagttcagcaaggtgagaaccatcaccacccgaagcaacagcatcaaacaaggcaaggaccagcactttcctgtgttcatgaacgagaaggaggacatcctgtggtgtaccgagatggagagagtgttcgggttcccagtccactacacagatgtcagcaacatgtctagactggccagacagagactgctgggaagaagctggtccgtccctgtgatcagacacctgttcgcccctctgaaggagtacttcgcctgcgtgagcagcggcaacagcaacgccaacagccggggccccagcttctctagcggcctggtgccactgtccctgagagggagccacatgggccccatggagatctacaaaaccgtgagcgcctggaagcggcagcctgtgcgcgtgctgagcctgtttcggaatatcgataaagtcctgaaaagcctgggattcctggagagcggctctggctccggcggtggcaccctgaagtacgtggaggatgtgacaaacgtggtcagacgggatgtggagaagtggggccccttcgatctggtgtacggcagcacccaacccctgggcagctcttgtgaccggtgccctggctggtacatgtttcagttccaccggatcctgcagtacgccctgccgagacaggagtcccagcggccattcttttggattttcatggacaacttgctgctgaccgaggatgaccaggaaactaccactcggttcctgcagaccgaagccgtgaccctgcaggacgtgagaggccgggactaccagaacgccatgcgggtgtggtccaacatccctggactgaaaagcaagcacgcacctctgacccctaaagaagaggagtacctgcaggcccaggtgcggagcagaagcaagctggacgcccctaaggtggatctgctggtgaagaattgcctcctgcccctgagagagtacttcaagtatttcagccagaatagtctgcccctgggaggcagcggcggcggcatggagggcctggtgatgttccaggacctgagcatcgacttcagccaggaggagtgggagtgcctggacgccgcccagaaggacctgtacagggacgtgatgatggagaactacagcagcctggtgagcctgggcctgagcacccccaagcccgacgtgatcagcctgctggagcagggcaaggagccctggatggtgagcagggacgtgctgggcggctggtgccccgacaggctgaagaagggcggcccaagcagcggcgcccctcctcccagcggcggcagcccagccggctccccaacctctaccgaggagggcacctctgagtccgccacccccgagagcggccctggcacctccaccgagcccagcgagggcagcgcacccggcagccctgccggcagccccacctccacagaggagggaaccagcaccgagcccagcgaaggcagcgccccaggcaccagcaccgagcctagtgagcaggagattaaacggatcaacaagatcagaagaagacttgtgaaagacagcaacaccaagaaggccggcaagacaggccccatgaaaaccctgctggttagagtgatgacacccgatctgagagagcggctggaaaacctgagaaagaagcctgaaaatatcccccagcccatcagcaatacatctagagccaacctgaataagctgctgaccgattacaccgaaatgaagaaggcgatcctgcatgtgtactgggaagagttccagaaggaccctgtgggcctgatgagccgggtggcccagcctgccagcaagaagatcgatcagaacaagctgaaacctgagatggacgagaagggcaacctgaccaccgccggctttgcctgctctcagtgtggccagcccctgttcgtgtacaagctggagcaggtgtctgagaagggcaaggcttacaccaactacttcggacggtgcaatgtggccgagcacgaaaagctgatcctgctggcccagctgaagcccgagaaggatagcgacgaagccgtgacatatagcctgggaaagtttgggcagagggccctggatttctacagcattcatgtgaccaaggagtccacccaccccgtgaagcccctggcccagatcgccggaaacagatacgcctccggacctgtgggaaaggccctgagcgacgcatgtatgggcacaatcgcctccttcctgtctaagtaccaggacatcatcatcgaacaccagaaggtggtgaagggcaaccagaagagactggagagcctgcgggagctggccggcaaggaaaacctggaataccctagcgtgaccctgccacctcagcctcacaccaaggagggcgttgatgcctacaacgaagtgatcgcccgggtgcgaatgtgggtgaacctgaacctgtggcagaagctgaagctaagcagagatgatgccaagcctctgctgagactgaagggattcccttcctttcctctggtcgagagacaggccaacgaagtggactggtgggacatggtgtgtaacgtgaagaagctgatcaacgagaaaaaggaggatggcaaggtgttttggcagaatctggctggctacaagagacaggaagccctgagaccatacctgagcagcgaggaagatcggaagaagggaaagaaattcgctcggtaccagctgggcgacctgctgctgcacctggaaaagaagcacggcgaggactggggaaaggtgtacgacgaggcctgggagcggattgacaagaaagtggaaggcctgagcaagcacatcaagctggaagaggaacggagaagcgaggacgcccagagcaaggccgccctgaccgactggctgcgggctaaggccagcttcgtgatcgagggcctgaaggaggccgacaaggacgagttctgcagatgcgagctgaagctgcagaagtggtacggggacctgcggggaaagcccttcgccatcgaagccgagaacagcatcctggacatcagcggcttcagcaagcagtacaactgtgccttcatctggcagaaggacggcgtgaagaagctgaacctgtacctgatcatcaactacttcaagggcggcaagctgcggttcaagaagatcaaacctgaagccttcgaagccaacagattctacaccgtgatcaacaaaaagagcggcgagatcgtgcccatggaggtgaacttcaacttcgacgaccccaacctgatcatcctgcctctggcctttggcaagagacagggcagagaattcatctggaacgacctgctgtccctggaaaccggcagcctgaagctggccaacggaagagtgatcgagaagacactgtacaacagaagaacccggcaggatgagcctgccctgttcgtggccctgaccttcgagcggcgggaggtcctggactcctccaatatcaaaccaatgaacctgatcggcgtggcaagaggcgaaaacatccccgccgtgatcgccctgaccgaccccgagggctgcccactgagccggtttaaggatagcctgggaaacccaacccacatcctgagaatcggcgagagctataaggagaagcagcggaccatccaggccaagaaggaggtggagcagcggagagccggcggctacagccggaagtacgccagcaaagccaagaatctggcagacgatatggtgagaaacaccgctagagatctgctgtactacgccgtgacccaggatgccatgctgatcttcgccaacctgagccggggcttcggccggcagggcaagcggaccttcatggccgagagacagtacacacggatggaggactggctgaccgccaagctggcctacgagggcctgagcaagacctacctgtccaagacactggcccagtacacctccaagacatgcagcaactgtgggtttaccatcaccagcgccgactacgacagggtgctggagaagctgaagaagacagcaacaggctggatgaccacaattaacggcaaggagctgaaggtggagggccagattacctactacaacagatacaagagacagaacgtagtcaaggacctgtccgtcgagctggatagactgagcgaagaatctgtgaacaacgacatctcctcctggacaaagggcagaagcggagaagctctgagcctcctgaagaaaagattctcccatagacccgtgcaggagaagttcgtgtgcctgaactgcggcttcgagacacacgcagccgagcaagccgccctgaacatcgccagatcctggctgttcctgcggagccaggagtacaagaaataccagacaaacaagacaaccggcaacaccgataagagagccttcgtcgagacctggcagtccttttaccggaagaagcttaaggaggtgtggaaacctgccgtgcggtctggcggatctggcggaggctccaccagccccaagaaaaagagaaaagtctaagctgccttctgcggggcttgccttctggccatgcccttcttctctcccttgcacctgtacctcttggtctttgaataaagcctgagtaggaaggctagcaaaaaaaaaaaaaaaaaaaaaaaaaaaaaaaaaaaaaaaaaaaaaaaaaaaaaaaaaaaaaaaaaaaaaaaaaaaaaaaa

SEQ ID NO: 12576 - RNA, 5785 nt, synthetic construct
  source 1..5785: mol_type = other RNA
aggaaataagagagaaaagaagagtaagaagaaatataagagccaccatggcccctaagaagaagcgtaaagtgagccggatggaacgcctcgtctacgaggtgcggcagaagtgcagaaacatcgaggacatctgcatctcctgcggatctctgaacgtgaccctggagcacccactgttcatcggcggcatgtgccagaactgtaaaaactgttttctggagtgtgcctatcaatacgacgatgacggctaccagagctactgcaccatctgttgcggcggaagagaggtgctgatgtgtggaaataacaactgctgccggtgcttctgcgtggaatgcgtggacctgctggtgggccccggcgccgcccaggccgctattaaggaagatccttggaactgctacatgtgcggccacaagggcacatacggcctgctgagacggagagaggactggcctagcagactgcagatgttcttcgccaataaccacgaccaggagttcgacccccctaaggtgtaccctcccgtccccgccgagaagagaaagcccatccgggtcctgagcctgttcgatggcatcgccaccggtctgctggtgctgaaggacctgggcatccaggtggataggtacattgcctccgaggtgtgcgaggactccatcaccgtgggaatggtgcgtcatcagggcaagatcatgtacgtgggcgacgtgcggagcgtgacacagaagcatatccaggagtggggccctttcgacctggtgatcggcggcagcccttgcaatgacctgagcatcgtgaacccagcccggaagggcctgtacgagggaaccggcagactgttcttcgagttttacagactgctgcacgacgcccggcctaaggaaggcgacgaccggcccttcttttggctgttcgagaatgtggtggccatgggagtcagcgacaagcgggatattagccggttcctggagagcaaccccgtgatgatcgatgccaaggaagtgagcgccgcccaccgggccagatacttctggggcaatctgcctggcatgaacagacccctggccagcaccgtgaacgacaagctggagctgcaggagtgcctggagcacggccggatcgccaagttcagcaaggtgagaaccatcaccacccgaagcaacagcatcaaacaaggcaaggaccagcactttcctgtgttcatgaacgagaaggaggacatcctgtggtgtaccgagatggagagagtgttcgggttcccagtccactacacagatgtcagcaacatgtctagactggccagacagagactgctgggaagaagctggtccgtccctgtgatcagacacctgttcgcccctctgaaggagtacttcgcctgcgtgagcagcggcaacagcaacgccaacagccggggccccagcttctctagcggcctggtgccactgtccctgagagggagccacatgggccccatggagatctacaaaaccgtgagcgcctggaagcggcagcctgtgcgcgtgctgagcctgtttcggaatatcgataaagtcctgaaaagcctgggattcctggagagcggctctggctccggcggtggcaccctgaagtacgtggaggatgtgacaaacgtggtcagacgggatgtggagaagtggggccccttcgatctggtgtacggcagcacccaacccctgggcagctcttgtgaccggtgccctggctggtacatgtttcagttccaccggatcctgcagtacgccctgccgagacaggagtcccagcggccattcttttggattttcatggacaacttgctgctgaccgaggatgaccaggaaactaccactcggttcctgcagaccgaagccgtgaccctgcaggacgtgagaggccgggactaccagaacgccatgcgggtgtggtccaacatccctggactgaaaagcaagcacgcacctctgacccctaaagaagaggagtacctgcaggcccaggtgcggagcagaagcaagctggacgcccctaaggtggatctgctggtgaagaattgcctcctgcccctgagagagtacttcaagtatttcagccagaatagtctgcccctgggaggcagcggcggcggcacccaggagcacgtgaccttcagggacgtggccgtgttcttcagccaggacgagtggctgcacctggacagcgcccagagggccctgtacagggaggtgatgctggagaactacagcagcctggtgagcctgggcatccccttcagcatgcccaagctgatccaccagctgcagcagggcgaggacccctgcatggtggagagggaggtgagcgccgacacctgcctgggcttcaagacctggggcggcccaagcagcggcgcccctcctcccagcggcggcagcccagccggctccccaacctctaccgaggagggcacctctgagtccgccacccccgagagcggccctggcacctccaccgagcccagcgagggcagcgcacccggcagccctgccggcagccccacctccacagaggagggaaccagcaccgagcccagcgaaggcagcgccccaggcaccagcaccgagcctagtgagcaggagattaaacggatcaacaagatcagaagaagacttgtgaaagacagcaacaccaagaaggccggcaagacaggccccatgaaaaccctgctggttagagtgatgacacccgatctgagagagcggctggaaaacctgagaaagaagcctgaaaatatcccccagcccatcagcaatacatctagagccaacctgaataagctgctgaccgattacaccgaaatgaagaaggcgatcctgcatgtgtactgggaagagttccagaaggaccctgtgggcctgatgagccgggtggcccagcctgccagcaagaagatcgatcagaacaagctgaaacctgagatggacgagaagggcaacctgaccaccgccggctttgcctgctctcagtgtggccagcccctgttcgtgtacaagctggagcaggtgtctgagaagggcaaggcttacaccaactacttcggacggtgcaatgtggccgagcacgaaaagctgatcctgctggcccagctgaagcccgagaaggatagcgacgaagccgtgacatatagcctgggaaagtttgggcagagggccctggatttctacagcattcatgtgaccaaggagtccacccaccccgtgaagcccctggcccagatcgccggaaacagatacgcctccggacctgtgggaaaggccctgagcgacgcatgtatgggcacaatcgcctccttcctgtctaagtaccaggacatcatcatcgaacaccagaaggtggtgaagggcaaccagaagagactggagagcctgcgggagctggccggcaaggaaaacctggaataccctagcgtgaccctgccacctcagcctcacaccaaggagggcgttgatgcctacaacgaagtgatcgcccgggtgcgaatgtgggtgaacctgaacctgtggcagaagctgaagctaagcagagatgatgccaagcctctgctgagactgaagggattcccttcctttcctctggtcgagagacaggccaacgaagtggactggtgggacatggtgtgtaacgtgaagaagctgatcaacgagaaaaaggaggatggcaaggtgttttggcagaatctggctggctacaagagacaggaagccctgagaccatacctgagcagcgaggaagatcggaagaagggaaagaaattcgctcggtaccagctgggcgacctgctgctgcacctggaaaagaagcacggcgaggactggggaaaggtgtacgacgaggcctgggagcggattgacaagaaagtggaaggcctgagcaagcacatcaagctggaagaggaacggagaagcgaggacgcccagagcaaggccgccctgaccgactggctgcgggctaaggccagcttcgtgatcgagggcctgaaggaggccgacaaggacgagttctgcagatgcgagctgaagctgcagaagtggtacggggacctgcggggaaagcccttcgccatcgaagccgagaacagcatcctggacatcagcggcttcagcaagcagtacaactgtgccttcatctggcagaaggacggcgtgaagaagctgaacctgtacctgatcatcaactacttcaagggcggcaagctgcggttcaagaagatcaaacctgaagccttcgaagccaacagattctacaccgtgatcaacaaaaagagcggcgagatcgtgcccatggaggtgaacttcaacttcgacgaccccaacctgatcatcctgcctctggcctttggcaagagacagggcagagaattcatctggaacgacctgctgtccctggaaaccggcagcctgaagctggccaacggaagagtgatcgagaagacactgtacaacagaagaacccggcaggatgagcctgccctgttcgtggccctgaccttcgagcggcgggaggtcctggactcctccaatatcaaaccaatgaacctgatcggcgtggcaagaggcgaaaacatccccgccgtgatcgccctgaccgaccccgagggctgcccactgagccggtttaaggatagcctgggaaacccaacccacatcctgagaatcggcgagagctataaggagaagcagcggaccatccaggccaagaaggaggtggagcagcggagagccggcggctacagccggaagtacgccagcaaagccaagaatctggcagacgatatggtgagaaacaccgctagagatctgctgtactacgccgtgacccaggatgccatgctgatcttcgccaacctgagccggggcttcggccggcagggcaagcggaccttcatggccgagagacagtacacacggatggaggactggctgaccgccaagctggcctacgagggcctgagcaagacctacctgtccaagacactggcccagtacacctccaagacatgcagcaactgtgggtttaccatcaccagcgccgactacgacagggtgctggagaagctgaagaagacagcaacaggctggatgaccacaattaacggcaaggagctgaaggtggagggccagattacctactacaacagatacaagagacagaacgtagtcaaggacctgtccgtcgagctggatagactgagcgaagaatctgtgaacaacgacatctcctcctggacaaagggcagaagcggagaagctctgagcctcctgaagaaaagattctcccatagacccgtgcaggagaagttcgtgtgcctgaactgcggcttcgagacacacgcagccgagcaagccgccctgaacatcgccagatcctggctgttcctgcggagccaggagtacaagaaataccagacaaacaagacaaccggcaacaccgataagagagccttcgtcgagacctggcagtccttttaccggaagaagcttaaggaggtgtggaaacctgccgtgcggtctggcggatctggcggaggctccaccagccccaagaaaaagagaaaagtctaagctgccttctgcggggcttgccttctggccatgcccttcttctctcccttgcacctgtacctcttggtctttgaataaagcctgagtaggaaggctagcaaaaaaaaaaaaaaaaaaaaaaaaaaaaaaaaaaaaaaaaaaaaaaaaaaaaaaaaaaaaaaaaaaaaaaaaaaaaaaaa

SEQ ID NO: 12577 - RNA, 5785 nt, synthetic construct
  source 1..5785: mol_type = other RNA
aggaaataagagagaaaagaagagtaagaagaaatataagagccaccatggcccctaagaagaagcgtaaagtgagccggatggaacgcctcgtctacgaggtgcggcagaagtgcagaaacatcgaggacatctgcatctcctgcggatctctgaacgtgaccctggagcacccactgttcatcggcggcatgtgccagaactgtaaaaactgttttctggagtgtgcctatcaatacgacgatgacggctaccagagctactgcaccatctgttgcggcggaagagaggtgctgatgtgtggaaataacaactgctgccggtgcttctgcgtggaatgcgtggacctgctggtgggccccggcgccgcccaggccgctattaaggaagatccttggaactgctacatgtgcggccacaagggcacatacggcctgctgagacggagagaggactggcctagcagactgcagatgttcttcgccaataaccacgaccaggagttcgacccccctaaggtgtaccctcccgtccccgccgagaagagaaagcccatccgggtcctgagcctgttcgatggcatcgccaccggtctgctggtgctgaaggacctgggcatccaggtggataggtacattgcctccgaggtgtgcgaggactccatcaccgtgggaatggtgcgtcatcagggcaagatcatgtacgtgggcgacgtgcggagcgtgacacagaagcatatccaggagtggggccctttcgacctggtgatcggcggcagcccttgcaatgacctgagcatcgtgaacccagcccggaagggcctgtacgagggaaccggcagactgttcttcgagttttacagactgctgcacgacgcccggcctaaggaaggcgacgaccggcccttcttttggctgttcgagaatgtggtggccatgggagtcagcgacaagcgggatattagccggttcctggagagcaaccccgtgatgatcgatgccaaggaagtgagcgccgcccaccgggccagatacttctggggcaatctgcctggcatgaacagacccctggccagcaccgtgaacgacaagctggagctgcaggagtgcctggagcacggccggatcgccaagttcagcaaggtgagaaccatcaccacccgaagcaacagcatcaaacaaggcaaggaccagcactttcctgtgttcatgaacgagaaggaggacatcctgtggtgtaccgagatggagagagtgttcgggttcccagtccactacacagatgtcagcaacatgtctagactggccagacagagactgctgggaagaagctggtccgtccctgtgatcagacacctgttcgcccctctgaaggagtacttcgcctgcgtgagcagcggcaacagcaacgccaacagccggggccccagcttctctagcggcctggtgccactgtccctgagagggagccacatgggccccatggagatctacaaaaccgtgagcgcctggaagcggcagcctgtgcgcgtgctgagcctgtttcggaatatcgataaagtcctgaaaagcctgggattcctggagagcggctctggctccggcggtggcaccctgaagtacgtggaggatgtgacaaacgtggtcagacgggatgtggagaagtggggccccttcgatctggtgtacggcagcacccaacccctgggcagctcttgtgaccggtgccctggctggtacatgtttcagttccaccggatcctgcagtacgccctgccgagacaggagtcccagcggccattcttttggattttcatggacaacttgctgctgaccgaggatgaccaggaaactaccactcggttcctgcagaccgaagccgtgaccctgcaggacgtgagaggccgggactaccagaacgccatgcgggtgtggtccaacatccctggactgaaaagcaagcacgcacctctgacccctaaagaagaggagtacctgcaggcccaggtgcggagcagaagcaagctggacgcccctaaggtggatctgctggtgaagaattgcctcctgcccctgagagagtacttcaagtatttcagccagaatagtctgcccctgggaggcagcggcggcggccaggccgaggtgaccttcgaggacgtggccgtgctgttcagcagggaggagtggggcaggctgggccccgcccagaggggcctgtacagggacgtgatgctggagacctacaggaacctggtgagcctgggcgccggccccgccggccccaagcccggcgtgatcacccagctggagcagggcgacgagccctgggtgctggacgcccagggcgccaagggcaaggagaggctgagggtgagcggcggcccaagcagcggcgcccctcctcccagcggcggcagcccagccggctccccaacctctaccgaggagggcacctctgagtccgccacccccgagagcggccctggcacctccaccgagcccagcgagggcagcgcacccggcagccctgccggcagccccacctccacagaggagggaaccagcaccgagcccagcgaaggcagcgccccaggcaccagcaccgagcctagtgagcaggagattaaacggatcaacaagatcagaagaagacttgtgaaagacagcaacaccaagaaggccggcaagacaggccccatgaaaaccctgctggttagagtgatgacacccgatctgagagagcggctggaaaacctgagaaagaagcctgaaaatatcccccagcccatcagcaatacatctagagccaacctgaataagctgctgaccgattacaccgaaatgaagaaggcgatcctgcatgtgtactgggaagagttccagaaggaccctgtgggcctgatgagccgggtggcccagcctgccagcaagaagatcgatcagaacaagctgaaacctgagatggacgagaagggcaacctgaccaccgccggctttgcctgctctcagtgtggccagcccctgttcgtgtacaagctggagcaggtgtctgagaagggcaaggcttacaccaactacttcggacggtgcaatgtggccgagcacgaaaagctgatcctgctggcccagctgaagcccgagaaggatagcgacgaagccgtgacatatagcctgggaaagtttgggcagagggccctggatttctacagcattcatgtgaccaaggagtccacccaccccgtgaagcccctggcccagatcgccggaaacagatacgcctccggacctgtgggaaaggccctgagcgacgcatgtatgggcacaatcgcctccttcctgtctaagtaccaggacatcatcatcgaacaccagaaggtggtgaagggcaaccagaagagactggagagcctgcgggagctggccggcaaggaaaacctggaataccctagcgtgaccctgccacctcagcctcacaccaaggagggcgttgatgcctacaacgaagtgatcgcccgggtgcgaatgtgggtgaacctgaacctgtggcagaagctgaagctaagcagagatgatgccaagcctctgctgagactgaagggattcccttcctttcctctggtcgagagacaggccaacgaagtggactggtgggacatggtgtgtaacgtgaagaagctgatcaacgagaaaaaggaggatggcaaggtgttttggcagaatctggctggctacaagagacaggaagccctgagaccatacctgagcagcgaggaagatcggaagaagggaaagaaattcgctcggtaccagctgggcgacctgctgctgcacctggaaaagaagcacggcgaggactggggaaaggtgtacgacgaggcctgggagcggattgacaagaaagtggaaggcctgagcaagcacatcaagctggaagaggaacggagaagcgaggacgcccagagcaaggccgccctgaccgactggctgcgggctaaggccagcttcgtgatcgagggcctgaaggaggccgacaaggacgagttctgcagatgcgagctgaagctgcagaagtggtacggggacctgcggggaaagcccttcgccatcgaagccgagaacagcatcctggacatcagcggcttcagcaagcagtacaactgtgccttcatctggcagaaggacggcgtgaagaagctgaacctgtacctgatcatcaactacttcaagggcggcaagctgcggttcaagaagatcaaacctgaagccttcgaagccaacagattctacaccgtgatcaacaaaaagagcggcgagatcgtgcccatggaggtgaacttcaacttcgacgaccccaacctgatcatcctgcctctggcctttggcaagagacagggcagagaattcatctggaacgacctgctgtccctggaaaccggcagcctgaagctggccaacggaagagtgatcgagaagacactgtacaacagaagaacccggcaggatgagcctgccctgttcgtggccctgaccttcgagcggcgggaggtcctggactcctccaatatcaaaccaatgaacctgatcggcgtggcaagaggcgaaaacatccccgccgtgatcgccctgaccgaccccgagggctgcccactgagccggtttaaggatagcctgggaaacccaacccacatcctgagaatcggcgagagctataaggagaagcagcggaccatccaggccaagaaggaggtggagcagcggagagccggcggctacagccggaagtacgccagcaaagccaagaatctggcagacgatatggtgagaaacaccgctagagatctgctgtactacgccgtgacccaggatgccatgctgatcttcgccaacctgagccggggcttcggccggcagggcaagcggaccttcatggccgagagacagtacacacggatggaggactggctgaccgccaagctggcctacgagggcctgagcaagacctacctgtccaagacactggcccagtacacctccaagacatgcagcaactgtgggtttaccatcaccagcgccgactacgacagggtgctggagaagctgaagaagacagcaacaggctggatgaccacaattaacggcaaggagctgaaggtggagggccagattacctactacaacagatacaagagacagaacgtagtcaaggacctgtccgtcgagctggatagactgagcgaagaatctgtgaacaacgacatctcctcctggacaaagggcagaagcggagaagctctgagcctcctgaagaaaagattctcccatagacccgtgcaggagaagttcgtgtgcctgaactgcggcttcgagacacacgcagccgagcaagccgccctgaacatcgccagatcctggctgttcctgcggagccaggagtacaagaaataccagacaaacaagacaaccggcaacaccgataagagagccttcgtcgagacctggcagtccttttaccggaagaagcttaaggaggtgtggaaacctgccgtgcggtctggcggatctggcggaggctccaccagccccaagaaaaagagaaaagtctaagctgccttctgcggggcttgccttctggccatgcccttcttctctcccttgcacctgtacctcttggtctttgaataaagcctgagtaggaaggctagcaaaaaaaaaaaaaaaaaaaaaaaaaaaaaaaaaaaaaaaaaaaaaaaaaaaaaaaaaaaaaaaaaaaaaaaaaaaaaaaa

SEQ ID NO: 12578 - RNA, 5785 nt, synthetic construct
  source 1..5785: mol_type = other RNA
aggaaataagagagaaaagaagagtaagaagaaatataagagccaccatggcccctaagaagaagcgtaaagtgagccggatggaacgcctcgtctacgaggtgcggcagaagtgcagaaacatcgaggacatctgcatctcctgcggatctctgaacgtgaccctggagcacccactgttcatcggcggcatgtgccagaactgtaaaaactgttttctggagtgtgcctatcaatacgacgatgacggctaccagagctactgcaccatctgttgcggcggaagagaggtgctgatgtgtggaaataacaactgctgccggtgcttctgcgtggaatgcgtggacctgctggtgggccccggcgccgcccaggccgctattaaggaagatccttggaactgctacatgtgcggccacaagggcacatacggcctgctgagacggagagaggactggcctagcagactgcagatgttcttcgccaataaccacgaccaggagttcgacccccctaaggtgtaccctcccgtccccgccgagaagagaaagcccatccgggtcctgagcctgttcgatggcatcgccaccggtctgctggtgctgaaggacctgggcatccaggtggataggtacattgcctccgaggtgtgcgaggactccatcaccgtgggaatggtgcgtcatcagggcaagatcatgtacgtgggcgacgtgcggagcgtgacacagaagcatatccaggagtggggccctttcgacctggtgatcggcggcagcccttgcaatgacctgagcatcgtgaacccagcccggaagggcctgtacgagggaaccggcagactgttcttcgagttttacagactgctgcacgacgcccggcctaaggaaggcgacgaccggcccttcttttggctgttcgagaatgtggtggccatgggagtcagcgacaagcgggatattagccggttcctggagagcaaccccgtgatgatcgatgccaaggaagtgagcgccgcccaccgggccagatacttctggggcaatctgcctggcatgaacagacccctggccagcaccgtgaacgacaagctggagctgcaggagtgcctggagcacggccggatcgccaagttcagcaaggtgagaaccatcaccacccgaagcaacagcatcaaacaaggcaaggaccagcactttcctgtgttcatgaacgagaaggaggacatcctgtggtgtaccgagatggagagagtgttcgggttcccagtccactacacagatgtcagcaacatgtctagactggccagacagagactgctgggaagaagctggtccgtccctgtgatcagacacctgttcgcccctctgaaggagtacttcgcctgcgtgagcagcggcaacagcaacgccaacagccggggccccagcttctctagcggcctggtgccactgtccctgagagggagccacatgggccccatggagatctacaaaaccgtgagcgcctggaagcggcagcctgtgcgcgtgctgagcctgtttcggaatatcgataaagtcctgaaaagcctgggattcctggagagcggctctggctccggcggtggcaccctgaagtacgtggaggatgtgacaaacgtggtcagacgggatgtggagaagtggggccccttcgatctggtgtacggcagcacccaacccctgggcagctcttgtgaccggtgccctggctggtacatgtttcagttccaccggatcctgcagtacgccctgccgagacaggagtcccagcggccattcttttggattttcatggacaacttgctgctgaccgaggatgaccaggaaactaccactcggttcctgcagaccgaagccgtgaccctgcaggacgtgagaggccgggactaccagaacgccatgcgggtgtggtccaacatccctggactgaaaagcaagcacgcacctctgacccctaaagaagaggagtacctgcaggcccaggtgcggagcagaagcaagctggacgcccctaaggtggatctgctggtgaagaattgcctcctgcccctgagagagtacttcaagtatttcagccagaatagtctgcccctgggaggcagcggcggcggcgagccctgggccatcaccttcgccgacgtggccgtgtacttcagccccgaggagtggggctgcctgcagcccacccagagggccctgtacagggacgtgatgagggacacctacgtgctgctgagcgccctgggcggcggcggcggcgccaagcccgccctgatcagctgggtggagagggagagcgagctgtgggacagcgacgcccaggaccccgaggtgcccaagtggcccaccgaggccggcggcccaagcagcggcgcccctcctcccagcggcggcagcccagccggctccccaacctctaccgaggagggcacctctgagtccgccacccccgagagcggccctggcacctccaccgagcccagcgagggcagcgcacccggcagccctgccggcagccccacctccacagaggagggaaccagcaccgagcccagcgaaggcagcgccccaggcaccagcaccgagcctagtgagcaggagattaaacggatcaacaagatcagaagaagacttgtgaaagacagcaacaccaagaaggccggcaagacaggccccatgaaaaccctgctggttagagtgatgacacccgatctgagagagcggctggaaaacctgagaaagaagcctgaaaatatcccccagcccatcagcaatacatctagagccaacctgaataagctgctgaccgattacaccgaaatgaagaaggcgatcctgcatgtgtactgggaagagttccagaaggaccctgtgggcctgatgagccgggtggcccagcctgccagcaagaagatcgatcagaacaagctgaaacctgagatggacgagaagggcaacctgaccaccgccggctttgcctgctctcagtgtggccagcccctgttcgtgtacaagctggagcaggtgtctgagaagggcaaggcttacaccaactacttcggacggtgcaatgtggccgagcacgaaaagctgatcctgctggcccagctgaagcccgagaaggatagcgacgaagccgtgacatatagcctgggaaagtttgggcagagggccctggatttctacagcattcatgtgaccaaggagtccacccaccccgtgaagcccctggcccagatcgccggaaacagatacgcctccggacctgtgggaaaggccctgagcgacgcatgtatgggcacaatcgcctccttcctgtctaagtaccaggacatcatcatcgaacaccagaaggtggtgaagggcaaccagaagagactggagagcctgcgggagctggccggcaaggaaaacctggaataccctagcgtgaccctgccacctcagcctcacaccaaggagggcgttgatgcctacaacgaagtgatcgcccgggtgcgaatgtgggtgaacctgaacctgtggcagaagctgaagctaagcagagatgatgccaagcctctgctgagactgaagggattcccttcctttcctctggtcgagagacaggccaacgaagtggactggtgggacatggtgtgtaacgtgaagaagctgatcaacgagaaaaaggaggatggcaaggtgttttggcagaatctggctggctacaagagacaggaagccctgagaccatacctgagcagcgaggaagatcggaagaagggaaagaaattcgctcggtaccagctgggcgacctgctgctgcacctggaaaagaagcacggcgaggactggggaaaggtgtacgacgaggcctgggagcggattgacaagaaagtggaaggcctgagcaagcacatcaagctggaagaggaacggagaagcgaggacgcccagagcaaggccgccctgaccgactggctgcgggctaaggccagcttcgtgatcgagggcctgaaggaggccgacaaggacgagttctgcagatgcgagctgaagctgcagaagtggtacggggacctgcggggaaagcccttcgccatcgaagccgagaacagcatcctggacatcagcggcttcagcaagcagtacaactgtgccttcatctggcagaaggacggcgtgaagaagctgaacctgtacctgatcatcaactacttcaagggcggcaagctgcggttcaagaagatcaaacctgaagccttcgaagccaacagattctacaccgtgatcaacaaaaagagcggcgagatcgtgcccatggaggtgaacttcaacttcgacgaccccaacctgatcatcctgcctctggcctttggcaagagacagggcagagaattcatctggaacgacctgctgtccctggaaaccggcagcctgaagctggccaacggaagagtgatcgagaagacactgtacaacagaagaacccggcaggatgagcctgccctgttcgtggccctgaccttcgagcggcgggaggtcctggactcctccaatatcaaaccaatgaacctgatcggcgtggcaagaggcgaaaacatccccgccgtgatcgccctgaccgaccccgagggctgcccactgagccggtttaaggatagcctgggaaacccaacccacatcctgagaatcggcgagagctataaggagaagcagcggaccatccaggccaagaaggaggtggagcagcggagagccggcggctacagccggaagtacgccagcaaagccaagaatctggcagacgatatggtgagaaacaccgctagagatctgctgtactacgccgtgacccaggatgccatgctgatcttcgccaacctgagccggggcttcggccggcagggcaagcggaccttcatggccgagagacagtacacacggatggaggactggctgaccgccaagctggcctacgagggcctgagcaagacctacctgtccaagacactggcccagtacacctccaagacatgcagcaactgtgggtttaccatcaccagcgccgactacgacagggtgctggagaagctgaagaagacagcaacaggctggatgaccacaattaacggcaaggagctgaaggtggagggccagattacctactacaacagatacaagagacagaacgtagtcaaggacctgtccgtcgagctggatagactgagcgaagaatctgtgaacaacgacatctcctcctggacaaagggcagaagcggagaagctctgagcctcctgaagaaaagattctcccatagacccgtgcaggagaagttcgtgtgcctgaactgcggcttcgagacacacgcagccgagcaagccgccctgaacatcgccagatcctggctgttcctgcggagccaggagtacaagaaataccagacaaacaagacaaccggcaacaccgataagagagccttcgtcgagacctggcagtccttttaccggaagaagcttaaggaggtgtggaaacctgccgtgcggtctggcggatctggcggaggctccaccagccccaagaaaaagagaaaagtctaagctgccttctgcggggcttgccttctggccatgcccttcttctctcccttgcacctgtacctcttggtctttgaataaagcctgagtaggaaggctagcaaaaaaaaaaaaaaaaaaaaaaaaaaaaaaaaaaaaaaaaaaaaaaaaaaaaaaaaaaaaaaaaaaaaaaaaaaaaaaaa

SEQ ID NO: 12579 - RNA, 5785 nt, synthetic construct
  source 1..5785: mol_type = other RNA
aggaaataagagagaaaagaagagtaagaagaaatataagagccaccatggcccctaagaagaagcgtaaagtgagccggatggaacgcctcgtctacgaggtgcggcagaagtgcagaaacatcgaggacatctgcatctcctgcggatctctgaacgtgaccctggagcacccactgttcatcggcggcatgtgccagaactgtaaaaactgttttctggagtgtgcctatcaatacgacgatgacggctaccagagctactgcaccatctgttgcggcggaagagaggtgctgatgtgtggaaataacaactgctgccggtgcttctgcgtggaatgcgtggacctgctggtgggccccggcgccgcccaggccgctattaaggaagatccttggaactgctacatgtgcggccacaagggcacatacggcctgctgagacggagagaggactggcctagcagactgcagatgttcttcgccaataaccacgaccaggagttcgacccccctaaggtgtaccctcccgtccccgccgagaagagaaagcccatccgggtcctgagcctgttcgatggcatcgccaccggtctgctggtgctgaaggacctgggcatccaggtggataggtacattgcctccgaggtgtgcgaggactccatcaccgtgggaatggtgcgtcatcagggcaagatcatgtacgtgggcgacgtgcggagcgtgacacagaagcatatccaggagtggggccctttcgacctggtgatcggcggcagcccttgcaatgacctgagcatcgtgaacccagcccggaagggcctgtacgagggaaccggcagactgttcttcgagttttacagactgctgcacgacgcccggcctaaggaaggcgacgaccggcccttcttttggctgttcgagaatgtggtggccatgggagtcagcgacaagcgggatattagccggttcctggagagcaaccccgtgatgatcgatgccaaggaagtgagcgccgcccaccgggccagatacttctggggcaatctgcctggcatgaacagacccctggccagcaccgtgaacgacaagctggagctgcaggagtgcctggagcacggccggatcgccaagttcagcaaggtgagaaccatcaccacccgaagcaacagcatcaaacaaggcaaggaccagcactttcctgtgttcatgaacgagaaggaggacatcctgtggtgtaccgagatggagagagtgttcgggttcccagtccactacacagatgtcagcaacatgtctagactggccagacagagactgctgggaagaagctggtccgtccctgtgatcagacacctgttcgcccctctgaaggagtacttcgcctgcgtgagcagcggcaacagcaacgccaacagccggggccccagcttctctagcggcctggtgccactgtccctgagagggagccacatgggccccatggagatctacaaaaccgtgagcgcctggaagcggcagcctgtgcgcgtgctgagcctgtttcggaatatcgataaagtcctgaaaagcctgggattcctggagagcggctctggctccggcggtggcaccctgaagtacgtggaggatgtgacaaacgtggtcagacgggatgtggagaagtggggccccttcgatctggtgtacggcagcacccaacccctgggcagctcttgtgaccggtgccctggctggtacatgtttcagttccaccggatcctgcagtacgccctgccgagacaggagtcccagcggccattcttttggattttcatggacaacttgctgctgaccgaggatgaccaggaaactaccactcggttcctgcagaccgaagccgtgaccctgcaggacgtgagaggccgggactaccagaacgccatgcgggtgtggtccaacatccctggactgaaaagcaagcacgcacctctgacccctaaagaagaggagtacctgcaggcccaggtgcggagcagaagcaagctggacgcccctaaggtggatctgctggtgaagaattgcctcctgcccctgagagagtacttcaagtatttcagccagaatagtctgcccctgggaggcagcggcggcggctgccaggagcccgtgagcttcgcccaggtggccgtgtacttcagcagggaggagtgggccctgctggaccccgcccagagggccctgtacagggacgtgatgctggagacctaccagtgcgtggccagcctggcccccctgcccgcccacaagcccatggtgatcagcctgctggagggcggcgaggacccctggatccccgacgtgaggagccccgaggccgtgcccggcgacctgagccccggcggcccaagcagcggcgcccctcctcccagcggcggcagcccagccggctccccaacctctaccgaggagggcacctctgagtccgccacccccgagagcggccctggcacctccaccgagcccagcgagggcagcgcacccggcagccctgccggcagccccacctccacagaggagggaaccagcaccgagcccagcgaaggcagcgccccaggcaccagcaccgagcctagtgagcaggagattaaacggatcaacaagatcagaagaagacttgtgaaagacagcaacaccaagaaggccggcaagacaggccccatgaaaaccctgctggttagagtgatgacacccgatctgagagagcggctggaaaacctgagaaagaagcctgaaaatatcccccagcccatcagcaatacatctagagccaacctgaataagctgctgaccgattacaccgaaatgaagaaggcgatcctgcatgtgtactgggaagagttccagaaggaccctgtgggcctgatgagccgggtggcccagcctgccagcaagaagatcgatcagaacaagctgaaacctgagatggacgagaagggcaacctgaccaccgccggctttgcctgctctcagtgtggccagcccctgttcgtgtacaagctggagcaggtgtctgagaagggcaaggcttacaccaactacttcggacggtgcaatgtggccgagcacgaaaagctgatcctgctggcccagctgaagcccgagaaggatagcgacgaagccgtgacatatagcctgggaaagtttgggcagagggccctggatttctacagcattcatgtgaccaaggagtccacccaccccgtgaagcccctggcccagatcgccggaaacagatacgcctccggacctgtgggaaaggccctgagcgacgcatgtatgggcacaatcgcctccttcctgtctaagtaccaggacatcatcatcgaacaccagaaggtggtgaagggcaaccagaagagactggagagcctgcgggagctggccggcaaggaaaacctggaataccctagcgtgaccctgccacctcagcctcacaccaaggagggcgttgatgcctacaacgaagtgatcgcccgggtgcgaatgtgggtgaacctgaacctgtggcagaagctgaagctaagcagagatgatgccaagcctctgctgagactgaagggattcccttcctttcctctggtcgagagacaggccaacgaagtggactggtgggacatggtgtgtaacgtgaagaagctgatcaacgagaaaaaggaggatggcaaggtgttttggcagaatctggctggctacaagagacaggaagccctgagaccatacctgagcagcgaggaagatcggaagaagggaaagaaattcgctcggtaccagctgggcgacctgctgctgcacctggaaaagaagcacggcgaggactggggaaaggtgtacgacgaggcctgggagcggattgacaagaaagtggaaggcctgagcaagcacatcaagctggaagaggaacggagaagcgaggacgcccagagcaaggccgccctgaccgactggctgcgggctaaggccagcttcgtgatcgagggcctgaaggaggccgacaaggacgagttctgcagatgcgagctgaagctgcagaagtggtacggggacctgcggggaaagcccttcgccatcgaagccgagaacagcatcctggacatcagcggcttcagcaagcagtacaactgtgccttcatctggcagaaggacggcgtgaagaagctgaacctgtacctgatcatcaactacttcaagggcggcaagctgcggttcaagaagatcaaacctgaagccttcgaagccaacagattctacaccgtgatcaacaaaaagagcggcgagatcgtgcccatggaggtgaacttcaacttcgacgaccccaacctgatcatcctgcctctggcctttggcaagagacagggcagagaattcatctggaacgacctgctgtccctggaaaccggcagcctgaagctggccaacggaagagtgatcgagaagacactgtacaacagaagaacccggcaggatgagcctgccctgttcgtggccctgaccttcgagcggcgggaggtcctggactcctccaatatcaaaccaatgaacctgatcggcgtggcaagaggcgaaaacatccccgccgtgatcgccctgaccgaccccgagggctgcccactgagccggtttaaggatagcctgggaaacccaacccacatcctgagaatcggcgagagctataaggagaagcagcggaccatccaggccaagaaggaggtggagcagcggagagccggcggctacagccggaagtacgccagcaaagccaagaatctggcagacgatatggtgagaaacaccgctagagatctgctgtactacgccgtgacccaggatgccatgctgatcttcgccaacctgagccggggcttcggccggcagggcaagcggaccttcatggccgagagacagtacacacggatggaggactggctgaccgccaagctggcctacgagggcctgagcaagacctacctgtccaagacactggcccagtacacctccaagacatgcagcaactgtgggtttaccatcaccagcgccgactacgacagggtgctggagaagctgaagaagacagcaacaggctggatgaccacaattaacggcaaggagctgaaggtggagggccagattacctactacaacagatacaagagacagaacgtagtcaaggacctgtccgtcgagctggatagactgagcgaagaatctgtgaacaacgacatctcctcctggacaaagggcagaagcggagaagctctgagcctcctgaagaaaagattctcccatagacccgtgcaggagaagttcgtgtgcctgaactgcggcttcgagacacacgcagccgagcaagccgccctgaacatcgccagatcctggctgttcctgcggagccaggagtacaagaaataccagacaaacaagacaaccggcaacaccgataagagagccttcgtcgagacctggcagtccttttaccggaagaagcttaaggaggtgtggaaacctgccgtgcggtctggcggatctggcggaggctccaccagccccaagaaaaagagaaaagtctaagctgccttctgcggggcttgccttctggccatgcccttcttctctcccttgcacctgtacctcttggtctttgaataaagcctgagtaggaaggctagcaaaaaaaaaaaaaaaaaaaaaaaaaaaaaaaaaaaaaaaaaaaaaaaaaaaaaaaaaaaaaaaaaaaaaaaaaaaaaaaa

SEQ ID NO: 12580 - RNA, 5785 nt, synthetic construct
  source 1..5785: mol_type = other RNA
aggaaataagagagaaaagaagagtaagaagaaatataagagccaccatggcccctaagaagaagcgtaaagtgagccggatggaacgcctcgtctacgaggtgcggcagaagtgcagaaacatcgaggacatctgcatctcctgcggatctctgaacgtgaccctggagcacccactgttcatcggcggcatgtgccagaactgtaaaaactgttttctggagtgtgcctatcaatacgacgatgacggctaccagagctactgcaccatctgttgcggcggaagagaggtgctgatgtgtggaaataacaactgctgccggtgcttctgcgtggaatgcgtggacctgctggtgggccccggcgccgcccaggccgctattaaggaagatccttggaactgctacatgtgcggccacaagggcacatacggcctgctgagacggagagaggactggcctagcagactgcagatgttcttcgccaataaccacgaccaggagttcgacccccctaaggtgtaccctcccgtccccgccgagaagagaaagcccatccgggtcctgagcctgttcgatggcatcgccaccggtctgctggtgctgaaggacctgggcatccaggtggataggtacattgcctccgaggtgtgcgaggactccatcaccgtgggaatggtgcgtcatcagggcaagatcatgtacgtgggcgacgtgcggagcgtgacacagaagcatatccaggagtggggccctttcgacctggtgatcggcggcagcccttgcaatgacctgagcatcgtgaacccagcccggaagggcctgtacgagggaaccggcagactgttcttcgagttttacagactgctgcacgacgcccggcctaaggaaggcgacgaccggcccttcttttggctgttcgagaatgtggtggccatgggagtcagcgacaagcgggatattagccggttcctggagagcaaccccgtgatgatcgatgccaaggaagtgagcgccgcccaccgggccagatacttctggggcaatctgcctggcatgaacagacccctggccagcaccgtgaacgacaagctggagctgcaggagtgcctggagcacggccggatcgccaagttcagcaaggtgagaaccatcaccacccgaagcaacagcatcaaacaaggcaaggaccagcactttcctgtgttcatgaacgagaaggaggacatcctgtggtgtaccgagatggagagagtgttcgggttcccagtccactacacagatgtcagcaacatgtctagactggccagacagagactgctgggaagaagctggtccgtccctgtgatcagacacctgttcgcccctctgaaggagtacttcgcctgcgtgagcagcggcaacagcaacgccaacagccggggccccagcttctctagcggcctggtgccactgtccctgagagggagccacatgggccccatggagatctacaaaaccgtgagcgcctggaagcggcagcctgtgcgcgtgctgagcctgtttcggaatatcgataaagtcctgaaaagcctgggattcctggagagcggctctggctccggcggtggcaccctgaagtacgtggaggatgtgacaaacgtggtcagacgggatgtggagaagtggggccccttcgatctggtgtacggcagcacccaacccctgggcagctcttgtgaccggtgccctggctggtacatgtttcagttccaccggatcctgcagtacgccctgccgagacaggagtcccagcggccattcttttggattttcatggacaacttgctgctgaccgaggatgaccaggaaactaccactcggttcctgcagaccgaagccgtgaccctgcaggacgtgagaggccgggactaccagaacgccatgcgggtgtggtccaacatccctggactgaaaagcaagcacgcacctctgacccctaaagaagaggagtacctgcaggcccaggtgcggagcagaagcaagctggacgcccctaaggtggatctgctggtgaagaattgcctcctgcccctgagagagtacttcaagtatttcagccagaatagtctgcccctgggaggcagcggcggcggcagccagagcctggtggagttcggcgacgtggccatcgacttcagccaggaggagtgggagtggctgaaccccgcccagaggaccctgtacaggaaggtgatgctggagaactacaggaacctggccagcctgggcctgtgcggcagcaagcccgccgtgatcagcagcctggagcagggcaaggagccctgggccgtgaagaggaaggtggccaggggctggagccccgacctgaagaccgtgggcggcccaagcagcggcgcccctcctcccagcggcggcagcccagccggctccccaacctctaccgaggagggcacctctgagtccgccacccccgagagcggccctggcacctccaccgagcccagcgagggcagcgcacccggcagccctgccggcagccccacctccacagaggagggaaccagcaccgagcccagcgaaggcagcgccccaggcaccagcaccgagcctagtgagcaggagattaaacggatcaacaagatcagaagaagacttgtgaaagacagcaacaccaagaaggccggcaagacaggccccatgaaaaccctgctggttagagtgatgacacccgatctgagagagcggctggaaaacctgagaaagaagcctgaaaatatcccccagcccatcagcaatacatctagagccaacctgaataagctgctgaccgattacaccgaaatgaagaaggcgatcctgcatgtgtactgggaagagttccagaaggaccctgtgggcctgatgagccgggtggcccagcctgccagcaagaagatcgatcagaacaagctgaaacctgagatggacgagaagggcaacctgaccaccgccggctttgcctgctctcagtgtggccagcccctgttcgtgtacaagctggagcaggtgtctgagaagggcaaggcttacaccaactacttcggacggtgcaatgtggccgagcacgaaaagctgatcctgctggcccagctgaagcccgagaaggatagcgacgaagccgtgacatatagcctgggaaagtttgggcagagggccctggatttctacagcattcatgtgaccaaggagtccacccaccccgtgaagcccctggcccagatcgccggaaacagatacgcctccggacctgtgggaaaggccctgagcgacgcatgtatgggcacaatcgcctccttcctgtctaagtaccaggacatcatcatcgaacaccagaaggtggtgaagggcaaccagaagagactggagagcctgcgggagctggccggcaaggaaaacctggaataccctagcgtgaccctgccacctcagcctcacaccaaggagggcgttgatgcctacaacgaagtgatcgcccgggtgcgaatgtgggtgaacctgaacctgtggcagaagctgaagctaagcagagatgatgccaagcctctgctgagactgaagggattcccttcctttcctctggtcgagagacaggccaacgaagtggactggtgggacatggtgtgtaacgtgaagaagctgatcaacgagaaaaaggaggatggcaaggtgttttggcagaatctggctggctacaagagacaggaagccctgagaccatacctgagcagcgaggaagatcggaagaagggaaagaaattcgctcggtaccagctgggcgacctgctgctgcacctggaaaagaagcacggcgaggactggggaaaggtgtacgacgaggcctgggagcggattgacaagaaagtggaaggcctgagcaagcacatcaagctggaagaggaacggagaagcgaggacgcccagagcaaggccgccctgaccgactggctgcgggctaaggccagcttcgtgatcgagggcctgaaggaggccgacaaggacgagttctgcagatgcgagctgaagctgcagaagtggtacggggacctgcggggaaagcccttcgccatcgaagccgagaacagcatcctggacatcagcggcttcagcaagcagtacaactgtgccttcatctggcagaaggacggcgtgaagaagctgaacctgtacctgatcatcaactacttcaagggcggcaagctgcggttcaagaagatcaaacctgaagccttcgaagccaacagattctacaccgtgatcaacaaaaagagcggcgagatcgtgcccatggaggtgaacttcaacttcgacgaccccaacctgatcatcctgcctctggcctttggcaagagacagggcagagaattcatctggaacgacctgctgtccctggaaaccggcagcctgaagctggccaacggaagagtgatcgagaagacactgtacaacagaagaacccggcaggatgagcctgccctgttcgtggccctgaccttcgagcggcgggaggtcctggactcctccaatatcaaaccaatgaacctgatcggcgtggcaagaggcgaaaacatccccgccgtgatcgccctgaccgaccccgagggctgcccactgagccggtttaaggatagcctgggaaacccaacccacatcctgagaatcggcgagagctataaggagaagcagcggaccatccaggccaagaaggaggtggagcagcggagagccggcggctacagccggaagtacgccagcaaagccaagaatctggcagacgatatggtgagaaacaccgctagagatctgctgtactacgccgtgacccaggatgccatgctgatcttcgccaacctgagccggggcttcggccggcagggcaagcggaccttcatggccgagagacagtacacacggatggaggactggctgaccgccaagctggcctacgagggcctgagcaagacctacctgtccaagacactggcccagtacacctccaagacatgcagcaactgtgggtttaccatcaccagcgccgactacgacagggtgctggagaagctgaagaagacagcaacaggctggatgaccacaattaacggcaaggagctgaaggtggagggccagattacctactacaacagatacaagagacagaacgtagtcaaggacctgtccgtcgagctggatagactgagcgaagaatctgtgaacaacgacatctcctcctggacaaagggcagaagcggagaagctctgagcctcctgaagaaaagattctcccatagacccgtgcaggagaagttcgtgtgcctgaactgcggcttcgagacacacgcagccgagcaagccgccctgaacatcgccagatcctggctgttcctgcggagccaggagtacaagaaataccagacaaacaagacaaccggcaacaccgataagagagccttcgtcgagacctggcagtccttttaccggaagaagcttaaggaggtgtggaaacctgccgtgcggtctggcggatctggcggaggctccaccagccccaagaaaaagagaaaagtctaagctgccttctgcggggcttgccttctggccatgcccttcttctctcccttgcacctgtacctcttggtctttgaataaagcctgagtaggaaggctagcaaaaaaaaaaaaaaaaaaaaaaaaaaaaaaaaaaaaaaaaaaaaaaaaaaaaaaaaaaaaaaaaaaaaaaaaaaaaaaaa

SEQ ID NO: 12581 - RNA, 5785 nt, synthetic construct
  source 1..5785: mol_type = other RNA
aggaaataagagagaaaagaagagtaagaagaaatataagagccaccatggcccctaagaagaagcgtaaagtgagccggatggaacgcctcgtctacgaggtgcggcagaagtgcagaaacatcgaggacatctgcatctcctgcggatctctgaacgtgaccctggagcacccactgttcatcggcggcatgtgccagaactgtaaaaactgttttctggagtgtgcctatcaatacgacgatgacggctaccagagctactgcaccatctgttgcggcggaagagaggtgctgatgtgtggaaataacaactgctgccggtgcttctgcgtggaatgcgtggacctgctggtgggccccggcgccgcccaggccgctattaaggaagatccttggaactgctacatgtgcggccacaagggcacatacggcctgctgagacggagagaggactggcctagcagactgcagatgttcttcgccaataaccacgaccaggagttcgacccccctaaggtgtaccctcccgtccccgccgagaagagaaagcccatccgggtcctgagcctgttcgatggcatcgccaccggtctgctggtgctgaaggacctgggcatccaggtggataggtacattgcctccgaggtgtgcgaggactccatcaccgtgggaatggtgcgtcatcagggcaagatcatgtacgtgggcgacgtgcggagcgtgacacagaagcatatccaggagtggggccctttcgacctggtgatcggcggcagcccttgcaatgacctgagcatcgtgaacccagcccggaagggcctgtacgagggaaccggcagactgttcttcgagttttacagactgctgcacgacgcccggcctaaggaaggcgacgaccggcccttcttttggctgttcgagaatgtggtggccatgggagtcagcgacaagcgggatattagccggttcctggagagcaaccccgtgatgatcgatgccaaggaagtgagcgccgcccaccgggccagatacttctggggcaatctgcctggcatgaacagacccctggccagcaccgtgaacgacaagctggagctgcaggagtgcctggagcacggccggatcgccaagttcagcaaggtgagaaccatcaccacccgaagcaacagcatcaaacaaggcaaggaccagcactttcctgtgttcatgaacgagaaggaggacatcctgtggtgtaccgagatggagagagtgttcgggttcccagtccactacacagatgtcagcaacatgtctagactggccagacagagactgctgggaagaagctggtccgtccctgtgatcagacacctgttcgcccctctgaaggagtacttcgcctgcgtgagcagcggcaacagcaacgccaacagccggggccccagcttctctagcggcctggtgccactgtccctgagagggagccacatgggccccatggagatctacaaaaccgtgagcgcctggaagcggcagcctgtgcgcgtgctgagcctgtttcggaatatcgataaagtcctgaaaagcctgggattcctggagagcggctctggctccggcggtggcaccctgaagtacgtggaggatgtgacaaacgtggtcagacgggatgtggagaagtggggccccttcgatctggtgtacggcagcacccaacccctgggcagctcttgtgaccggtgccctggctggtacatgtttcagttccaccggatcctgcagtacgccctgccgagacaggagtcccagcggccattcttttggattttcatggacaacttgctgctgaccgaggatgaccaggaaactaccactcggttcctgcagaccgaagccgtgaccctgcaggacgtgagaggccgggactaccagaacgccatgcgggtgtggtccaacatccctggactgaaaagcaagcacgcacctctgacccctaaagaagaggagtacctgcaggcccaggtgcggagcagaagcaagctggacgcccctaaggtggatctgctggtgaagaattgcctcctgcccctgagagagtacttcaagtatttcagccagaatagtctgcccctgggaggcagcggcggcggcctggcccccgaggaccacggcagcagctacgagggcagcgtgagcttcagggacgtggccatcgacttcagcagggaggagtggaggcacctggaccccagccagaggaacctgtacagggacgtgatgctggagacctacagccacctgctgagcgtgggctaccaggtgcccgaggccgaggtggtgatgctggagcagggcaaggagccctgggccctgcagggcgagaggcccaggcagggcggcccaagcagcggcgcccctcctcccagcggcggcagcccagccggctccccaacctctaccgaggagggcacctctgagtccgccacccccgagagcggccctggcacctccaccgagcccagcgagggcagcgcacccggcagccctgccggcagccccacctccacagaggagggaaccagcaccgagcccagcgaaggcagcgccccaggcaccagcaccgagcctagtgagcaggagattaaacggatcaacaagatcagaagaagacttgtgaaagacagcaacaccaagaaggccggcaagacaggccccatgaaaaccctgctggttagagtgatgacacccgatctgagagagcggctggaaaacctgagaaagaagcctgaaaatatcccccagcccatcagcaatacatctagagccaacctgaataagctgctgaccgattacaccgaaatgaagaaggcgatcctgcatgtgtactgggaagagttccagaaggaccctgtgggcctgatgagccgggtggcccagcctgccagcaagaagatcgatcagaacaagctgaaacctgagatggacgagaagggcaacctgaccaccgccggctttgcctgctctcagtgtggccagcccctgttcgtgtacaagctggagcaggtgtctgagaagggcaaggcttacaccaactacttcggacggtgcaatgtggccgagcacgaaaagctgatcctgctggcccagctgaagcccgagaaggatagcgacgaagccgtgacatatagcctgggaaagtttgggcagagggccctggatttctacagcattcatgtgaccaaggagtccacccaccccgtgaagcccctggcccagatcgccggaaacagatacgcctccggacctgtgggaaaggccctgagcgacgcatgtatgggcacaatcgcctccttcctgtctaagtaccaggacatcatcatcgaacaccagaaggtggtgaagggcaaccagaagagactggagagcctgcgggagctggccggcaaggaaaacctggaataccctagcgtgaccctgccacctcagcctcacaccaaggagggcgttgatgcctacaacgaagtgatcgcccgggtgcgaatgtgggtgaacctgaacctgtggcagaagctgaagctaagcagagatgatgccaagcctctgctgagactgaagggattcccttcctttcctctggtcgagagacaggccaacgaagtggactggtgggacatggtgtgtaacgtgaagaagctgatcaacgagaaaaaggaggatggcaaggtgttttggcagaatctggctggctacaagagacaggaagccctgagaccatacctgagcagcgaggaagatcggaagaagggaaagaaattcgctcggtaccagctgggcgacctgctgctgcacctggaaaagaagcacggcgaggactggggaaaggtgtacgacgaggcctgggagcggattgacaagaaagtggaaggcctgagcaagcacatcaagctggaagaggaacggagaagcgaggacgcccagagcaaggccgccctgaccgactggctgcgggctaaggccagcttcgtgatcgagggcctgaaggaggccgacaaggacgagttctgcagatgcgagctgaagctgcagaagtggtacggggacctgcggggaaagcccttcgccatcgaagccgagaacagcatcctggacatcagcggcttcagcaagcagtacaactgtgccttcatctggcagaaggacggcgtgaagaagctgaacctgtacctgatcatcaactacttcaagggcggcaagctgcggttcaagaagatcaaacctgaagccttcgaagccaacagattctacaccgtgatcaacaaaaagagcggcgagatcgtgcccatggaggtgaacttcaacttcgacgaccccaacctgatcatcctgcctctggcctttggcaagagacagggcagagaattcatctggaacgacctgctgtccctggaaaccggcagcctgaagctggccaacggaagagtgatcgagaagacactgtacaacagaagaacccggcaggatgagcctgccctgttcgtggccctgaccttcgagcggcgggaggtcctggactcctccaatatcaaaccaatgaacctgatcggcgtggcaagaggcgaaaacatccccgccgtgatcgccctgaccgaccccgagggctgcccactgagccggtttaaggatagcctgggaaacccaacccacatcctgagaatcggcgagagctataaggagaagcagcggaccatccaggccaagaaggaggtggagcagcggagagccggcggctacagccggaagtacgccagcaaagccaagaatctggcagacgatatggtgagaaacaccgctagagatctgctgtactacgccgtgacccaggatgccatgctgatcttcgccaacctgagccggggcttcggccggcagggcaagcggaccttcatggccgagagacagtacacacggatggaggactggctgaccgccaagctggcctacgagggcctgagcaagacctacctgtccaagacactggcccagtacacctccaagacatgcagcaactgtgggtttaccatcaccagcgccgactacgacagggtgctggagaagctgaagaagacagcaacaggctggatgaccacaattaacggcaaggagctgaaggtggagggccagattacctactacaacagatacaagagacagaacgtagtcaaggacctgtccgtcgagctggatagactgagcgaagaatctgtgaacaacgacatctcctcctggacaaagggcagaagcggagaagctctgagcctcctgaagaaaagattctcccatagacccgtgcaggagaagttcgtgtgcctgaactgcggcttcgagacacacgcagccgagcaagccgccctgaacatcgccagatcctggctgttcctgcggagccaggagtacaagaaataccagacaaacaagacaaccggcaacaccgataagagagccttcgtcgagacctggcagtccttttaccggaagaagcttaaggaggtgtggaaacctgccgtgcggtctggcggatctggcggaggctccaccagccccaagaaaaagagaaaagtctaagctgccttctgcggggcttgccttctggccatgcccttcttctctcccttgcacctgtacctcttggtctttgaataaagcctgagtaggaaggctagcaaaaaaaaaaaaaaaaaaaaaaaaaaaaaaaaaaaaaaaaaaaaaaaaaaaaaaaaaaaaaaaaaaaaaaaaaaaaaaaa

SEQ ID NO: 12582 - RNA, 5785 nt, synthetic construct
  source 1..5785: mol_type = other RNA
aggaaataagagagaaaagaagagtaagaagaaatataagagccaccatggcccctaagaagaagcgtaaagtgagccggatggaacgcctcgtctacgaggtgcggcagaagtgcagaaacatcgaggacatctgcatctcctgcggatctctgaacgtgaccctggagcacccactgttcatcggcggcatgtgccagaactgtaaaaactgttttctggagtgtgcctatcaatacgacgatgacggctaccagagctactgcaccatctgttgcggcggaagagaggtgctgatgtgtggaaataacaactgctgccggtgcttctgcgtggaatgcgtggacctgctggtgggccccggcgccgcccaggccgctattaaggaagatccttggaactgctacatgtgcggccacaagggcacatacggcctgctgagacggagagaggactggcctagcagactgcagatgttcttcgccaataaccacgaccaggagttcgacccccctaaggtgtaccctcccgtccccgccgagaagagaaagcccatccgggtcctgagcctgttcgatggcatcgccaccggtctgctggtgctgaaggacctgggcatccaggtggataggtacattgcctccgaggtgtgcgaggactccatcaccgtgggaatggtgcgtcatcagggcaagatcatgtacgtgggcgacgtgcggagcgtgacacagaagcatatccaggagtggggccctttcgacctggtgatcggcggcagcccttgcaatgacctgagcatcgtgaacccagcccggaagggcctgtacgagggaaccggcagactgttcttcgagttttacagactgctgcacgacgcccggcctaaggaaggcgacgaccggcccttcttttggctgttcgagaatgtggtggccatgggagtcagcgacaagcgggatattagccggttcctggagagcaaccccgtgatgatcgatgccaaggaagtgagcgccgcccaccgggccagatacttctggggcaatctgcctggcatgaacagacccctggccagcaccgtgaacgacaagctggagctgcaggagtgcctggagcacggccggatcgccaagttcagcaaggtgagaaccatcaccacccgaagcaacagcatcaaacaaggcaaggaccagcactttcctgtgttcatgaacgagaaggaggacatcctgtggtgtaccgagatggagagagtgttcgggttcccagtccactacacagatgtcagcaacatgtctagactggccagacagagactgctgggaagaagctggtccgtccctgtgatcagacacctgttcgcccctctgaaggagtacttcgcctgcgtgagcagcggcaacagcaacgccaacagccggggccccagcttctctagcggcctggtgccactgtccctgagagggagccacatgggccccatggagatctacaaaaccgtgagcgcctggaagcggcagcctgtgcgcgtgctgagcctgtttcggaatatcgataaagtcctgaaaagcctgggattcctggagagcggctctggctccggcggtggcaccctgaagtacgtggaggatgtgacaaacgtggtcagacgggatgtggagaagtggggccccttcgatctggtgtacggcagcacccaacccctgggcagctcttgtgaccggtgccctggctggtacatgtttcagttccaccggatcctgcagtacgccctgccgagacaggagtcccagcggccattcttttggattttcatggacaacttgctgctgaccgaggatgaccaggaaactaccactcggttcctgcagaccgaagccgtgaccctgcaggacgtgagaggccgggactaccagaacgccatgcgggtgtggtccaacatccctggactgaaaagcaagcacgcacctctgacccctaaagaagaggagtacctgcaggcccaggtgcggagcagaagcaagctggacgcccctaaggtggatctgctggtgaagaattgcctcctgcccctgagagagtacttcaagtatttcagccagaatagtctgcccctgggaggcagcggcggcggcatggagggcctggtgatgttccaggacctgttcatcgacttcagccaggaggagtgggagtgcctggacgccgcccagaaggacctgtacagggacgtgatgatggagaactacagcagcctggtgagcctgggcctgtgcatccccaagcccgacgtgatcagcctgctggagcagggcaaggagccctggatggtgagcagggacgtgctgggcggctggtgccccgacaggctgaagaagggcggcccaagcagcggcgcccctcctcccagcggcggcagcccagccggctccccaacctctaccgaggagggcacctctgagtccgccacccccgagagcggccctggcacctccaccgagcccagcgagggcagcgcacccggcagccctgccggcagccccacctccacagaggagggaaccagcaccgagcccagcgaaggcagcgccccaggcaccagcaccgagcctagtgagcaggagattaaacggatcaacaagatcagaagaagacttgtgaaagacagcaacaccaagaaggccggcaagacaggccccatgaaaaccctgctggttagagtgatgacacccgatctgagagagcggctggaaaacctgagaaagaagcctgaaaatatcccccagcccatcagcaatacatctagagccaacctgaataagctgctgaccgattacaccgaaatgaagaaggcgatcctgcatgtgtactgggaagagttccagaaggaccctgtgggcctgatgagccgggtggcccagcctgccagcaagaagatcgatcagaacaagctgaaacctgagatggacgagaagggcaacctgaccaccgccggctttgcctgctctcagtgtggccagcccctgttcgtgtacaagctggagcaggtgtctgagaagggcaaggcttacaccaactacttcggacggtgcaatgtggccgagcacgaaaagctgatcctgctggcccagctgaagcccgagaaggatagcgacgaagccgtgacatatagcctgggaaagtttgggcagagggccctggatttctacagcattcatgtgaccaaggagtccacccaccccgtgaagcccctggcccagatcgccggaaacagatacgcctccggacctgtgggaaaggccctgagcgacgcatgtatgggcacaatcgcctccttcctgtctaagtaccaggacatcatcatcgaacaccagaaggtggtgaagggcaaccagaagagactggagagcctgcgggagctggccggcaaggaaaacctggaataccctagcgtgaccctgccacctcagcctcacaccaaggagggcgttgatgcctacaacgaagtgatcgcccgggtgcgaatgtgggtgaacctgaacctgtggcagaagctgaagctaagcagagatgatgccaagcctctgctgagactgaagggattcccttcctttcctctggtcgagagacaggccaacgaagtggactggtgggacatggtgtgtaacgtgaagaagctgatcaacgagaaaaaggaggatggcaaggtgttttggcagaatctggctggctacaagagacaggaagccctgagaccatacctgagcagcgaggaagatcggaagaagggaaagaaattcgctcggtaccagctgggcgacctgctgctgcacctggaaaagaagcacggcgaggactggggaaaggtgtacgacgaggcctgggagcggattgacaagaaagtggaaggcctgagcaagcacatcaagctggaagaggaacggagaagcgaggacgcccagagcaaggccgccctgaccgactggctgcgggctaaggccagcttcgtgatcgagggcctgaaggaggccgacaaggacgagttctgcagatgcgagctgaagctgcagaagtggtacggggacctgcggggaaagcccttcgccatcgaagccgagaacagcatcctggacatcagcggcttcagcaagcagtacaactgtgccttcatctggcagaaggacggcgtgaagaagctgaacctgtacctgatcatcaactacttcaagggcggcaagctgcggttcaagaagatcaaacctgaagccttcgaagccaacagattctacaccgtgatcaacaaaaagagcggcgagatcgtgcccatggaggtgaacttcaacttcgacgaccccaacctgatcatcctgcctctggcctttggcaagagacagggcagagaattcatctggaacgacctgctgtccctggaaaccggcagcctgaagctggccaacggaagagtgatcgagaagacactgtacaacagaagaacccggcaggatgagcctgccctgttcgtggccctgaccttcgagcggcgggaggtcctggactcctccaatatcaaaccaatgaacctgatcggcgtggcaagaggcgaaaacatccccgccgtgatcgccctgaccgaccccgagggctgcccactgagccggtttaaggatagcctgggaaacccaacccacatcctgagaatcggcgagagctataaggagaagcagcggaccatccaggccaagaaggaggtggagcagcggagagccggcggctacagccggaagtacgccagcaaagccaagaatctggcagacgatatggtgagaaacaccgctagagatctgctgtactacgccgtgacccaggatgccatgctgatcttcgccaacctgagccggggcttcggccggcagggcaagcggaccttcatggccgagagacagtacacacggatggaggactggctgaccgccaagctggcctacgagggcctgagcaagacctacctgtccaagacactggcccagtacacctccaagacatgcagcaactgtgggtttaccatcaccagcgccgactacgacagggtgctggagaagctgaagaagacagcaacaggctggatgaccacaattaacggcaaggagctgaaggtggagggccagattacctactacaacagatacaagagacagaacgtagtcaaggacctgtccgtcgagctggatagactgagcgaagaatctgtgaacaacgacatctcctcctggacaaagggcagaagcggagaagctctgagcctcctgaagaaaagattctcccatagacccgtgcaggagaagttcgtgtgcctgaactgcggcttcgagacacacgcagccgagcaagccgccctgaacatcgccagatcctggctgttcctgcggagccaggagtacaagaaataccagacaaacaagacaaccggcaacaccgataagagagccttcgtcgagacctggcagtccttttaccggaagaagcttaaggaggtgtggaaacctgccgtgcggtctggcggatctggcggaggctccaccagccccaagaaaaagagaaaagtctaagctgccttctgcggggcttgccttctggccatgcccttcttctctcccttgcacctgtacctcttggtctttgaataaagcctgagtaggaaggctagcaaaaaaaaaaaaaaaaaaaaaaaaaaaaaaaaaaaaaaaaaaaaaaaaaaaaaaaaaaaaaaaaaaaaaaaaaaaaaaaa

SEQ ID NO: 12583 - RNA, 5785 nt, synthetic construct
  source 1..5785: mol_type = other RNA
aggaaataagagagaaaagaagagtaagaagaaatataagagccaccatggcccctaagaagaagcgtaaagtgagccggatggaacgcctcgtctacgaggtgcggcagaagtgcagaaacatcgaggacatctgcatctcctgcggatctctgaacgtgaccctggagcacccactgttcatcggcggcatgtgccagaactgtaaaaactgttttctggagtgtgcctatcaatacgacgatgacggctaccagagctactgcaccatctgttgcggcggaagagaggtgctgatgtgtggaaataacaactgctgccggtgcttctgcgtggaatgcgtggacctgctggtgggccccggcgccgcccaggccgctattaaggaagatccttggaactgctacatgtgcggccacaagggcacatacggcctgctgagacggagagaggactggcctagcagactgcagatgttcttcgccaataaccacgaccaggagttcgacccccctaaggtgtaccctcccgtccccgccgagaagagaaagcccatccgggtcctgagcctgttcgatggcatcgccaccggtctgctggtgctgaaggacctgggcatccaggtggataggtacattgcctccgaggtgtgcgaggactccatcaccgtgggaatggtgcgtcatcagggcaagatcatgtacgtgggcgacgtgcggagcgtgacacagaagcatatccaggagtggggccctttcgacctggtgatcggcggcagcccttgcaatgacctgagcatcgtgaacccagcccggaagggcctgtacgagggaaccggcagactgttcttcgagttttacagactgctgcacgacgcccggcctaaggaaggcgacgaccggcccttcttttggctgttcgagaatgtggtggccatgggagtcagcgacaagcgggatattagccggttcctggagagcaaccccgtgatgatcgatgccaaggaagtgagcgccgcccaccgggccagatacttctggggcaatctgcctggcatgaacagacccctggccagcaccgtgaacgacaagctggagctgcaggagtgcctggagcacggccggatcgccaagttcagcaaggtgagaaccatcaccacccgaagcaacagcatcaaacaaggcaaggaccagcactttcctgtgttcatgaacgagaaggaggacatcctgtggtgtaccgagatggagagagtgttcgggttcccagtccactacacagatgtcagcaacatgtctagactggccagacagagactgctgggaagaagctggtccgtccctgtgatcagacacctgttcgcccctctgaaggagtacttcgcctgcgtgagcagcggcaacagcaacgccaacagccggggccccagcttctctagcggcctggtgccactgtccctgagagggagccacatgggccccatggagatctacaaaaccgtgagcgcctggaagcggcagcctgtgcgcgtgctgagcctgtttcggaatatcgataaagtcctgaaaagcctgggattcctggagagcggctctggctccggcggtggcaccctgaagtacgtggaggatgtgacaaacgtggtcagacgggatgtggagaagtggggccccttcgatctggtgtacggcagcacccaacccctgggcagctcttgtgaccggtgccctggctggtacatgtttcagttccaccggatcctgcagtacgccctgccgagacaggagtcccagcggccattcttttggattttcatggacaacttgctgctgaccgaggatgaccaggaaactaccactcggttcctgcagaccgaagccgtgaccctgcaggacgtgagaggccgggactaccagaacgccatgcgggtgtggtccaacatccctggactgaaaagcaagcacgcacctctgacccctaaagaagaggagtacctgcaggcccaggtgcggagcagaagcaagctggacgcccctaaggtggatctgctggtgaagaattgcctcctgcccctgagagagtacttcaagtatttcagccagaatagtctgcccctgggaggcagcggcggcggcccccaggccagcgtgagcttcaaggacgtgaccgtggagttcacccaggaggagtggtggcagatggacagcgcccagaggaccctgtacagggacgtgatgctggagaactacagccacctggtgagcgtgggctactgcttcaccaagcccgagctgatcttcatgctggagcagggcgaggacccctggctgctggagaaggagttcgtgaacaggagcagccccgaggagagccagcccggcggcccaagcagcggcgcccctcctcccagcggcggcagcccagccggctccccaacctctaccgaggagggcacctctgagtccgccacccccgagagcggccctggcacctccaccgagcccagcgagggcagcgcacccggcagccctgccggcagccccacctccacagaggagggaaccagcaccgagcccagcgaaggcagcgccccaggcaccagcaccgagcctagtgagcaggagattaaacggatcaacaagatcagaagaagacttgtgaaagacagcaacaccaagaaggccggcaagacaggccccatgaaaaccctgctggttagagtgatgacacccgatctgagagagcggctggaaaacctgagaaagaagcctgaaaatatcccccagcccatcagcaatacatctagagccaacctgaataagctgctgaccgattacaccgaaatgaagaaggcgatcctgcatgtgtactgggaagagttccagaaggaccctgtgggcctgatgagccgggtggcccagcctgccagcaagaagatcgatcagaacaagctgaaacctgagatggacgagaagggcaacctgaccaccgccggctttgcctgctctcagtgtggccagcccctgttcgtgtacaagctggagcaggtgtctgagaagggcaaggcttacaccaactacttcggacggtgcaatgtggccgagcacgaaaagctgatcctgctggcccagctgaagcccgagaaggatagcgacgaagccgtgacatatagcctgggaaagtttgggcagagggccctggatttctacagcattcatgtgaccaaggagtccacccaccccgtgaagcccctggcccagatcgccggaaacagatacgcctccggacctgtgggaaaggccctgagcgacgcatgtatgggcacaatcgcctccttcctgtctaagtaccaggacatcatcatcgaacaccagaaggtggtgaagggcaaccagaagagactggagagcctgcgggagctggccggcaaggaaaacctggaataccctagcgtgaccctgccacctcagcctcacaccaaggagggcgttgatgcctacaacgaagtgatcgcccgggtgcgaatgtgggtgaacctgaacctgtggcagaagctgaagctaagcagagatgatgccaagcctctgctgagactgaagggattcccttcctttcctctggtcgagagacaggccaacgaagtggactggtgggacatggtgtgtaacgtgaagaagctgatcaacgagaaaaaggaggatggcaaggtgttttggcagaatctggctggctacaagagacaggaagccctgagaccatacctgagcagcgaggaagatcggaagaagggaaagaaattcgctcggtaccagctgggcgacctgctgctgcacctggaaaagaagcacggcgaggactggggaaaggtgtacgacgaggcctgggagcggattgacaagaaagtggaaggcctgagcaagcacatcaagctggaagaggaacggagaagcgaggacgcccagagcaaggccgccctgaccgactggctgcgggctaaggccagcttcgtgatcgagggcctgaaggaggccgacaaggacgagttctgcagatgcgagctgaagctgcagaagtggtacggggacctgcggggaaagcccttcgccatcgaagccgagaacagcatcctggacatcagcggcttcagcaagcagtacaactgtgccttcatctggcagaaggacggcgtgaagaagctgaacctgtacctgatcatcaactacttcaagggcggcaagctgcggttcaagaagatcaaacctgaagccttcgaagccaacagattctacaccgtgatcaacaaaaagagcggcgagatcgtgcccatggaggtgaacttcaacttcgacgaccccaacctgatcatcctgcctctggcctttggcaagagacagggcagagaattcatctggaacgacctgctgtccctggaaaccggcagcctgaagctggccaacggaagagtgatcgagaagacactgtacaacagaagaacccggcaggatgagcctgccctgttcgtggccctgaccttcgagcggcgggaggtcctggactcctccaatatcaaaccaatgaacctgatcggcgtggcaagaggcgaaaacatccccgccgtgatcgccctgaccgaccccgagggctgcccactgagccggtttaaggatagcctgggaaacccaacccacatcctgagaatcggcgagagctataaggagaagcagcggaccatccaggccaagaaggaggtggagcagcggagagccggcggctacagccggaagtacgccagcaaagccaagaatctggcagacgatatggtgagaaacaccgctagagatctgctgtactacgccgtgacccaggatgccatgctgatcttcgccaacctgagccggggcttcggccggcagggcaagcggaccttcatggccgagagacagtacacacggatggaggactggctgaccgccaagctggcctacgagggcctgagcaagacctacctgtccaagacactggcccagtacacctccaagacatgcagcaactgtgggtttaccatcaccagcgccgactacgacagggtgctggagaagctgaagaagacagcaacaggctggatgaccacaattaacggcaaggagctgaaggtggagggccagattacctactacaacagatacaagagacagaacgtagtcaaggacctgtccgtcgagctggatagactgagcgaagaatctgtgaacaacgacatctcctcctggacaaagggcagaagcggagaagctctgagcctcctgaagaaaagattctcccatagacccgtgcaggagaagttcgtgtgcctgaactgcggcttcgagacacacgcagccgagcaagccgccctgaacatcgccagatcctggctgttcctgcggagccaggagtacaagaaataccagacaaacaagacaaccggcaacaccgataagagagccttcgtcgagacctggcagtccttttaccggaagaagcttaaggaggtgtggaaacctgccgtgcggtctggcggatctggcggaggctccaccagccccaagaaaaagagaaaagtctaagctgccttctgcggggcttgccttctggccatgcccttcttctctcccttgcacctgtacctcttggtctttgaataaagcctgagtaggaaggctagcaaaaaaaaaaaaaaaaaaaaaaaaaaaaaaaaaaaaaaaaaaaaaaaaaaaaaaaaaaaaaaaaaaaaaaaaaaaaaaaa

SEQ ID NO: 12584 - RNA, 5785 nt, synthetic construct
  source 1..5785: mol_type = other RNA
aggaaataagagagaaaagaagagtaagaagaaatataagagccaccatggcccctaagaagaagcgtaaagtgagccggatggaacgcctcgtctacgaggtgcggcagaagtgcagaaacatcgaggacatctgcatctcctgcggatctctgaacgtgaccctggagcacccactgttcatcggcggcatgtgccagaactgtaaaaactgttttctggagtgtgcctatcaatacgacgatgacggctaccagagctactgcaccatctgttgcggcggaagagaggtgctgatgtgtggaaataacaactgctgccggtgcttctgcgtggaatgcgtggacctgctggtgggccccggcgccgcccaggccgctattaaggaagatccttggaactgctacatgtgcggccacaagggcacatacggcctgctgagacggagagaggactggcctagcagactgcagatgttcttcgccaataaccacgaccaggagttcgacccccctaaggtgtaccctcccgtccccgccgagaagagaaagcccatccgggtcctgagcctgttcgatggcatcgccaccggtctgctggtgctgaaggacctgggcatccaggtggataggtacattgcctccgaggtgtgcgaggactccatcaccgtgggaatggtgcgtcatcagggcaagatcatgtacgtgggcgacgtgcggagcgtgacacagaagcatatccaggagtggggccctttcgacctggtgatcggcggcagcccttgcaatgacctgagcatcgtgaacccagcccggaagggcctgtacgagggaaccggcagactgttcttcgagttttacagactgctgcacgacgcccggcctaaggaaggcgacgaccggcccttcttttggctgttcgagaatgtggtggccatgggagtcagcgacaagcgggatattagccggttcctggagagcaaccccgtgatgatcgatgccaaggaagtgagcgccgcccaccgggccagatacttctggggcaatctgcctggcatgaacagacccctggccagcaccgtgaacgacaagctggagctgcaggagtgcctggagcacggccggatcgccaagttcagcaaggtgagaaccatcaccacccgaagcaacagcatcaaacaaggcaaggaccagcactttcctgtgttcatgaacgagaaggaggacatcctgtggtgtaccgagatggagagagtgttcgggttcccagtccactacacagatgtcagcaacatgtctagactggccagacagagactgctgggaagaagctggtccgtccctgtgatcagacacctgttcgcccctctgaaggagtacttcgcctgcgtgagcagcggcaacagcaacgccaacagccggggccccagcttctctagcggcctggtgccactgtccctgagagggagccacatgggccccatggagatctacaaaaccgtgagcgcctggaagcggcagcctgtgcgcgtgctgagcctgtttcggaatatcgataaagtcctgaaaagcctgggattcctggagagcggctctggctccggcggtggcaccctgaagtacgtggaggatgtgacaaacgtggtcagacgggatgtggagaagtggggccccttcgatctggtgtacggcagcacccaacccctgggcagctcttgtgaccggtgccctggctggtacatgtttcagttccaccggatcctgcagtacgccctgccgagacaggagtcccagcggccattcttttggattttcatggacaacttgctgctgaccgaggatgaccaggaaactaccactcggttcctgcagaccgaagccgtgaccctgcaggacgtgagaggccgggactaccagaacgccatgcgggtgtggtccaacatccctggactgaaaagcaagcacgcacctctgacccctaaagaagaggagtacctgcaggcccaggtgcggagcagaagcaagctggacgcccctaaggtggatctgctggtgaagaattgcctcctgcccctgagagagtacttcaagtatttcagccagaatagtctgcccctgggaggcagcggcggcggcttccaggagctggtgaccttcagggacgtggccatcgacttcagcaggcaggagtgggagtacctggacagcgtgcagagggacctgtacagggacgtgatgctggagaactacaggaacctggtgagcctgggccacagcatcagcaagcccgacgtggtggacctgctggagcagggcaaggagccctggatgatcctgagggaggagacccagaggcagtacaccgacctggacctgcacggcggcccaagcagcggcgcccctcctcccagcggcggcagcccagccggctccccaacctctaccgaggagggcacctctgagtccgccacccccgagagcggccctggcacctccaccgagcccagcgagggcagcgcacccggcagccctgccggcagccccacctccacagaggagggaaccagcaccgagcccagcgaaggcagcgccccaggcaccagcaccgagcctagtgagcaggagattaaacggatcaacaagatcagaagaagacttgtgaaagacagcaacaccaagaaggccggcaagacaggccccatgaaaaccctgctggttagagtgatgacacccgatctgagagagcggctggaaaacctgagaaagaagcctgaaaatatcccccagcccatcagcaatacatctagagccaacctgaataagctgctgaccgattacaccgaaatgaagaaggcgatcctgcatgtgtactgggaagagttccagaaggaccctgtgggcctgatgagccgggtggcccagcctgccagcaagaagatcgatcagaacaagctgaaacctgagatggacgagaagggcaacctgaccaccgccggctttgcctgctctcagtgtggccagcccctgttcgtgtacaagctggagcaggtgtctgagaagggcaaggcttacaccaactacttcggacggtgcaatgtggccgagcacgaaaagctgatcctgctggcccagctgaagcccgagaaggatagcgacgaagccgtgacatatagcctgggaaagtttgggcagagggccctggatttctacagcattcatgtgaccaaggagtccacccaccccgtgaagcccctggcccagatcgccggaaacagatacgcctccggacctgtgggaaaggccctgagcgacgcatgtatgggcacaatcgcctccttcctgtctaagtaccaggacatcatcatcgaacaccagaaggtggtgaagggcaaccagaagagactggagagcctgcgggagctggccggcaaggaaaacctggaataccctagcgtgaccctgccacctcagcctcacaccaaggagggcgttgatgcctacaacgaagtgatcgcccgggtgcgaatgtgggtgaacctgaacctgtggcagaagctgaagctaagcagagatgatgccaagcctctgctgagactgaagggattcccttcctttcctctggtcgagagacaggccaacgaagtggactggtgggacatggtgtgtaacgtgaagaagctgatcaacgagaaaaaggaggatggcaaggtgttttggcagaatctggctggctacaagagacaggaagccctgagaccatacctgagcagcgaggaagatcggaagaagggaaagaaattcgctcggtaccagctgggcgacctgctgctgcacctggaaaagaagcacggcgaggactggggaaaggtgtacgacgaggcctgggagcggattgacaagaaagtggaaggcctgagcaagcacatcaagctggaagaggaacggagaagcgaggacgcccagagcaaggccgccctgaccgactggctgcgggctaaggccagcttcgtgatcgagggcctgaaggaggccgacaaggacgagttctgcagatgcgagctgaagctgcagaagtggtacggggacctgcggggaaagcccttcgccatcgaagccgagaacagcatcctggacatcagcggcttcagcaagcagtacaactgtgccttcatctggcagaaggacggcgtgaagaagctgaacctgtacctgatcatcaactacttcaagggcggcaagctgcggttcaagaagatcaaacctgaagccttcgaagccaacagattctacaccgtgatcaacaaaaagagcggcgagatcgtgcccatggaggtgaacttcaacttcgacgaccccaacctgatcatcctgcctctggcctttggcaagagacagggcagagaattcatctggaacgacctgctgtccctggaaaccggcagcctgaagctggccaacggaagagtgatcgagaagacactgtacaacagaagaacccggcaggatgagcctgccctgttcgtggccctgaccttcgagcggcgggaggtcctggactcctccaatatcaaaccaatgaacctgatcggcgtggcaagaggcgaaaacatccccgccgtgatcgccctgaccgaccccgagggctgcccactgagccggtttaaggatagcctgggaaacccaacccacatcctgagaatcggcgagagctataaggagaagcagcggaccatccaggccaagaaggaggtggagcagcggagagccggcggctacagccggaagtacgccagcaaagccaagaatctggcagacgatatggtgagaaacaccgctagagatctgctgtactacgccgtgacccaggatgccatgctgatcttcgccaacctgagccggggcttcggccggcagggcaagcggaccttcatggccgagagacagtacacacggatggaggactggctgaccgccaagctggcctacgagggcctgagcaagacctacctgtccaagacactggcccagtacacctccaagacatgcagcaactgtgggtttaccatcaccagcgccgactacgacagggtgctggagaagctgaagaagacagcaacaggctggatgaccacaattaacggcaaggagctgaaggtggagggccagattacctactacaacagatacaagagacagaacgtagtcaaggacctgtccgtcgagctggatagactgagcgaagaatctgtgaacaacgacatctcctcctggacaaagggcagaagcggagaagctctgagcctcctgaagaaaagattctcccatagacccgtgcaggagaagttcgtgtgcctgaactgcggcttcgagacacacgcagccgagcaagccgccctgaacatcgccagatcctggctgttcctgcggagccaggagtacaagaaataccagacaaacaagacaaccggcaacaccgataagagagccttcgtcgagacctggcagtccttttaccggaagaagcttaaggaggtgtggaaacctgccgtgcggtctggcggatctggcggaggctccaccagccccaagaaaaagagaaaagtctaagctgccttctgcggggcttgccttctggccatgcccttcttctctcccttgcacctgtacctcttggtctttgaataaagcctgagtaggaaggctagcaaaaaaaaaaaaaaaaaaaaaaaaaaaaaaaaaaaaaaaaaaaaaaaaaaaaaaaaaaaaaaaaaaaaaaaaaaaaaaaa

SEQ ID NO: 12585 - RNA, 5785 nt, synthetic construct
  source 1..5785: mol_type = other RNA
aggaaataagagagaaaagaagagtaagaagaaatataagagccaccatggcccctaagaagaagcgtaaagtgagccggatggaacgcctcgtctacgaggtgcggcagaagtgcagaaacatcgaggacatctgcatctcctgcggatctctgaacgtgaccctggagcacccactgttcatcggcggcatgtgccagaactgtaaaaactgttttctggagtgtgcctatcaatacgacgatgacggctaccagagctactgcaccatctgttgcggcggaagagaggtgctgatgtgtggaaataacaactgctgccggtgcttctgcgtggaatgcgtggacctgctggtgggccccggcgccgcccaggccgctattaaggaagatccttggaactgctacatgtgcggccacaagggcacatacggcctgctgagacggagagaggactggcctagcagactgcagatgttcttcgccaataaccacgaccaggagttcgacccccctaaggtgtaccctcccgtccccgccgagaagagaaagcccatccgggtcctgagcctgttcgatggcatcgccaccggtctgctggtgctgaaggacctgggcatccaggtggataggtacattgcctccgaggtgtgcgaggactccatcaccgtgggaatggtgcgtcatcagggcaagatcatgtacgtgggcgacgtgcggagcgtgacacagaagcatatccaggagtggggccctttcgacctggtgatcggcggcagcccttgcaatgacctgagcatcgtgaacccagcccggaagggcctgtacgagggaaccggcagactgttcttcgagttttacagactgctgcacgacgcccggcctaaggaaggcgacgaccggcccttcttttggctgttcgagaatgtggtggccatgggagtcagcgacaagcgggatattagccggttcctggagagcaaccccgtgatgatcgatgccaaggaagtgagcgccgcccaccgggccagatacttctggggcaatctgcctggcatgaacagacccctggccagcaccgtgaacgacaagctggagctgcaggagtgcctggagcacggccggatcgccaagttcagcaaggtgagaaccatcaccacccgaagcaacagcatcaaacaaggcaaggaccagcactttcctgtgttcatgaacgagaaggaggacatcctgtggtgtaccgagatggagagagtgttcgggttcccagtccactacacagatgtcagcaacatgtctagactggccagacagagactgctgggaagaagctggtccgtccctgtgatcagacacctgttcgcccctctgaaggagtacttcgcctgcgtgagcagcggcaacagcaacgccaacagccggggccccagcttctctagcggcctggtgccactgtccctgagagggagccacatgggccccatggagatctacaaaaccgtgagcgcctggaagcggcagcctgtgcgcgtgctgagcctgtttcggaatatcgataaagtcctgaaaagcctgggattcctggagagcggctctggctccggcggtggcaccctgaagtacgtggaggatgtgacaaacgtggtcagacgggatgtggagaagtggggccccttcgatctggtgtacggcagcacccaacccctgggcagctcttgtgaccggtgccctggctggtacatgtttcagttccaccggatcctgcagtacgccctgccgagacaggagtcccagcggccattcttttggattttcatggacaacttgctgctgaccgaggatgaccaggaaactaccactcggttcctgcagaccgaagccgtgaccctgcaggacgtgagaggccgggactaccagaacgccatgcgggtgtggtccaacatccctggactgaaaagcaagcacgcacctctgacccctaaagaagaggagtacctgcaggcccaggtgcggagcagaagcaagctggacgcccctaaggtggatctgctggtgaagaattgcctcctgcccctgagagagtacttcaagtatttcagccagaatagtctgcccctgggaggcagcggcggcggcacccagaggagcatcagcttcaaggacctggccgtggacttcaccagggaggagtggcagaggctgggccccgcccagaggctgctgtacagggacgtgatgctggagaactacagcaacctgatcgccgtgggcctgcacgtgagcaagcccgacgtgatcctgaagctggagcagggcaaggagccctgggtggtggagaacagcagcaggcagaaccacgccgaggacgacgagcccctgggcggcccaagcagcggcgcccctcctcccagcggcggcagcccagccggctccccaacctctaccgaggagggcacctctgagtccgccacccccgagagcggccctggcacctccaccgagcccagcgagggcagcgcacccggcagccctgccggcagccccacctccacagaggagggaaccagcaccgagcccagcgaaggcagcgccccaggcaccagcaccgagcctagtgagcaggagattaaacggatcaacaagatcagaagaagacttgtgaaagacagcaacaccaagaaggccggcaagacaggccccatgaaaaccctgctggttagagtgatgacacccgatctgagagagcggctggaaaacctgagaaagaagcctgaaaatatcccccagcccatcagcaatacatctagagccaacctgaataagctgctgaccgattacaccgaaatgaagaaggcgatcctgcatgtgtactgggaagagttccagaaggaccctgtgggcctgatgagccgggtggcccagcctgccagcaagaagatcgatcagaacaagctgaaacctgagatggacgagaagggcaacctgaccaccgccggctttgcctgctctcagtgtggccagcccctgttcgtgtacaagctggagcaggtgtctgagaagggcaaggcttacaccaactacttcggacggtgcaatgtggccgagcacgaaaagctgatcctgctggcccagctgaagcccgagaaggatagcgacgaagccgtgacatatagcctgggaaagtttgggcagagggccctggatttctacagcattcatgtgaccaaggagtccacccaccccgtgaagcccctggcccagatcgccggaaacagatacgcctccggacctgtgggaaaggccctgagcgacgcatgtatgggcacaatcgcctccttcctgtctaagtaccaggacatcatcatcgaacaccagaaggtggtgaagggcaaccagaagagactggagagcctgcgggagctggccggcaaggaaaacctggaataccctagcgtgaccctgccacctcagcctcacaccaaggagggcgttgatgcctacaacgaagtgatcgcccgggtgcgaatgtgggtgaacctgaacctgtggcagaagctgaagctaagcagagatgatgccaagcctctgctgagactgaagggattcccttcctttcctctggtcgagagacaggccaacgaagtggactggtgggacatggtgtgtaacgtgaagaagctgatcaacgagaaaaaggaggatggcaaggtgttttggcagaatctggctggctacaagagacaggaagccctgagaccatacctgagcagcgaggaagatcggaagaagggaaagaaattcgctcggtaccagctgggcgacctgctgctgcacctggaaaagaagcacggcgaggactggggaaaggtgtacgacgaggcctgggagcggattgacaagaaagtggaaggcctgagcaagcacatcaagctggaagaggaacggagaagcgaggacgcccagagcaaggccgccctgaccgactggctgcgggctaaggccagcttcgtgatcgagggcctgaaggaggccgacaaggacgagttctgcagatgcgagctgaagctgcagaagtggtacggggacctgcggggaaagcccttcgccatcgaagccgagaacagcatcctggacatcagcggcttcagcaagcagtacaactgtgccttcatctggcagaaggacggcgtgaagaagctgaacctgtacctgatcatcaactacttcaagggcggcaagctgcggttcaagaagatcaaacctgaagccttcgaagccaacagattctacaccgtgatcaacaaaaagagcggcgagatcgtgcccatggaggtgaacttcaacttcgacgaccccaacctgatcatcctgcctctggcctttggcaagagacagggcagagaattcatctggaacgacctgctgtccctggaaaccggcagcctgaagctggccaacggaagagtgatcgagaagacactgtacaacagaagaacccggcaggatgagcctgccctgttcgtggccctgaccttcgagcggcgggaggtcctggactcctccaatatcaaaccaatgaacctgatcggcgtggcaagaggcgaaaacatccccgccgtgatcgccctgaccgaccccgagggctgcccactgagccggtttaaggatagcctgggaaacccaacccacatcctgagaatcggcgagagctataaggagaagcagcggaccatccaggccaagaaggaggtggagcagcggagagccggcggctacagccggaagtacgccagcaaagccaagaatctggcagacgatatggtgagaaacaccgctagagatctgctgtactacgccgtgacccaggatgccatgctgatcttcgccaacctgagccggggcttcggccggcagggcaagcggaccttcatggccgagagacagtacacacggatggaggactggctgaccgccaagctggcctacgagggcctgagcaagacctacctgtccaagacactggcccagtacacctccaagacatgcagcaactgtgggtttaccatcaccagcgccgactacgacagggtgctggagaagctgaagaagacagcaacaggctggatgaccacaattaacggcaaggagctgaaggtggagggccagattacctactacaacagatacaagagacagaacgtagtcaaggacctgtccgtcgagctggatagactgagcgaagaatctgtgaacaacgacatctcctcctggacaaagggcagaagcggagaagctctgagcctcctgaagaaaagattctcccatagacccgtgcaggagaagttcgtgtgcctgaactgcggcttcgagacacacgcagccgagcaagccgccctgaacatcgccagatcctggctgttcctgcggagccaggagtacaagaaataccagacaaacaagacaaccggcaacaccgataagagagccttcgtcgagacctggcagtccttttaccggaagaagcttaaggaggtgtggaaacctgccgtgcggtctggcggatctggcggaggctccaccagccccaagaaaaagagaaaagtctaagctgccttctgcggggcttgccttctggccatgcccttcttctctcccttgcacctgtacctcttggtctttgaataaagcctgagtaggaaggctagcaaaaaaaaaaaaaaaaaaaaaaaaaaaaaaaaaaaaaaaaaaaaaaaaaaaaaaaaaaaaaaaaaaaaaaaaaaaaaaaa

SEQ ID NO: 12586 - RNA, 5785 nt, synthetic construct
  source 1..5785: mol_type = other RNA
aggaaataagagagaaaagaagagtaagaagaaatataagagccaccatggcccctaagaagaagcgtaaagtgagccggatggaacgcctcgtctacgaggtgcggcagaagtgcagaaacatcgaggacatctgcatctcctgcggatctctgaacgtgaccctggagcacccactgttcatcggcggcatgtgccagaactgtaaaaactgttttctggagtgtgcctatcaatacgacgatgacggctaccagagctactgcaccatctgttgcggcggaagagaggtgctgatgtgtggaaataacaactgctgccggtgcttctgcgtggaatgcgtggacctgctggtgggccccggcgccgcccaggccgctattaaggaagatccttggaactgctacatgtgcggccacaagggcacatacggcctgctgagacggagagaggactggcctagcagactgcagatgttcttcgccaataaccacgaccaggagttcgacccccctaaggtgtaccctcccgtccccgccgagaagagaaagcccatccgggtcctgagcctgttcgatggcatcgccaccggtctgctggtgctgaaggacctgggcatccaggtggataggtacattgcctccgaggtgtgcgaggactccatcaccgtgggaatggtgcgtcatcagggcaagatcatgtacgtgggcgacgtgcggagcgtgacacagaagcatatccaggagtggggccctttcgacctggtgatcggcggcagcccttgcaatgacctgagcatcgtgaacccagcccggaagggcctgtacgagggaaccggcagactgttcttcgagttttacagactgctgcacgacgcccggcctaaggaaggcgacgaccggcccttcttttggctgttcgagaatgtggtggccatgggagtcagcgacaagcgggatattagccggttcctggagagcaaccccgtgatgatcgatgccaaggaagtgagcgccgcccaccgggccagatacttctggggcaatctgcctggcatgaacagacccctggccagcaccgtgaacgacaagctggagctgcaggagtgcctggagcacggccggatcgccaagttcagcaaggtgagaaccatcaccacccgaagcaacagcatcaaacaaggcaaggaccagcactttcctgtgttcatgaacgagaaggaggacatcctgtggtgtaccgagatggagagagtgttcgggttcccagtccactacacagatgtcagcaacatgtctagactggccagacagagactgctgggaagaagctggtccgtccctgtgatcagacacctgttcgcccctctgaaggagtacttcgcctgcgtgagcagcggcaacagcaacgccaacagccggggccccagcttctctagcggcctggtgccactgtccctgagagggagccacatgggccccatggagatctacaaaaccgtgagcgcctggaagcggcagcctgtgcgcgtgctgagcctgtttcggaatatcgataaagtcctgaaaagcctgggattcctggagagcggctctggctccggcggtggcaccctgaagtacgtggaggatgtgacaaacgtggtcagacgggatgtggagaagtggggccccttcgatctggtgtacggcagcacccaacccctgggcagctcttgtgaccggtgccctggctggtacatgtttcagttccaccggatcctgcagtacgccctgccgagacaggagtcccagcggccattcttttggattttcatggacaacttgctgctgaccgaggatgaccaggaaactaccactcggttcctgcagaccgaagccgtgaccctgcaggacgtgagaggccgggactaccagaacgccatgcgggtgtggtccaacatccctggactgaaaagcaagcacgcacctctgacccctaaagaagaggagtacctgcaggcccaggtgcggagcagaagcaagctggacgcccctaaggtggatctgctggtgaagaattgcctcctgcccctgagagagtacttcaagtatttcagccagaatagtctgcccctgggaggcagcggcggcggcatggacagcgtgaccatcgaggacgtggccgtggacttcaccctggaggagtgggccctgctgggccccagccagaggaagctgtacagggacgtgatgcaggagaccctgaggaacctggccgccgtgggcgccaagagggagtaccacgacatcgaggaccagtacaagaaccagggcaggaagctgaggaccttcatggtggagaggctgtgcaagagcaaggacatcagcctgtgcggcggcggcccaagcagcggcgcccctcctcccagcggcggcagcccagccggctccccaacctctaccgaggagggcacctctgagtccgccacccccgagagcggccctggcacctccaccgagcccagcgagggcagcgcacccggcagccctgccggcagccccacctccacagaggagggaaccagcaccgagcccagcgaaggcagcgccccaggcaccagcaccgagcctagtgagcaggagattaaacggatcaacaagatcagaagaagacttgtgaaagacagcaacaccaagaaggccggcaagacaggccccatgaaaaccctgctggttagagtgatgacacccgatctgagagagcggctggaaaacctgagaaagaagcctgaaaatatcccccagcccatcagcaatacatctagagccaacctgaataagctgctgaccgattacaccgaaatgaagaaggcgatcctgcatgtgtactgggaagagttccagaaggaccctgtgggcctgatgagccgggtggcccagcctgccagcaagaagatcgatcagaacaagctgaaacctgagatggacgagaagggcaacctgaccaccgccggctttgcctgctctcagtgtggccagcccctgttcgtgtacaagctggagcaggtgtctgagaagggcaaggcttacaccaactacttcggacggtgcaatgtggccgagcacgaaaagctgatcctgctggcccagctgaagcccgagaaggatagcgacgaagccgtgacatatagcctgggaaagtttgggcagagggccctggatttctacagcattcatgtgaccaaggagtccacccaccccgtgaagcccctggcccagatcgccggaaacagatacgcctccggacctgtgggaaaggccctgagcgacgcatgtatgggcacaatcgcctccttcctgtctaagtaccaggacatcatcatcgaacaccagaaggtggtgaagggcaaccagaagagactggagagcctgcgggagctggccggcaaggaaaacctggaataccctagcgtgaccctgccacctcagcctcacaccaaggagggcgttgatgcctacaacgaagtgatcgcccgggtgcgaatgtgggtgaacctgaacctgtggcagaagctgaagctaagcagagatgatgccaagcctctgctgagactgaagggattcccttcctttcctctggtcgagagacaggccaacgaagtggactggtgggacatggtgtgtaacgtgaagaagctgatcaacgagaaaaaggaggatggcaaggtgttttggcagaatctggctggctacaagagacaggaagccctgagaccatacctgagcagcgaggaagatcggaagaagggaaagaaattcgctcggtaccagctgggcgacctgctgctgcacctggaaaagaagcacggcgaggactggggaaaggtgtacgacgaggcctgggagcggattgacaagaaagtggaaggcctgagcaagcacatcaagctggaagaggaacggagaagcgaggacgcccagagcaaggccgccctgaccgactggctgcgggctaaggccagcttcgtgatcgagggcctgaaggaggccgacaaggacgagttctgcagatgcgagctgaagctgcagaagtggtacggggacctgcggggaaagcccttcgccatcgaagccgagaacagcatcctggacatcagcggcttcagcaagcagtacaactgtgccttcatctggcagaaggacggcgtgaagaagctgaacctgtacctgatcatcaactacttcaagggcggcaagctgcggttcaagaagatcaaacctgaagccttcgaagccaacagattctacaccgtgatcaacaaaaagagcggcgagatcgtgcccatggaggtgaacttcaacttcgacgaccccaacctgatcatcctgcctctggcctttggcaagagacagggcagagaattcatctggaacgacctgctgtccctggaaaccggcagcctgaagctggccaacggaagagtgatcgagaagacactgtacaacagaagaacccggcaggatgagcctgccctgttcgtggccctgaccttcgagcggcgggaggtcctggactcctccaatatcaaaccaatgaacctgatcggcgtggcaagaggcgaaaacatccccgccgtgatcgccctgaccgaccccgagggctgcccactgagccggtttaaggatagcctgggaaacccaacccacatcctgagaatcggcgagagctataaggagaagcagcggaccatccaggccaagaaggaggtggagcagcggagagccggcggctacagccggaagtacgccagcaaagccaagaatctggcagacgatatggtgagaaacaccgctagagatctgctgtactacgccgtgacccaggatgccatgctgatcttcgccaacctgagccggggcttcggccggcagggcaagcggaccttcatggccgagagacagtacacacggatggaggactggctgaccgccaagctggcctacgagggcctgagcaagacctacctgtccaagacactggcccagtacacctccaagacatgcagcaactgtgggtttaccatcaccagcgccgactacgacagggtgctggagaagctgaagaagacagcaacaggctggatgaccacaattaacggcaaggagctgaaggtggagggccagattacctactacaacagatacaagagacagaacgtagtcaaggacctgtccgtcgagctggatagactgagcgaagaatctgtgaacaacgacatctcctcctggacaaagggcagaagcggagaagctctgagcctcctgaagaaaagattctcccatagacccgtgcaggagaagttcgtgtgcctgaactgcggcttcgagacacacgcagccgagcaagccgccctgaacatcgccagatcctggctgttcctgcggagccaggagtacaagaaataccagacaaacaagacaaccggcaacaccgataagagagccttcgtcgagacctggcagtccttttaccggaagaagcttaaggaggtgtggaaacctgccgtgcggtctggcggatctggcggaggctccaccagccccaagaaaaagagaaaagtctaagctgccttctgcggggcttgccttctggccatgcccttcttctctcccttgcacctgtacctcttggtctttgaataaagcctgagtaggaaggctagcaaaaaaaaaaaaaaaaaaaaaaaaaaaaaaaaaaaaaaaaaaaaaaaaaaaaaaaaaaaaaaaaaaaaaaaaaaaaaaaa

SEQ ID NO: 12587 - RNA, 5785 nt, synthetic construct
  source 1..5785: mol_type = other RNA
aggaaataagagagaaaagaagagtaagaagaaatataagagccaccatggcccctaagaagaagcgtaaagtgagccggatggaacgcctcgtctacgaggtgcggcagaagtgcagaaacatcgaggacatctgcatctcctgcggatctctgaacgtgaccctggagcacccactgttcatcggcggcatgtgccagaactgtaaaaactgttttctggagtgtgcctatcaatacgacgatgacggctaccagagctactgcaccatctgttgcggcggaagagaggtgctgatgtgtggaaataacaactgctgccggtgcttctgcgtggaatgcgtggacctgctggtgggccccggcgccgcccaggccgctattaaggaagatccttggaactgctacatgtgcggccacaagggcacatacggcctgctgagacggagagaggactggcctagcagactgcagatgttcttcgccaataaccacgaccaggagttcgacccccctaaggtgtaccctcccgtccccgccgagaagagaaagcccatccgggtcctgagcctgttcgatggcatcgccaccggtctgctggtgctgaaggacctgggcatccaggtggataggtacattgcctccgaggtgtgcgaggactccatcaccgtgggaatggtgcgtcatcagggcaagatcatgtacgtgggcgacgtgcggagcgtgacacagaagcatatccaggagtggggccctttcgacctggtgatcggcggcagcccttgcaatgacctgagcatcgtgaacccagcccggaagggcctgtacgagggaaccggcagactgttcttcgagttttacagactgctgcacgacgcccggcctaaggaaggcgacgaccggcccttcttttggctgttcgagaatgtggtggccatgggagtcagcgacaagcgggatattagccggttcctggagagcaaccccgtgatgatcgatgccaaggaagtgagcgccgcccaccgggccagatacttctggggcaatctgcctggcatgaacagacccctggccagcaccgtgaacgacaagctggagctgcaggagtgcctggagcacggccggatcgccaagttcagcaaggtgagaaccatcaccacccgaagcaacagcatcaaacaaggcaaggaccagcactttcctgtgttcatgaacgagaaggaggacatcctgtggtgtaccgagatggagagagtgttcgggttcccagtccactacacagatgtcagcaacatgtctagactggccagacagagactgctgggaagaagctggtccgtccctgtgatcagacacctgttcgcccctctgaaggagtacttcgcctgcgtgagcagcggcaacagcaacgccaacagccggggccccagcttctctagcggcctggtgccactgtccctgagagggagccacatgggccccatggagatctacaaaaccgtgagcgcctggaagcggcagcctgtgcgcgtgctgagcctgtttcggaatatcgataaagtcctgaaaagcctgggattcctggagagcggctctggctccggcggtggcaccctgaagtacgtggaggatgtgacaaacgtggtcagacgggatgtggagaagtggggccccttcgatctggtgtacggcagcacccaacccctgggcagctcttgtgaccggtgccctggctggtacatgtttcagttccaccggatcctgcagtacgccctgccgagacaggagtcccagcggccattcttttggattttcatggacaacttgctgctgaccgaggatgaccaggaaactaccactcggttcctgcagaccgaagccgtgaccctgcaggacgtgagaggccgggactaccagaacgccatgcgggtgtggtccaacatccctggactgaaaagcaagcacgcacctctgacccctaaagaagaggagtacctgcaggcccaggtgcggagcagaagcaagctggacgcccctaaggtggatctgctggtgaagaattgcctcctgcccctgagagagtacttcaagtatttcagccagaatagtctgcccctgggaggcagcggcggcggcctgcagggcagcgtgagcttcaaggacgtgaccgtggacttcacccaggaggagtggcagcagctggaccccgcccagaaggccctgtacagggacgtgatgctggagaactactgccacttcgtgagcgtgggcttccacatgaccaagcccgacatgatcaggaggctggagcagggcgaggagctgtggaccgagaggatcttccccggccagagctacctggaggaggacggcaaggccggcggcccaagcagcggcgcccctcctcccagcggcggcagcccagccggctccccaacctctaccgaggagggcacctctgagtccgccacccccgagagcggccctggcacctccaccgagcccagcgagggcagcgcacccggcagccctgccggcagccccacctccacagaggagggaaccagcaccgagcccagcgaaggcagcgccccaggcaccagcaccgagcctagtgagcaggagattaaacggatcaacaagatcagaagaagacttgtgaaagacagcaacaccaagaaggccggcaagacaggccccatgaaaaccctgctggttagagtgatgacacccgatctgagagagcggctggaaaacctgagaaagaagcctgaaaatatcccccagcccatcagcaatacatctagagccaacctgaataagctgctgaccgattacaccgaaatgaagaaggcgatcctgcatgtgtactgggaagagttccagaaggaccctgtgggcctgatgagccgggtggcccagcctgccagcaagaagatcgatcagaacaagctgaaacctgagatggacgagaagggcaacctgaccaccgccggctttgcctgctctcagtgtggccagcccctgttcgtgtacaagctggagcaggtgtctgagaagggcaaggcttacaccaactacttcggacggtgcaatgtggccgagcacgaaaagctgatcctgctggcccagctgaagcccgagaaggatagcgacgaagccgtgacatatagcctgggaaagtttgggcagagggccctggatttctacagcattcatgtgaccaaggagtccacccaccccgtgaagcccctggcccagatcgccggaaacagatacgcctccggacctgtgggaaaggccctgagcgacgcatgtatgggcacaatcgcctccttcctgtctaagtaccaggacatcatcatcgaacaccagaaggtggtgaagggcaaccagaagagactggagagcctgcgggagctggccggcaaggaaaacctggaataccctagcgtgaccctgccacctcagcctcacaccaaggagggcgttgatgcctacaacgaagtgatcgcccgggtgcgaatgtgggtgaacctgaacctgtggcagaagctgaagctaagcagagatgatgccaagcctctgctgagactgaagggattcccttcctttcctctggtcgagagacaggccaacgaagtggactggtgggacatggtgtgtaacgtgaagaagctgatcaacgagaaaaaggaggatggcaaggtgttttggcagaatctggctggctacaagagacaggaagccctgagaccatacctgagcagcgaggaagatcggaagaagggaaagaaattcgctcggtaccagctgggcgacctgctgctgcacctggaaaagaagcacggcgaggactggggaaaggtgtacgacgaggcctgggagcggattgacaagaaagtggaaggcctgagcaagcacatcaagctggaagaggaacggagaagcgaggacgcccagagcaaggccgccctgaccgactggctgcgggctaaggccagcttcgtgatcgagggcctgaaggaggccgacaaggacgagttctgcagatgcgagctgaagctgcagaagtggtacggggacctgcggggaaagcccttcgccatcgaagccgagaacagcatcctggacatcagcggcttcagcaagcagtacaactgtgccttcatctggcagaaggacggcgtgaagaagctgaacctgtacctgatcatcaactacttcaagggcggcaagctgcggttcaagaagatcaaacctgaagccttcgaagccaacagattctacaccgtgatcaacaaaaagagcggcgagatcgtgcccatggaggtgaacttcaacttcgacgaccccaacctgatcatcctgcctctggcctttggcaagagacagggcagagaattcatctggaacgacctgctgtccctggaaaccggcagcctgaagctggccaacggaagagtgatcgagaagacactgtacaacagaagaacccggcaggatgagcctgccctgttcgtggccctgaccttcgagcggcgggaggtcctggactcctccaatatcaaaccaatgaacctgatcggcgtggcaagaggcgaaaacatccccgccgtgatcgccctgaccgaccccgagggctgcccactgagccggtttaaggatagcctgggaaacccaacccacatcctgagaatcggcgagagctataaggagaagcagcggaccatccaggccaagaaggaggtggagcagcggagagccggcggctacagccggaagtacgccagcaaagccaagaatctggcagacgatatggtgagaaacaccgctagagatctgctgtactacgccgtgacccaggatgccatgctgatcttcgccaacctgagccggggcttcggccggcagggcaagcggaccttcatggccgagagacagtacacacggatggaggactggctgaccgccaagctggcctacgagggcctgagcaagacctacctgtccaagacactggcccagtacacctccaagacatgcagcaactgtgggtttaccatcaccagcgccgactacgacagggtgctggagaagctgaagaagacagcaacaggctggatgaccacaattaacggcaaggagctgaaggtggagggccagattacctactacaacagatacaagagacagaacgtagtcaaggacctgtccgtcgagctggatagactgagcgaagaatctgtgaacaacgacatctcctcctggacaaagggcagaagcggagaagctctgagcctcctgaagaaaagattctcccatagacccgtgcaggagaagttcgtgtgcctgaactgcggcttcgagacacacgcagccgagcaagccgccctgaacatcgccagatcctggctgttcctgcggagccaggagtacaagaaataccagacaaacaagacaaccggcaacaccgataagagagccttcgtcgagacctggcagtccttttaccggaagaagcttaaggaggtgtggaaacctgccgtgcggtctggcggatctggcggaggctccaccagccccaagaaaaagagaaaagtctaagctgccttctgcggggcttgccttctggccatgcccttcttctctcccttgcacctgtacctcttggtctttgaataaagcctgagtaggaaggctagcaaaaaaaaaaaaaaaaaaaaaaaaaaaaaaaaaaaaaaaaaaaaaaaaaaaaaaaaaaaaaaaaaaaaaaaaaaaaaaaa

SEQ ID NO: 12588 - RNA, 5785 nt, synthetic construct
  source 1..5785: mol_type = other RNA
aggaaataagagagaaaagaagagtaagaagaaatataagagccaccatggcccctaagaagaagcgtaaagtgagccggatggaacgcctcgtctacgaggtgcggcagaagtgcagaaacatcgaggacatctgcatctcctgcggatctctgaacgtgaccctggagcacccactgttcatcggcggcatgtgccagaactgtaaaaactgttttctggagtgtgcctatcaatacgacgatgacggctaccagagctactgcaccatctgttgcggcggaagagaggtgctgatgtgtggaaataacaactgctgccggtgcttctgcgtggaatgcgtggacctgctggtgggccccggcgccgcccaggccgctattaaggaagatccttggaactgctacatgtgcggccacaagggcacatacggcctgctgagacggagagaggactggcctagcagactgcagatgttcttcgccaataaccacgaccaggagttcgacccccctaaggtgtaccctcccgtccccgccgagaagagaaagcccatccgggtcctgagcctgttcgatggcatcgccaccggtctgctggtgctgaaggacctgggcatccaggtggataggtacattgcctccgaggtgtgcgaggactccatcaccgtgggaatggtgcgtcatcagggcaagatcatgtacgtgggcgacgtgcggagcgtgacacagaagcatatccaggagtggggccctttcgacctggtgatcggcggcagcccttgcaatgacctgagcatcgtgaacccagcccggaagggcctgtacgagggaaccggcagactgttcttcgagttttacagactgctgcacgacgcccggcctaaggaaggcgacgaccggcccttcttttggctgttcgagaatgtggtggccatgggagtcagcgacaagcgggatattagccggttcctggagagcaaccccgtgatgatcgatgccaaggaagtgagcgccgcccaccgggccagatacttctggggcaatctgcctggcatgaacagacccctggccagcaccgtgaacgacaagctggagctgcaggagtgcctggagcacggccggatcgccaagttcagcaaggtgagaaccatcaccacccgaagcaacagcatcaaacaaggcaaggaccagcactttcctgtgttcatgaacgagaaggaggacatcctgtggtgtaccgagatggagagagtgttcgggttcccagtccactacacagatgtcagcaacatgtctagactggccagacagagactgctgggaagaagctggtccgtccctgtgatcagacacctgttcgcccctctgaaggagtacttcgcctgcgtgagcagcggcaacagcaacgccaacagccggggccccagcttctctagcggcctggtgccactgtccctgagagggagccacatgggccccatggagatctacaaaaccgtgagcgcctggaagcggcagcctgtgcgcgtgctgagcctgtttcggaatatcgataaagtcctgaaaagcctgggattcctggagagcggctctggctccggcggtggcaccctgaagtacgtggaggatgtgacaaacgtggtcagacgggatgtggagaagtggggccccttcgatctggtgtacggcagcacccaacccctgggcagctcttgtgaccggtgccctggctggtacatgtttcagttccaccggatcctgcagtacgccctgccgagacaggagtcccagcggccattcttttggattttcatggacaacttgctgctgaccgaggatgaccaggaaactaccactcggttcctgcagaccgaagccgtgaccctgcaggacgtgagaggccgggactaccagaacgccatgcgggtgtggtccaacatccctggactgaaaagcaagcacgcacctctgacccctaaagaagaggagtacctgcaggcccaggtgcggagcagaagcaagctggacgcccctaaggtggatctgctggtgaagaattgcctcctgcccctgagagagtacttcaagtatttcagccagaatagtctgcccctgggaggcagcggcggcggctgcaaggagagcgtgatcttcaaggacgtgtgcgtgaacttcagcctggaggagtgggagtgcctggacctgacccagaggaacctgtacaggtgcgtgatgctggagaactacagcaacctggtgagcgtgggcctgagcatccccaagcccgacgtgatcagcctgctggagcagggcaaggagccctggggcgtgttcgacagcgagatgaccaggggcctgaaccaggactgcggcagcggcggcccaagcagcggcgcccctcctcccagcggcggcagcccagccggctccccaacctctaccgaggagggcacctctgagtccgccacccccgagagcggccctggcacctccaccgagcccagcgagggcagcgcacccggcagccctgccggcagccccacctccacagaggagggaaccagcaccgagcccagcgaaggcagcgccccaggcaccagcaccgagcctagtgagcaggagattaaacggatcaacaagatcagaagaagacttgtgaaagacagcaacaccaagaaggccggcaagacaggccccatgaaaaccctgctggttagagtgatgacacccgatctgagagagcggctggaaaacctgagaaagaagcctgaaaatatcccccagcccatcagcaatacatctagagccaacctgaataagctgctgaccgattacaccgaaatgaagaaggcgatcctgcatgtgtactgggaagagttccagaaggaccctgtgggcctgatgagccgggtggcccagcctgccagcaagaagatcgatcagaacaagctgaaacctgagatggacgagaagggcaacctgaccaccgccggctttgcctgctctcagtgtggccagcccctgttcgtgtacaagctggagcaggtgtctgagaagggcaaggcttacaccaactacttcggacggtgcaatgtggccgagcacgaaaagctgatcctgctggcccagctgaagcccgagaaggatagcgacgaagccgtgacatatagcctgggaaagtttgggcagagggccctggatttctacagcattcatgtgaccaaggagtccacccaccccgtgaagcccctggcccagatcgccggaaacagatacgcctccggacctgtgggaaaggccctgagcgacgcatgtatgggcacaatcgcctccttcctgtctaagtaccaggacatcatcatcgaacaccagaaggtggtgaagggcaaccagaagagactggagagcctgcgggagctggccggcaaggaaaacctggaataccctagcgtgaccctgccacctcagcctcacaccaaggagggcgttgatgcctacaacgaagtgatcgcccgggtgcgaatgtgggtgaacctgaacctgtggcagaagctgaagctaagcagagatgatgccaagcctctgctgagactgaagggattcccttcctttcctctggtcgagagacaggccaacgaagtggactggtgggacatggtgtgtaacgtgaagaagctgatcaacgagaaaaaggaggatggcaaggtgttttggcagaatctggctggctacaagagacaggaagccctgagaccatacctgagcagcgaggaagatcggaagaagggaaagaaattcgctcggtaccagctgggcgacctgctgctgcacctggaaaagaagcacggcgaggactggggaaaggtgtacgacgaggcctgggagcggattgacaagaaagtggaaggcctgagcaagcacatcaagctggaagaggaacggagaagcgaggacgcccagagcaaggccgccctgaccgactggctgcgggctaaggccagcttcgtgatcgagggcctgaaggaggccgacaaggacgagttctgcagatgcgagctgaagctgcagaagtggtacggggacctgcggggaaagcccttcgccatcgaagccgagaacagcatcctggacatcagcggcttcagcaagcagtacaactgtgccttcatctggcagaaggacggcgtgaagaagctgaacctgtacctgatcatcaactacttcaagggcggcaagctgcggttcaagaagatcaaacctgaagccttcgaagccaacagattctacaccgtgatcaacaaaaagagcggcgagatcgtgcccatggaggtgaacttcaacttcgacgaccccaacctgatcatcctgcctctggcctttggcaagagacagggcagagaattcatctggaacgacctgctgtccctggaaaccggcagcctgaagctggccaacggaagagtgatcgagaagacactgtacaacagaagaacccggcaggatgagcctgccctgttcgtggccctgaccttcgagcggcgggaggtcctggactcctccaatatcaaaccaatgaacctgatcggcgtggcaagaggcgaaaacatccccgccgtgatcgccctgaccgaccccgagggctgcccactgagccggtttaaggatagcctgggaaacccaacccacatcctgagaatcggcgagagctataaggagaagcagcggaccatccaggccaagaaggaggtggagcagcggagagccggcggctacagccggaagtacgccagcaaagccaagaatctggcagacgatatggtgagaaacaccgctagagatctgctgtactacgccgtgacccaggatgccatgctgatcttcgccaacctgagccggggcttcggccggcagggcaagcggaccttcatggccgagagacagtacacacggatggaggactggctgaccgccaagctggcctacgagggcctgagcaagacctacctgtccaagacactggcccagtacacctccaagacatgcagcaactgtgggtttaccatcaccagcgccgactacgacagggtgctggagaagctgaagaagacagcaacaggctggatgaccacaattaacggcaaggagctgaaggtggagggccagattacctactacaacagatacaagagacagaacgtagtcaaggacctgtccgtcgagctggatagactgagcgaagaatctgtgaacaacgacatctcctcctggacaaagggcagaagcggagaagctctgagcctcctgaagaaaagattctcccatagacccgtgcaggagaagttcgtgtgcctgaactgcggcttcgagacacacgcagccgagcaagccgccctgaacatcgccagatcctggctgttcctgcggagccaggagtacaagaaataccagacaaacaagacaaccggcaacaccgataagagagccttcgtcgagacctggcagtccttttaccggaagaagcttaaggaggtgtggaaacctgccgtgcggtctggcggatctggcggaggctccaccagccccaagaaaaagagaaaagtctaagctgccttctgcggggcttgccttctggccatgcccttcttctctcccttgcacctgtacctcttggtctttgaataaagcctgagtaggaaggctagcaaaaaaaaaaaaaaaaaaaaaaaaaaaaaaaaaaaaaaaaaaaaaaaaaaaaaaaaaaaaaaaaaaaaaaaaaaaaaaaa

SEQ ID NO: 12589 - RNA, 5785 nt, synthetic construct
  source 1..5785: mol_type = other RNA
aggaaataagagagaaaagaagagtaagaagaaatataagagccaccatggcccctaagaagaagcgtaaagtgagccggatggaacgcctcgtctacgaggtgcggcagaagtgcagaaacatcgaggacatctgcatctcctgcggatctctgaacgtgaccctggagcacccactgttcatcggcggcatgtgccagaactgtaaaaactgttttctggagtgtgcctatcaatacgacgatgacggctaccagagctactgcaccatctgttgcggcggaagagaggtgctgatgtgtggaaataacaactgctgccggtgcttctgcgtggaatgcgtggacctgctggtgggccccggcgccgcccaggccgctattaaggaagatccttggaactgctacatgtgcggccacaagggcacatacggcctgctgagacggagagaggactggcctagcagactgcagatgttcttcgccaataaccacgaccaggagttcgacccccctaaggtgtaccctcccgtccccgccgagaagagaaagcccatccgggtcctgagcctgttcgatggcatcgccaccggtctgctggtgctgaaggacctgggcatccaggtggataggtacattgcctccgaggtgtgcgaggactccatcaccgtgggaatggtgcgtcatcagggcaagatcatgtacgtgggcgacgtgcggagcgtgacacagaagcatatccaggagtggggccctttcgacctggtgatcggcggcagcccttgcaatgacctgagcatcgtgaacccagcccggaagggcctgtacgagggaaccggcagactgttcttcgagttttacagactgctgcacgacgcccggcctaaggaaggcgacgaccggcccttcttttggctgttcgagaatgtggtggccatgggagtcagcgacaagcgggatattagccggttcctggagagcaaccccgtgatgatcgatgccaaggaagtgagcgccgcccaccgggccagatacttctggggcaatctgcctggcatgaacagacccctggccagcaccgtgaacgacaagctggagctgcaggagtgcctggagcacggccggatcgccaagttcagcaaggtgagaaccatcaccacccgaagcaacagcatcaaacaaggcaaggaccagcactttcctgtgttcatgaacgagaaggaggacatcctgtggtgtaccgagatggagagagtgttcgggttcccagtccactacacagatgtcagcaacatgtctagactggccagacagagactgctgggaagaagctggtccgtccctgtgatcagacacctgttcgcccctctgaaggagtacttcgcctgcgtgagcagcggcaacagcaacgccaacagccggggccccagcttctctagcggcctggtgccactgtccctgagagggagccacatgggccccatggagatctacaaaaccgtgagcgcctggaagcggcagcctgtgcgcgtgctgagcctgtttcggaatatcgataaagtcctgaaaagcctgggattcctggagagcggctctggctccggcggtggcaccctgaagtacgtggaggatgtgacaaacgtggtcagacgggatgtggagaagtggggccccttcgatctggtgtacggcagcacccaacccctgggcagctcttgtgaccggtgccctggctggtacatgtttcagttccaccggatcctgcagtacgccctgccgagacaggagtcccagcggccattcttttggattttcatggacaacttgctgctgaccgaggatgaccaggaaactaccactcggttcctgcagaccgaagccgtgaccctgcaggacgtgagaggccgggactaccagaacgccatgcgggtgtggtccaacatccctggactgaaaagcaagcacgcacctctgacccctaaagaagaggagtacctgcaggcccaggtgcggagcagaagcaagctggacgcccctaaggtggatctgctggtgaagaattgcctcctgcccctgagagagtacttcaagtatttcagccagaatagtctgcccctgggaggcagcggcggcggcgtgggccaccccgtgaccttcagggacgtggccgtggacttcagcctggaggagtggaggtgcctgagccccgcccagagggccctgtacagggacgtgatgctggagaactacgagaacctggtgagcgtgggcctgcccgtgagcaagcccaccgtgatcagcctgctggagaagggcgaggccccctggatgccccaggccggcgcccccaggggcccctgccccgactacctgagctggggcggcccaagcagcggcgcccctcctcccagcggcggcagcccagccggctccccaacctctaccgaggagggcacctctgagtccgccacccccgagagcggccctggcacctccaccgagcccagcgagggcagcgcacccggcagccctgccggcagccccacctccacagaggagggaaccagcaccgagcccagcgaaggcagcgccccaggcaccagcaccgagcctagtgagcaggagattaaacggatcaacaagatcagaagaagacttgtgaaagacagcaacaccaagaaggccggcaagacaggccccatgaaaaccctgctggttagagtgatgacacccgatctgagagagcggctggaaaacctgagaaagaagcctgaaaatatcccccagcccatcagcaatacatctagagccaacctgaataagctgctgaccgattacaccgaaatgaagaaggcgatcctgcatgtgtactgggaagagttccagaaggaccctgtgggcctgatgagccgggtggcccagcctgccagcaagaagatcgatcagaacaagctgaaacctgagatggacgagaagggcaacctgaccaccgccggctttgcctgctctcagtgtggccagcccctgttcgtgtacaagctggagcaggtgtctgagaagggcaaggcttacaccaactacttcggacggtgcaatgtggccgagcacgaaaagctgatcctgctggcccagctgaagcccgagaaggatagcgacgaagccgtgacatatagcctgggaaagtttgggcagagggccctggatttctacagcattcatgtgaccaaggagtccacccaccccgtgaagcccctggcccagatcgccggaaacagatacgcctccggacctgtgggaaaggccctgagcgacgcatgtatgggcacaatcgcctccttcctgtctaagtaccaggacatcatcatcgaacaccagaaggtggtgaagggcaaccagaagagactggagagcctgcgggagctggccggcaaggaaaacctggaataccctagcgtgaccctgccacctcagcctcacaccaaggagggcgttgatgcctacaacgaagtgatcgcccgggtgcgaatgtgggtgaacctgaacctgtggcagaagctgaagctaagcagagatgatgccaagcctctgctgagactgaagggattcccttcctttcctctggtcgagagacaggccaacgaagtggactggtgggacatggtgtgtaacgtgaagaagctgatcaacgagaaaaaggaggatggcaaggtgttttggcagaatctggctggctacaagagacaggaagccctgagaccatacctgagcagcgaggaagatcggaagaagggaaagaaattcgctcggtaccagctgggcgacctgctgctgcacctggaaaagaagcacggcgaggactggggaaaggtgtacgacgaggcctgggagcggattgacaagaaagtggaaggcctgagcaagcacatcaagctggaagaggaacggagaagcgaggacgcccagagcaaggccgccctgaccgactggctgcgggctaaggccagcttcgtgatcgagggcctgaaggaggccgacaaggacgagttctgcagatgcgagctgaagctgcagaagtggtacggggacctgcggggaaagcccttcgccatcgaagccgagaacagcatcctggacatcagcggcttcagcaagcagtacaactgtgccttcatctggcagaaggacggcgtgaagaagctgaacctgtacctgatcatcaactacttcaagggcggcaagctgcggttcaagaagatcaaacctgaagccttcgaagccaacagattctacaccgtgatcaacaaaaagagcggcgagatcgtgcccatggaggtgaacttcaacttcgacgaccccaacctgatcatcctgcctctggcctttggcaagagacagggcagagaattcatctggaacgacctgctgtccctggaaaccggcagcctgaagctggccaacggaagagtgatcgagaagacactgtacaacagaagaacccggcaggatgagcctgccctgttcgtggccctgaccttcgagcggcgggaggtcctggactcctccaatatcaaaccaatgaacctgatcggcgtggcaagaggcgaaaacatccccgccgtgatcgccctgaccgaccccgagggctgcccactgagccggtttaaggatagcctgggaaacccaacccacatcctgagaatcggcgagagctataaggagaagcagcggaccatccaggccaagaaggaggtggagcagcggagagccggcggctacagccggaagtacgccagcaaagccaagaatctggcagacgatatggtgagaaacaccgctagagatctgctgtactacgccgtgacccaggatgccatgctgatcttcgccaacctgagccggggcttcggccggcagggcaagcggaccttcatggccgagagacagtacacacggatggaggactggctgaccgccaagctggcctacgagggcctgagcaagacctacctgtccaagacactggcccagtacacctccaagacatgcagcaactgtgggtttaccatcaccagcgccgactacgacagggtgctggagaagctgaagaagacagcaacaggctggatgaccacaattaacggcaaggagctgaaggtggagggccagattacctactacaacagatacaagagacagaacgtagtcaaggacctgtccgtcgagctggatagactgagcgaagaatctgtgaacaacgacatctcctcctggacaaagggcagaagcggagaagctctgagcctcctgaagaaaagattctcccatagacccgtgcaggagaagttcgtgtgcctgaactgcggcttcgagacacacgcagccgagcaagccgccctgaacatcgccagatcctggctgttcctgcggagccaggagtacaagaaataccagacaaacaagacaaccggcaacaccgataagagagccttcgtcgagacctggcagtccttttaccggaagaagcttaaggaggtgtggaaacctgccgtgcggtctggcggatctggcggaggctccaccagccccaagaaaaagagaaaagtctaagctgccttctgcggggcttgccttctggccatgcccttcttctctcccttgcacctgtacctcttggtctttgaataaagcctgagtaggaaggctagcaaaaaaaaaaaaaaaaaaaaaaaaaaaaaaaaaaaaaaaaaaaaaaaaaaaaaaaaaaaaaaaaaaaaaaaaaaaaaaaa

SEQ ID NO: 12590 - RNA, 5785 nt, synthetic construct
  source 1..5785: mol_type = other RNA
aggaaataagagagaaaagaagagtaagaagaaatataagagccaccatggcccctaagaagaagcgtaaagtgagccggatggaacgcctcgtctacgaggtgcggcagaagtgcagaaacatcgaggacatctgcatctcctgcggatctctgaacgtgaccctggagcacccactgttcatcggcggcatgtgccagaactgtaaaaactgttttctggagtgtgcctatcaatacgacgatgacggctaccagagctactgcaccatctgttgcggcggaagagaggtgctgatgtgtggaaataacaactgctgccggtgcttctgcgtggaatgcgtggacctgctggtgggccccggcgccgcccaggccgctattaaggaagatccttggaactgctacatgtgcggccacaagggcacatacggcctgctgagacggagagaggactggcctagcagactgcagatgttcttcgccaataaccacgaccaggagttcgacccccctaaggtgtaccctcccgtccccgccgagaagagaaagcccatccgggtcctgagcctgttcgatggcatcgccaccggtctgctggtgctgaaggacctgggcatccaggtggataggtacattgcctccgaggtgtgcgaggactccatcaccgtgggaatggtgcgtcatcagggcaagatcatgtacgtgggcgacgtgcggagcgtgacacagaagcatatccaggagtggggccctttcgacctggtgatcggcggcagcccttgcaatgacctgagcatcgtgaacccagcccggaagggcctgtacgagggaaccggcagactgttcttcgagttttacagactgctgcacgacgcccggcctaaggaaggcgacgaccggcccttcttttggctgttcgagaatgtggtggccatgggagtcagcgacaagcgggatattagccggttcctggagagcaaccccgtgatgatcgatgccaaggaagtgagcgccgcccaccgggccagatacttctggggcaatctgcctggcatgaacagacccctggccagcaccgtgaacgacaagctggagctgcaggagtgcctggagcacggccggatcgccaagttcagcaaggtgagaaccatcaccacccgaagcaacagcatcaaacaaggcaaggaccagcactttcctgtgttcatgaacgagaaggaggacatcctgtggtgtaccgagatggagagagtgttcgggttcccagtccactacacagatgtcagcaacatgtctagactggccagacagagactgctgggaagaagctggtccgtccctgtgatcagacacctgttcgcccctctgaaggagtacttcgcctgcgtgagcagcggcaacagcaacgccaacagccggggccccagcttctctagcggcctggtgccactgtccctgagagggagccacatgggccccatggagatctacaaaaccgtgagcgcctggaagcggcagcctgtgcgcgtgctgagcctgtttcggaatatcgataaagtcctgaaaagcctgggattcctggagagcggctctggctccggcggtggcaccctgaagtacgtggaggatgtgacaaacgtggtcagacgggatgtggagaagtggggccccttcgatctggtgtacggcagcacccaacccctgggcagctcttgtgaccggtgccctggctggtacatgtttcagttccaccggatcctgcagtacgccctgccgagacaggagtcccagcggccattcttttggattttcatggacaacttgctgctgaccgaggatgaccaggaaactaccactcggttcctgcagaccgaagccgtgaccctgcaggacgtgagaggccgggactaccagaacgccatgcgggtgtggtccaacatccctggactgaaaagcaagcacgcacctctgacccctaaagaagaggagtacctgcaggcccaggtgcggagcagaagcaagctggacgcccctaaggtggatctgctggtgaagaattgcctcctgcccctgagagagtacttcaagtatttcagccagaatagtctgcccctgggaggcagcggcggcggcttccaggacttcgtgagcttcaacgacgtgagcgtgaacttcaccgaggaggagtggagggagctggaccccgtgcagagggtgctgtacagggacgtgatgctggagaactacaggaacctggtgagcctgggcttccccttcagcaagcccgacatcatcagccagctggagcaggccgtgaacccctggatgcaggagggcgaggtgctgaggggcagctgcacccacctggagaccaggggcggcccaagcagcggcgcccctcctcccagcggcggcagcccagccggctccccaacctctaccgaggagggcacctctgagtccgccacccccgagagcggccctggcacctccaccgagcccagcgagggcagcgcacccggcagccctgccggcagccccacctccacagaggagggaaccagcaccgagcccagcgaaggcagcgccccaggcaccagcaccgagcctagtgagcaggagattaaacggatcaacaagatcagaagaagacttgtgaaagacagcaacaccaagaaggccggcaagacaggccccatgaaaaccctgctggttagagtgatgacacccgatctgagagagcggctggaaaacctgagaaagaagcctgaaaatatcccccagcccatcagcaatacatctagagccaacctgaataagctgctgaccgattacaccgaaatgaagaaggcgatcctgcatgtgtactgggaagagttccagaaggaccctgtgggcctgatgagccgggtggcccagcctgccagcaagaagatcgatcagaacaagctgaaacctgagatggacgagaagggcaacctgaccaccgccggctttgcctgctctcagtgtggccagcccctgttcgtgtacaagctggagcaggtgtctgagaagggcaaggcttacaccaactacttcggacggtgcaatgtggccgagcacgaaaagctgatcctgctggcccagctgaagcccgagaaggatagcgacgaagccgtgacatatagcctgggaaagtttgggcagagggccctggatttctacagcattcatgtgaccaaggagtccacccaccccgtgaagcccctggcccagatcgccggaaacagatacgcctccggacctgtgggaaaggccctgagcgacgcatgtatgggcacaatcgcctccttcctgtctaagtaccaggacatcatcatcgaacaccagaaggtggtgaagggcaaccagaagagactggagagcctgcgggagctggccggcaaggaaaacctggaataccctagcgtgaccctgccacctcagcctcacaccaaggagggcgttgatgcctacaacgaagtgatcgcccgggtgcgaatgtgggtgaacctgaacctgtggcagaagctgaagctaagcagagatgatgccaagcctctgctgagactgaagggattcccttcctttcctctggtcgagagacaggccaacgaagtggactggtgggacatggtgtgtaacgtgaagaagctgatcaacgagaaaaaggaggatggcaaggtgttttggcagaatctggctggctacaagagacaggaagccctgagaccatacctgagcagcgaggaagatcggaagaagggaaagaaattcgctcggtaccagctgggcgacctgctgctgcacctggaaaagaagcacggcgaggactggggaaaggtgtacgacgaggcctgggagcggattgacaagaaagtggaaggcctgagcaagcacatcaagctggaagaggaacggagaagcgaggacgcccagagcaaggccgccctgaccgactggctgcgggctaaggccagcttcgtgatcgagggcctgaaggaggccgacaaggacgagttctgcagatgcgagctgaagctgcagaagtggtacggggacctgcggggaaagcccttcgccatcgaagccgagaacagcatcctggacatcagcggcttcagcaagcagtacaactgtgccttcatctggcagaaggacggcgtgaagaagctgaacctgtacctgatcatcaactacttcaagggcggcaagctgcggttcaagaagatcaaacctgaagccttcgaagccaacagattctacaccgtgatcaacaaaaagagcggcgagatcgtgcccatggaggtgaacttcaacttcgacgaccccaacctgatcatcctgcctctggcctttggcaagagacagggcagagaattcatctggaacgacctgctgtccctggaaaccggcagcctgaagctggccaacggaagagtgatcgagaagacactgtacaacagaagaacccggcaggatgagcctgccctgttcgtggccctgaccttcgagcggcgggaggtcctggactcctccaatatcaaaccaatgaacctgatcggcgtggcaagaggcgaaaacatccccgccgtgatcgccctgaccgaccccgagggctgcccactgagccggtttaaggatagcctgggaaacccaacccacatcctgagaatcggcgagagctataaggagaagcagcggaccatccaggccaagaaggaggtggagcagcggagagccggcggctacagccggaagtacgccagcaaagccaagaatctggcagacgatatggtgagaaacaccgctagagatctgctgtactacgccgtgacccaggatgccatgctgatcttcgccaacctgagccggggcttcggccggcagggcaagcggaccttcatggccgagagacagtacacacggatggaggactggctgaccgccaagctggcctacgagggcctgagcaagacctacctgtccaagacactggcccagtacacctccaagacatgcagcaactgtgggtttaccatcaccagcgccgactacgacagggtgctggagaagctgaagaagacagcaacaggctggatgaccacaattaacggcaaggagctgaaggtggagggccagattacctactacaacagatacaagagacagaacgtagtcaaggacctgtccgtcgagctggatagactgagcgaagaatctgtgaacaacgacatctcctcctggacaaagggcagaagcggagaagctctgagcctcctgaagaaaagattctcccatagacccgtgcaggagaagttcgtgtgcctgaactgcggcttcgagacacacgcagccgagcaagccgccctgaacatcgccagatcctggctgttcctgcggagccaggagtacaagaaataccagacaaacaagacaaccggcaacaccgataagagagccttcgtcgagacctggcagtccttttaccggaagaagcttaaggaggtgtggaaacctgccgtgcggtctggcggatctggcggaggctccaccagccccaagaaaaagagaaaagtctaagctgccttctgcggggcttgccttctggccatgcccttcttctctcccttgcacctgtacctcttggtctttgaataaagcctgagtaggaaggctagcaaaaaaaaaaaaaaaaaaaaaaaaaaaaaaaaaaaaaaaaaaaaaaaaaaaaaaaaaaaaaaaaaaaaaaaaaaaaaaaa

SEQ ID NO: 12591 - RNA, 5785 nt, synthetic construct
  source 1..5785: mol_type = other RNA
aggaaataagagagaaaagaagagtaagaagaaatataagagccaccatggcccctaagaagaagcgtaaagtgagccggatggaacgcctcgtctacgaggtgcggcagaagtgcagaaacatcgaggacatctgcatctcctgcggatctctgaacgtgaccctggagcacccactgttcatcggcggcatgtgccagaactgtaaaaactgttttctggagtgtgcctatcaatacgacgatgacggctaccagagctactgcaccatctgttgcggcggaagagaggtgctgatgtgtggaaataacaactgctgccggtgcttctgcgtggaatgcgtggacctgctggtgggccccggcgccgcccaggccgctattaaggaagatccttggaactgctacatgtgcggccacaagggcacatacggcctgctgagacggagagaggactggcctagcagactgcagatgttcttcgccaataaccacgaccaggagttcgacccccctaaggtgtaccctcccgtccccgccgagaagagaaagcccatccgggtcctgagcctgttcgatggcatcgccaccggtctgctggtgctgaaggacctgggcatccaggtggataggtacattgcctccgaggtgtgcgaggactccatcaccgtgggaatggtgcgtcatcagggcaagatcatgtacgtgggcgacgtgcggagcgtgacacagaagcatatccaggagtggggccctttcgacctggtgatcggcggcagcccttgcaatgacctgagcatcgtgaacccagcccggaagggcctgtacgagggaaccggcagactgttcttcgagttttacagactgctgcacgacgcccggcctaaggaaggcgacgaccggcccttcttttggctgttcgagaatgtggtggccatgggagtcagcgacaagcgggatattagccggttcctggagagcaaccccgtgatgatcgatgccaaggaagtgagcgccgcccaccgggccagatacttctggggcaatctgcctggcatgaacagacccctggccagcaccgtgaacgacaagctggagctgcaggagtgcctggagcacggccggatcgccaagttcagcaaggtgagaaccatcaccacccgaagcaacagcatcaaacaaggcaaggaccagcactttcctgtgttcatgaacgagaaggaggacatcctgtggtgtaccgagatggagagagtgttcgggttcccagtccactacacagatgtcagcaacatgtctagactggccagacagagactgctgggaagaagctggtccgtccctgtgatcagacacctgttcgcccctctgaaggagtacttcgcctgcgtgagcagcggcaacagcaacgccaacagccggggccccagcttctctagcggcctggtgccactgtccctgagagggagccacatgggccccatggagatctacaaaaccgtgagcgcctggaagcggcagcctgtgcgcgtgctgagcctgtttcggaatatcgataaagtcctgaaaagcctgggattcctggagagcggctctggctccggcggtggcaccctgaagtacgtggaggatgtgacaaacgtggtcagacgggatgtggagaagtggggccccttcgatctggtgtacggcagcacccaacccctgggcagctcttgtgaccggtgccctggctggtacatgtttcagttccaccggatcctgcagtacgccctgccgagacaggagtcccagcggccattcttttggattttcatggacaacttgctgctgaccgaggatgaccaggaaactaccactcggttcctgcagaccgaagccgtgaccctgcaggacgtgagaggccgggactaccagaacgccatgcgggtgtggtccaacatccctggactgaaaagcaagcacgcacctctgacccctaaagaagaggagtacctgcaggcccaggtgcggagcagaagcaagctggacgcccctaaggtggatctgctggtgaagaattgcctcctgcccctgagagagtacttcaagtatttcagccagaatagtctgcccctgggaggcagcggcggcggcccccacaggctggtgctgttcagggacgtggccgtggacttcagccaggaggagtgggcctgcctggacagcgagcagaaggacctgtacagggacgtgatgctggagaactacagcaacctggtgagcctgggcttcagcagcagcaaggccgacatgctgagcctgctggagcagggcaaggagccctggaaggtggtgcaggacgtggccaggagccagagcagcgacctgggcagcaggggcggcccaagcagcggcgcccctcctcccagcggcggcagcccagccggctccccaacctctaccgaggagggcacctctgagtccgccacccccgagagcggccctggcacctccaccgagcccagcgagggcagcgcacccggcagccctgccggcagccccacctccacagaggagggaaccagcaccgagcccagcgaaggcagcgccccaggcaccagcaccgagcctagtgagcaggagattaaacggatcaacaagatcagaagaagacttgtgaaagacagcaacaccaagaaggccggcaagacaggccccatgaaaaccctgctggttagagtgatgacacccgatctgagagagcggctggaaaacctgagaaagaagcctgaaaatatcccccagcccatcagcaatacatctagagccaacctgaataagctgctgaccgattacaccgaaatgaagaaggcgatcctgcatgtgtactgggaagagttccagaaggaccctgtgggcctgatgagccgggtggcccagcctgccagcaagaagatcgatcagaacaagctgaaacctgagatggacgagaagggcaacctgaccaccgccggctttgcctgctctcagtgtggccagcccctgttcgtgtacaagctggagcaggtgtctgagaagggcaaggcttacaccaactacttcggacggtgcaatgtggccgagcacgaaaagctgatcctgctggcccagctgaagcccgagaaggatagcgacgaagccgtgacatatagcctgggaaagtttgggcagagggccctggatttctacagcattcatgtgaccaaggagtccacccaccccgtgaagcccctggcccagatcgccggaaacagatacgcctccggacctgtgggaaaggccctgagcgacgcatgtatgggcacaatcgcctccttcctgtctaagtaccaggacatcatcatcgaacaccagaaggtggtgaagggcaaccagaagagactggagagcctgcgggagctggccggcaaggaaaacctggaataccctagcgtgaccctgccacctcagcctcacaccaaggagggcgttgatgcctacaacgaagtgatcgcccgggtgcgaatgtgggtgaacctgaacctgtggcagaagctgaagctaagcagagatgatgccaagcctctgctgagactgaagggattcccttcctttcctctggtcgagagacaggccaacgaagtggactggtgggacatggtgtgtaacgtgaagaagctgatcaacgagaaaaaggaggatggcaaggtgttttggcagaatctggctggctacaagagacaggaagccctgagaccatacctgagcagcgaggaagatcggaagaagggaaagaaattcgctcggtaccagctgggcgacctgctgctgcacctggaaaagaagcacggcgaggactggggaaaggtgtacgacgaggcctgggagcggattgacaagaaagtggaaggcctgagcaagcacatcaagctggaagaggaacggagaagcgaggacgcccagagcaaggccgccctgaccgactggctgcgggctaaggccagcttcgtgatcgagggcctgaaggaggccgacaaggacgagttctgcagatgcgagctgaagctgcagaagtggtacggggacctgcggggaaagcccttcgccatcgaagccgagaacagcatcctggacatcagcggcttcagcaagcagtacaactgtgccttcatctggcagaaggacggcgtgaagaagctgaacctgtacctgatcatcaactacttcaagggcggcaagctgcggttcaagaagatcaaacctgaagccttcgaagccaacagattctacaccgtgatcaacaaaaagagcggcgagatcgtgcccatggaggtgaacttcaacttcgacgaccccaacctgatcatcctgcctctggcctttggcaagagacagggcagagaattcatctggaacgacctgctgtccctggaaaccggcagcctgaagctggccaacggaagagtgatcgagaagacactgtacaacagaagaacccggcaggatgagcctgccctgttcgtggccctgaccttcgagcggcgggaggtcctggactcctccaatatcaaaccaatgaacctgatcggcgtggcaagaggcgaaaacatccccgccgtgatcgccctgaccgaccccgagggctgcccactgagccggtttaaggatagcctgggaaacccaacccacatcctgagaatcggcgagagctataaggagaagcagcggaccatccaggccaagaaggaggtggagcagcggagagccggcggctacagccggaagtacgccagcaaagccaagaatctggcagacgatatggtgagaaacaccgctagagatctgctgtactacgccgtgacccaggatgccatgctgatcttcgccaacctgagccggggcttcggccggcagggcaagcggaccttcatggccgagagacagtacacacggatggaggactggctgaccgccaagctggcctacgagggcctgagcaagacctacctgtccaagacactggcccagtacacctccaagacatgcagcaactgtgggtttaccatcaccagcgccgactacgacagggtgctggagaagctgaagaagacagcaacaggctggatgaccacaattaacggcaaggagctgaaggtggagggccagattacctactacaacagatacaagagacagaacgtagtcaaggacctgtccgtcgagctggatagactgagcgaagaatctgtgaacaacgacatctcctcctggacaaagggcagaagcggagaagctctgagcctcctgaagaaaagattctcccatagacccgtgcaggagaagttcgtgtgcctgaactgcggcttcgagacacacgcagccgagcaagccgccctgaacatcgccagatcctggctgttcctgcggagccaggagtacaagaaataccagacaaacaagacaaccggcaacaccgataagagagccttcgtcgagacctggcagtccttttaccggaagaagcttaaggaggtgtggaaacctgccgtgcggtctggcggatctggcggaggctccaccagccccaagaaaaagagaaaagtctaagctgccttctgcggggcttgccttctggccatgcccttcttctctcccttgcacctgtacctcttggtctttgaataaagcctgagtaggaaggctagcaaaaaaaaaaaaaaaaaaaaaaaaaaaaaaaaaaaaaaaaaaaaaaaaaaaaaaaaaaaaaaaaaaaaaaaaaaaaaaaa

SEQ ID NO: 12592 - RNA, 5785 nt, synthetic construct
  source 1..5785: mol_type = other RNA
aggaaataagagagaaaagaagagtaagaagaaatataagagccaccatggcccctaagaagaagcgtaaagtgagccggatggaacgcctcgtctacgaggtgcggcagaagtgcagaaacatcgaggacatctgcatctcctgcggatctctgaacgtgaccctggagcacccactgttcatcggcggcatgtgccagaactgtaaaaactgttttctggagtgtgcctatcaatacgacgatgacggctaccagagctactgcaccatctgttgcggcggaagagaggtgctgatgtgtggaaataacaactgctgccggtgcttctgcgtggaatgcgtggacctgctggtgggccccggcgccgcccaggccgctattaaggaagatccttggaactgctacatgtgcggccacaagggcacatacggcctgctgagacggagagaggactggcctagcagactgcagatgttcttcgccaataaccacgaccaggagttcgacccccctaaggtgtaccctcccgtccccgccgagaagagaaagcccatccgggtcctgagcctgttcgatggcatcgccaccggtctgctggtgctgaaggacctgggcatccaggtggataggtacattgcctccgaggtgtgcgaggactccatcaccgtgggaatggtgcgtcatcagggcaagatcatgtacgtgggcgacgtgcggagcgtgacacagaagcatatccaggagtggggccctttcgacctggtgatcggcggcagcccttgcaatgacctgagcatcgtgaacccagcccggaagggcctgtacgagggaaccggcagactgttcttcgagttttacagactgctgcacgacgcccggcctaaggaaggcgacgaccggcccttcttttggctgttcgagaatgtggtggccatgggagtcagcgacaagcgggatattagccggttcctggagagcaaccccgtgatgatcgatgccaaggaagtgagcgccgcccaccgggccagatacttctggggcaatctgcctggcatgaacagacccctggccagcaccgtgaacgacaagctggagctgcaggagtgcctggagcacggccggatcgccaagttcagcaaggtgagaaccatcaccacccgaagcaacagcatcaaacaaggcaaggaccagcactttcctgtgttcatgaacgagaaggaggacatcctgtggtgtaccgagatggagagagtgttcgggttcccagtccactacacagatgtcagcaacatgtctagactggccagacagagactgctgggaagaagctggtccgtccctgtgatcagacacctgttcgcccctctgaaggagtacttcgcctgcgtgagcagcggcaacagcaacgccaacagccggggccccagcttctctagcggcctggtgccactgtccctgagagggagccacatgggccccatggagatctacaaaaccgtgagcgcctggaagcggcagcctgtgcgcgtgctgagcctgtttcggaatatcgataaagtcctgaaaagcctgggattcctggagagcggctctggctccggcggtggcaccctgaagtacgtggaggatgtgacaaacgtggtcagacgggatgtggagaagtggggccccttcgatctggtgtacggcagcacccaacccctgggcagctcttgtgaccggtgccctggctggtacatgtttcagttccaccggatcctgcagtacgccctgccgagacaggagtcccagcggccattcttttggattttcatggacaacttgctgctgaccgaggatgaccaggaaactaccactcggttcctgcagaccgaagccgtgaccctgcaggacgtgagaggccgggactaccagaacgccatgcgggtgtggtccaacatccctggactgaaaagcaagcacgcacctctgacccctaaagaagaggagtacctgcaggcccaggtgcggagcagaagcaagctggacgcccctaaggtggatctgctggtgaagaattgcctcctgcccctgagagagtacttcaagtatttcagccagaatagtctgcccctgggaggcagcggcggcggctaccaggagatggtgaccttcgaggacgtggccgtgcacttcaccaagaccgagtggaccggcctgagccccgcccagagggccctgtacaggagcgtgatgctggagaacttcggcaacctgaccgccctgggctaccccgtgcccaagcccgccctgatcagcctgctggagggcggcgacatggactggggcctggaggcccaggacgacccccccgccgagaggaccaagaacgtgtgcggcggcccaagcagcggcgcccctcctcccagcggcggcagcccagccggctccccaacctctaccgaggagggcacctctgagtccgccacccccgagagcggccctggcacctccaccgagcccagcgagggcagcgcacccggcagccctgccggcagccccacctccacagaggagggaaccagcaccgagcccagcgaaggcagcgccccaggcaccagcaccgagcctagtgagcaggagattaaacggatcaacaagatcagaagaagacttgtgaaagacagcaacaccaagaaggccggcaagacaggccccatgaaaaccctgctggttagagtgatgacacccgatctgagagagcggctggaaaacctgagaaagaagcctgaaaatatcccccagcccatcagcaatacatctagagccaacctgaataagctgctgaccgattacaccgaaatgaagaaggcgatcctgcatgtgtactgggaagagttccagaaggaccctgtgggcctgatgagccgggtggcccagcctgccagcaagaagatcgatcagaacaagctgaaacctgagatggacgagaagggcaacctgaccaccgccggctttgcctgctctcagtgtggccagcccctgttcgtgtacaagctggagcaggtgtctgagaagggcaaggcttacaccaactacttcggacggtgcaatgtggccgagcacgaaaagctgatcctgctggcccagctgaagcccgagaaggatagcgacgaagccgtgacatatagcctgggaaagtttgggcagagggccctggatttctacagcattcatgtgaccaaggagtccacccaccccgtgaagcccctggcccagatcgccggaaacagatacgcctccggacctgtgggaaaggccctgagcgacgcatgtatgggcacaatcgcctccttcctgtctaagtaccaggacatcatcatcgaacaccagaaggtggtgaagggcaaccagaagagactggagagcctgcgggagctggccggcaaggaaaacctggaataccctagcgtgaccctgccacctcagcctcacaccaaggagggcgttgatgcctacaacgaagtgatcgcccgggtgcgaatgtgggtgaacctgaacctgtggcagaagctgaagctaagcagagatgatgccaagcctctgctgagactgaagggattcccttcctttcctctggtcgagagacaggccaacgaagtggactggtgggacatggtgtgtaacgtgaagaagctgatcaacgagaaaaaggaggatggcaaggtgttttggcagaatctggctggctacaagagacaggaagccctgagaccatacctgagcagcgaggaagatcggaagaagggaaagaaattcgctcggtaccagctgggcgacctgctgctgcacctggaaaagaagcacggcgaggactggggaaaggtgtacgacgaggcctgggagcggattgacaagaaagtggaaggcctgagcaagcacatcaagctggaagaggaacggagaagcgaggacgcccagagcaaggccgccctgaccgactggctgcgggctaaggccagcttcgtgatcgagggcctgaaggaggccgacaaggacgagttctgcagatgcgagctgaagctgcagaagtggtacggggacctgcggggaaagcccttcgccatcgaagccgagaacagcatcctggacatcagcggcttcagcaagcagtacaactgtgccttcatctggcagaaggacggcgtgaagaagctgaacctgtacctgatcatcaactacttcaagggcggcaagctgcggttcaagaagatcaaacctgaagccttcgaagccaacagattctacaccgtgatcaacaaaaagagcggcgagatcgtgcccatggaggtgaacttcaacttcgacgaccccaacctgatcatcctgcctctggcctttggcaagagacagggcagagaattcatctggaacgacctgctgtccctggaaaccggcagcctgaagctggccaacggaagagtgatcgagaagacactgtacaacagaagaacccggcaggatgagcctgccctgttcgtggccctgaccttcgagcggcgggaggtcctggactcctccaatatcaaaccaatgaacctgatcggcgtggcaagaggcgaaaacatccccgccgtgatcgccctgaccgaccccgagggctgcccactgagccggtttaaggatagcctgggaaacccaacccacatcctgagaatcggcgagagctataaggagaagcagcggaccatccaggccaagaaggaggtggagcagcggagagccggcggctacagccggaagtacgccagcaaagccaagaatctggcagacgatatggtgagaaacaccgctagagatctgctgtactacgccgtgacccaggatgccatgctgatcttcgccaacctgagccggggcttcggccggcagggcaagcggaccttcatggccgagagacagtacacacggatggaggactggctgaccgccaagctggcctacgagggcctgagcaagacctacctgtccaagacactggcccagtacacctccaagacatgcagcaactgtgggtttaccatcaccagcgccgactacgacagggtgctggagaagctgaagaagacagcaacaggctggatgaccacaattaacggcaaggagctgaaggtggagggccagattacctactacaacagatacaagagacagaacgtagtcaaggacctgtccgtcgagctggatagactgagcgaagaatctgtgaacaacgacatctcctcctggacaaagggcagaagcggagaagctctgagcctcctgaagaaaagattctcccatagacccgtgcaggagaagttcgtgtgcctgaactgcggcttcgagacacacgcagccgagcaagccgccctgaacatcgccagatcctggctgttcctgcggagccaggagtacaagaaataccagacaaacaagacaaccggcaacaccgataagagagccttcgtcgagacctggcagtccttttaccggaagaagcttaaggaggtgtggaaacctgccgtgcggtctggcggatctggcggaggctccaccagccccaagaaaaagagaaaagtctaagctgccttctgcggggcttgccttctggccatgcccttcttctctcccttgcacctgtacctcttggtctttgaataaagcctgagtaggaaggctagcaaaaaaaaaaaaaaaaaaaaaaaaaaaaaaaaaaaaaaaaaaaaaaaaaaaaaaaaaaaaaaaaaaaaaaaaaaaaaaaa

SEQ ID NO: 12593 - RNA, 5785 nt, synthetic construct
  source 1..5785: mol_type = other RNA
aggaaataagagagaaaagaagagtaagaagaaatataagagccaccatggcccctaagaagaagcgtaaagtgagccggatggaacgcctcgtctacgaggtgcggcagaagtgcagaaacatcgaggacatctgcatctcctgcggatctctgaacgtgaccctggagcacccactgttcatcggcggcatgtgccagaactgtaaaaactgttttctggagtgtgcctatcaatacgacgatgacggctaccagagctactgcaccatctgttgcggcggaagagaggtgctgatgtgtggaaataacaactgctgccggtgcttctgcgtggaatgcgtggacctgctggtgggccccggcgccgcccaggccgctattaaggaagatccttggaactgctacatgtgcggccacaagggcacatacggcctgctgagacggagagaggactggcctagcagactgcagatgttcttcgccaataaccacgaccaggagttcgacccccctaaggtgtaccctcccgtccccgccgagaagagaaagcccatccgggtcctgagcctgttcgatggcatcgccaccggtctgctggtgctgaaggacctgggcatccaggtggataggtacattgcctccgaggtgtgcgaggactccatcaccgtgggaatggtgcgtcatcagggcaagatcatgtacgtgggcgacgtgcggagcgtgacacagaagcatatccaggagtggggccctttcgacctggtgatcggcggcagcccttgcaatgacctgagcatcgtgaacccagcccggaagggcctgtacgagggaaccggcagactgttcttcgagttttacagactgctgcacgacgcccggcctaaggaaggcgacgaccggcccttcttttggctgttcgagaatgtggtggccatgggagtcagcgacaagcgggatattagccggttcctggagagcaaccccgtgatgatcgatgccaaggaagtgagcgccgcccaccgggccagatacttctggggcaatctgcctggcatgaacagacccctggccagcaccgtgaacgacaagctggagctgcaggagtgcctggagcacggccggatcgccaagttcagcaaggtgagaaccatcaccacccgaagcaacagcatcaaacaaggcaaggaccagcactttcctgtgttcatgaacgagaaggaggacatcctgtggtgtaccgagatggagagagtgttcgggttcccagtccactacacagatgtcagcaacatgtctagactggccagacagagactgctgggaagaagctggtccgtccctgtgatcagacacctgttcgcccctctgaaggagtacttcgcctgcgtgagcagcggcaacagcaacgccaacagccggggccccagcttctctagcggcctggtgccactgtccctgagagggagccacatgggccccatggagatctacaaaaccgtgagcgcctggaagcggcagcctgtgcgcgtgctgagcctgtttcggaatatcgataaagtcctgaaaagcctgggattcctggagagcggctctggctccggcggtggcaccctgaagtacgtggaggatgtgacaaacgtggtcagacgggatgtggagaagtggggccccttcgatctggtgtacggcagcacccaacccctgggcagctcttgtgaccggtgccctggctggtacatgtttcagttccaccggatcctgcagtacgccctgccgagacaggagtcccagcggccattcttttggattttcatggacaacttgctgctgaccgaggatgaccaggaaactaccactcggttcctgcagaccgaagccgtgaccctgcaggacgtgagaggccgggactaccagaacgccatgcgggtgtggtccaacatccctggactgaaaagcaagcacgcacctctgacccctaaagaagaggagtacctgcaggcccaggtgcggagcagaagcaagctggacgcccctaaggtggatctgctggtgaagaattgcctcctgcccctgagagagtacttcaagtatttcagccagaatagtctgcccctgggaggcagcggcggcggcgccgaggtgcccgtggccttcgaggacgtggccgtgtacttcacccaggaggagtggggcagcctggacaagaggcagaaggagctgtacagggacgtgatgtggatgaactacgagctgctggccagcctgggccccgccgccgccaagcccgacctgatcagcaagctggagaggagggccgccccctggatcaaggacaccaggggccccaagtggggcaagggcaagaggaagaccgtgggcggcccaagcagcggcgcccctcctcccagcggcggcagcccagccggctccccaacctctaccgaggagggcacctctgagtccgccacccccgagagcggccctggcacctccaccgagcccagcgagggcagcgcacccggcagccctgccggcagccccacctccacagaggagggaaccagcaccgagcccagcgaaggcagcgccccaggcaccagcaccgagcctagtgagcaggagattaaacggatcaacaagatcagaagaagacttgtgaaagacagcaacaccaagaaggccggcaagacaggccccatgaaaaccctgctggttagagtgatgacacccgatctgagagagcggctggaaaacctgagaaagaagcctgaaaatatcccccagcccatcagcaatacatctagagccaacctgaataagctgctgaccgattacaccgaaatgaagaaggcgatcctgcatgtgtactgggaagagttccagaaggaccctgtgggcctgatgagccgggtggcccagcctgccagcaagaagatcgatcagaacaagctgaaacctgagatggacgagaagggcaacctgaccaccgccggctttgcctgctctcagtgtggccagcccctgttcgtgtacaagctggagcaggtgtctgagaagggcaaggcttacaccaactacttcggacggtgcaatgtggccgagcacgaaaagctgatcctgctggcccagctgaagcccgagaaggatagcgacgaagccgtgacatatagcctgggaaagtttgggcagagggccctggatttctacagcattcatgtgaccaaggagtccacccaccccgtgaagcccctggcccagatcgccggaaacagatacgcctccggacctgtgggaaaggccctgagcgacgcatgtatgggcacaatcgcctccttcctgtctaagtaccaggacatcatcatcgaacaccagaaggtggtgaagggcaaccagaagagactggagagcctgcgggagctggccggcaaggaaaacctggaataccctagcgtgaccctgccacctcagcctcacaccaaggagggcgttgatgcctacaacgaagtgatcgcccgggtgcgaatgtgggtgaacctgaacctgtggcagaagctgaagctaagcagagatgatgccaagcctctgctgagactgaagggattcccttcctttcctctggtcgagagacaggccaacgaagtggactggtgggacatggtgtgtaacgtgaagaagctgatcaacgagaaaaaggaggatggcaaggtgttttggcagaatctggctggctacaagagacaggaagccctgagaccatacctgagcagcgaggaagatcggaagaagggaaagaaattcgctcggtaccagctgggcgacctgctgctgcacctggaaaagaagcacggcgaggactggggaaaggtgtacgacgaggcctgggagcggattgacaagaaagtggaaggcctgagcaagcacatcaagctggaagaggaacggagaagcgaggacgcccagagcaaggccgccctgaccgactggctgcgggctaaggccagcttcgtgatcgagggcctgaaggaggccgacaaggacgagttctgcagatgcgagctgaagctgcagaagtggtacggggacctgcggggaaagcccttcgccatcgaagccgagaacagcatcctggacatcagcggcttcagcaagcagtacaactgtgccttcatctggcagaaggacggcgtgaagaagctgaacctgtacctgatcatcaactacttcaagggcggcaagctgcggttcaagaagatcaaacctgaagccttcgaagccaacagattctacaccgtgatcaacaaaaagagcggcgagatcgtgcccatggaggtgaacttcaacttcgacgaccccaacctgatcatcctgcctctggcctttggcaagagacagggcagagaattcatctggaacgacctgctgtccctggaaaccggcagcctgaagctggccaacggaagagtgatcgagaagacactgtacaacagaagaacccggcaggatgagcctgccctgttcgtggccctgaccttcgagcggcgggaggtcctggactcctccaatatcaaaccaatgaacctgatcggcgtggcaagaggcgaaaacatccccgccgtgatcgccctgaccgaccccgagggctgcccactgagccggtttaaggatagcctgggaaacccaacccacatcctgagaatcggcgagagctataaggagaagcagcggaccatccaggccaagaaggaggtggagcagcggagagccggcggctacagccggaagtacgccagcaaagccaagaatctggcagacgatatggtgagaaacaccgctagagatctgctgtactacgccgtgacccaggatgccatgctgatcttcgccaacctgagccggggcttcggccggcagggcaagcggaccttcatggccgagagacagtacacacggatggaggactggctgaccgccaagctggcctacgagggcctgagcaagacctacctgtccaagacactggcccagtacacctccaagacatgcagcaactgtgggtttaccatcaccagcgccgactacgacagggtgctggagaagctgaagaagacagcaacaggctggatgaccacaattaacggcaaggagctgaaggtggagggccagattacctactacaacagatacaagagacagaacgtagtcaaggacctgtccgtcgagctggatagactgagcgaagaatctgtgaacaacgacatctcctcctggacaaagggcagaagcggagaagctctgagcctcctgaagaaaagattctcccatagacccgtgcaggagaagttcgtgtgcctgaactgcggcttcgagacacacgcagccgagcaagccgccctgaacatcgccagatcctggctgttcctgcggagccaggagtacaagaaataccagacaaacaagacaaccggcaacaccgataagagagccttcgtcgagacctggcagtccttttaccggaagaagcttaaggaggtgtggaaacctgccgtgcggtctggcggatctggcggaggctccaccagccccaagaaaaagagaaaagtctaagctgccttctgcggggcttgccttctggccatgcccttcttctctcccttgcacctgtacctcttggtctttgaataaagcctgagtaggaaggctagcaaaaaaaaaaaaaaaaaaaaaaaaaaaaaaaaaaaaaaaaaaaaaaaaaaaaaaaaaaaaaaaaaaaaaaaaaaaaaaaa

SEQ ID NO: 12594 - RNA, 5785 nt, synthetic construct
  source 1..5785: mol_type = other RNA
aggaaataagagagaaaagaagagtaagaagaaatataagagccaccatggcccctaagaagaagcgtaaagtgagccggatggaacgcctcgtctacgaggtgcggcagaagtgcagaaacatcgaggacatctgcatctcctgcggatctctgaacgtgaccctggagcacccactgttcatcggcggcatgtgccagaactgtaaaaactgttttctggagtgtgcctatcaatacgacgatgacggctaccagagctactgcaccatctgttgcggcggaagagaggtgctgatgtgtggaaataacaactgctgccggtgcttctgcgtggaatgcgtggacctgctggtgggccccggcgccgcccaggccgctattaaggaagatccttggaactgctacatgtgcggccacaagggcacatacggcctgctgagacggagagaggactggcctagcagactgcagatgttcttcgccaataaccacgaccaggagttcgacccccctaaggtgtaccctcccgtccccgccgagaagagaaagcccatccgggtcctgagcctgttcgatggcatcgccaccggtctgctggtgctgaaggacctgggcatccaggtggataggtacattgcctccgaggtgtgcgaggactccatcaccgtgggaatggtgcgtcatcagggcaagatcatgtacgtgggcgacgtgcggagcgtgacacagaagcatatccaggagtggggccctttcgacctggtgatcggcggcagcccttgcaatgacctgagcatcgtgaacccagcccggaagggcctgtacgagggaaccggcagactgttcttcgagttttacagactgctgcacgacgcccggcctaaggaaggcgacgaccggcccttcttttggctgttcgagaatgtggtggccatgggagtcagcgacaagcgggatattagccggttcctggagagcaaccccgtgatgatcgatgccaaggaagtgagcgccgcccaccgggccagatacttctggggcaatctgcctggcatgaacagacccctggccagcaccgtgaacgacaagctggagctgcaggagtgcctggagcacggccggatcgccaagttcagcaaggtgagaaccatcaccacccgaagcaacagcatcaaacaaggcaaggaccagcactttcctgtgttcatgaacgagaaggaggacatcctgtggtgtaccgagatggagagagtgttcgggttcccagtccactacacagatgtcagcaacatgtctagactggccagacagagactgctgggaagaagctggtccgtccctgtgatcagacacctgttcgcccctctgaaggagtacttcgcctgcgtgagcagcggcaacagcaacgccaacagccggggccccagcttctctagcggcctggtgccactgtccctgagagggagccacatgggccccatggagatctacaaaaccgtgagcgcctggaagcggcagcctgtgcgcgtgctgagcctgtttcggaatatcgataaagtcctgaaaagcctgggattcctggagagcggctctggctccggcggtggcaccctgaagtacgtggaggatgtgacaaacgtggtcagacgggatgtggagaagtggggccccttcgatctggtgtacggcagcacccaacccctgggcagctcttgtgaccggtgccctggctggtacatgtttcagttccaccggatcctgcagtacgccctgccgagacaggagtcccagcggccattcttttggattttcatggacaacttgctgctgaccgaggatgaccaggaaactaccactcggttcctgcagaccgaagccgtgaccctgcaggacgtgagaggccgggactaccagaacgccatgcgggtgtggtccaacatccctggactgaaaagcaagcacgcacctctgacccctaaagaagaggagtacctgcaggcccaggtgcggagcagaagcaagctggacgcccctaaggtggatctgctggtgaagaattgcctcctgcccctgagagagtacttcaagtatttcagccagaatagtctgcccctgggaggcagcggcggcggccaccaggagatggtgaccttcgaggacgtggccgtgcacttcaccaagaccgagtggaccggcctgagccccgcccagagggccctgtacaggagcgtgatgctggagaacttcggcaacctgaccgccctgggctaccccgtgcccaagcccgccctgatcagcctgctggagggcggcgacatggcctggggcctggaggcccaggacgacgcccccgccgagaggaccaagaacatctgcggcggcccaagcagcggcgcccctcctcccagcggcggcagcccagccggctccccaacctctaccgaggagggcacctctgagtccgccacccccgagagcggccctggcacctccaccgagcccagcgagggcagcgcacccggcagccctgccggcagccccacctccacagaggagggaaccagcaccgagcccagcgaaggcagcgccccaggcaccagcaccgagcctagtgagcaggagattaaacggatcaacaagatcagaagaagacttgtgaaagacagcaacaccaagaaggccggcaagacaggccccatgaaaaccctgctggttagagtgatgacacccgatctgagagagcggctggaaaacctgagaaagaagcctgaaaatatcccccagcccatcagcaatacatctagagccaacctgaataagctgctgaccgattacaccgaaatgaagaaggcgatcctgcatgtgtactgggaagagttccagaaggaccctgtgggcctgatgagccgggtggcccagcctgccagcaagaagatcgatcagaacaagctgaaacctgagatggacgagaagggcaacctgaccaccgccggctttgcctgctctcagtgtggccagcccctgttcgtgtacaagctggagcaggtgtctgagaagggcaaggcttacaccaactacttcggacggtgcaatgtggccgagcacgaaaagctgatcctgctggcccagctgaagcccgagaaggatagcgacgaagccgtgacatatagcctgggaaagtttgggcagagggccctggatttctacagcattcatgtgaccaaggagtccacccaccccgtgaagcccctggcccagatcgccggaaacagatacgcctccggacctgtgggaaaggccctgagcgacgcatgtatgggcacaatcgcctccttcctgtctaagtaccaggacatcatcatcgaacaccagaaggtggtgaagggcaaccagaagagactggagagcctgcgggagctggccggcaaggaaaacctggaataccctagcgtgaccctgccacctcagcctcacaccaaggagggcgttgatgcctacaacgaagtgatcgcccgggtgcgaatgtgggtgaacctgaacctgtggcagaagctgaagctaagcagagatgatgccaagcctctgctgagactgaagggattcccttcctttcctctggtcgagagacaggccaacgaagtggactggtgggacatggtgtgtaacgtgaagaagctgatcaacgagaaaaaggaggatggcaaggtgttttggcagaatctggctggctacaagagacaggaagccctgagaccatacctgagcagcgaggaagatcggaagaagggaaagaaattcgctcggtaccagctgggcgacctgctgctgcacctggaaaagaagcacggcgaggactggggaaaggtgtacgacgaggcctgggagcggattgacaagaaagtggaaggcctgagcaagcacatcaagctggaagaggaacggagaagcgaggacgcccagagcaaggccgccctgaccgactggctgcgggctaaggccagcttcgtgatcgagggcctgaaggaggccgacaaggacgagttctgcagatgcgagctgaagctgcagaagtggtacggggacctgcggggaaagcccttcgccatcgaagccgagaacagcatcctggacatcagcggcttcagcaagcagtacaactgtgccttcatctggcagaaggacggcgtgaagaagctgaacctgtacctgatcatcaactacttcaagggcggcaagctgcggttcaagaagatcaaacctgaagccttcgaagccaacagattctacaccgtgatcaacaaaaagagcggcgagatcgtgcccatggaggtgaacttcaacttcgacgaccccaacctgatcatcctgcctctggcctttggcaagagacagggcagagaattcatctggaacgacctgctgtccctggaaaccggcagcctgaagctggccaacggaagagtgatcgagaagacactgtacaacagaagaacccggcaggatgagcctgccctgttcgtggccctgaccttcgagcggcgggaggtcctggactcctccaatatcaaaccaatgaacctgatcggcgtggcaagaggcgaaaacatccccgccgtgatcgccctgaccgaccccgagggctgcccactgagccggtttaaggatagcctgggaaacccaacccacatcctgagaatcggcgagagctataaggagaagcagcggaccatccaggccaagaaggaggtggagcagcggagagccggcggctacagccggaagtacgccagcaaagccaagaatctggcagacgatatggtgagaaacaccgctagagatctgctgtactacgccgtgacccaggatgccatgctgatcttcgccaacctgagccggggcttcggccggcagggcaagcggaccttcatggccgagagacagtacacacggatggaggactggctgaccgccaagctggcctacgagggcctgagcaagacctacctgtccaagacactggcccagtacacctccaagacatgcagcaactgtgggtttaccatcaccagcgccgactacgacagggtgctggagaagctgaagaagacagcaacaggctggatgaccacaattaacggcaaggagctgaaggtggagggccagattacctactacaacagatacaagagacagaacgtagtcaaggacctgtccgtcgagctggatagactgagcgaagaatctgtgaacaacgacatctcctcctggacaaagggcagaagcggagaagctctgagcctcctgaagaaaagattctcccatagacccgtgcaggagaagttcgtgtgcctgaactgcggcttcgagacacacgcagccgagcaagccgccctgaacatcgccagatcctggctgttcctgcggagccaggagtacaagaaataccagacaaacaagacaaccggcaacaccgataagagagccttcgtcgagacctggcagtccttttaccggaagaagcttaaggaggtgtggaaacctgccgtgcggtctggcggatctggcggaggctccaccagccccaagaaaaagagaaaagtctaagctgccttctgcggggcttgccttctggccatgcccttcttctctcccttgcacctgtacctcttggtctttgaataaagcctgagtaggaaggctagcaaaaaaaaaaaaaaaaaaaaaaaaaaaaaaaaaaaaaaaaaaaaaaaaaaaaaaaaaaaaaaaaaaaaaaaaaaaaaaaa

SEQ ID NO: 12595 - RNA, 5785 nt, synthetic construct
  source 1..5785: mol_type = other RNA
aggaaataagagagaaaagaagagtaagaagaaatataagagccaccatggcccctaagaagaagcgtaaagtgagccggatggaacgcctcgtctacgaggtgcggcagaagtgcagaaacatcgaggacatctgcatctcctgcggatctctgaacgtgaccctggagcacccactgttcatcggcggcatgtgccagaactgtaaaaactgttttctggagtgtgcctatcaatacgacgatgacggctaccagagctactgcaccatctgttgcggcggaagagaggtgctgatgtgtggaaataacaactgctgccggtgcttctgcgtggaatgcgtggacctgctggtgggccccggcgccgcccaggccgctattaaggaagatccttggaactgctacatgtgcggccacaagggcacatacggcctgctgagacggagagaggactggcctagcagactgcagatgttcttcgccaataaccacgaccaggagttcgacccccctaaggtgtaccctcccgtccccgccgagaagagaaagcccatccgggtcctgagcctgttcgatggcatcgccaccggtctgctggtgctgaaggacctgggcatccaggtggataggtacattgcctccgaggtgtgcgaggactccatcaccgtgggaatggtgcgtcatcagggcaagatcatgtacgtgggcgacgtgcggagcgtgacacagaagcatatccaggagtggggccctttcgacctggtgatcggcggcagcccttgcaatgacctgagcatcgtgaacccagcccggaagggcctgtacgagggaaccggcagactgttcttcgagttttacagactgctgcacgacgcccggcctaaggaaggcgacgaccggcccttcttttggctgttcgagaatgtggtggccatgggagtcagcgacaagcgggatattagccggttcctggagagcaaccccgtgatgatcgatgccaaggaagtgagcgccgcccaccgggccagatacttctggggcaatctgcctggcatgaacagacccctggccagcaccgtgaacgacaagctggagctgcaggagtgcctggagcacggccggatcgccaagttcagcaaggtgagaaccatcaccacccgaagcaacagcatcaaacaaggcaaggaccagcactttcctgtgttcatgaacgagaaggaggacatcctgtggtgtaccgagatggagagagtgttcgggttcccagtccactacacagatgtcagcaacatgtctagactggccagacagagactgctgggaagaagctggtccgtccctgtgatcagacacctgttcgcccctctgaaggagtacttcgcctgcgtgagcagcggcaacagcaacgccaacagccggggccccagcttctctagcggcctggtgccactgtccctgagagggagccacatgggccccatggagatctacaaaaccgtgagcgcctggaagcggcagcctgtgcgcgtgctgagcctgtttcggaatatcgataaagtcctgaaaagcctgggattcctggagagcggctctggctccggcggtggcaccctgaagtacgtggaggatgtgacaaacgtggtcagacgggatgtggagaagtggggccccttcgatctggtgtacggcagcacccaacccctgggcagctcttgtgaccggtgccctggctggtacatgtttcagttccaccggatcctgcagtacgccctgccgagacaggagtcccagcggccattcttttggattttcatggacaacttgctgctgaccgaggatgaccaggaaactaccactcggttcctgcagaccgaagccgtgaccctgcaggacgtgagaggccgggactaccagaacgccatgcgggtgtggtccaacatccctggactgaaaagcaagcacgcacctctgacccctaaagaagaggagtacctgcaggcccaggtgcggagcagaagcaagctggacgcccctaaggtggatctgctggtgaagaattgcctcctgcccctgagagagtacttcaagtatttcagccagaatagtctgcccctgggaggcagcggcggcggcaagctgaagcccgtgaagttccaggacgtggccgtgtacttcagcgaggaggagtggcagctgctggagaaccagcagaaggagctgtacaggagcgtgatgaaggagaactacgagaacctgaccagcctgggcttcaccaccaccaagcccaacatcctgaagaggatggagcagggcaggcccctgtgggtgagcaccaggaggaaggtgatcaagcacagcttcagggagggcgagcccggcggcccaagcagcggcgcccctcctcccagcggcggcagcccagccggctccccaacctctaccgaggagggcacctctgagtccgccacccccgagagcggccctggcacctccaccgagcccagcgagggcagcgcacccggcagccctgccggcagccccacctccacagaggagggaaccagcaccgagcccagcgaaggcagcgccccaggcaccagcaccgagcctagtgagcaggagattaaacggatcaacaagatcagaagaagacttgtgaaagacagcaacaccaagaaggccggcaagacaggccccatgaaaaccctgctggttagagtgatgacacccgatctgagagagcggctggaaaacctgagaaagaagcctgaaaatatcccccagcccatcagcaatacatctagagccaacctgaataagctgctgaccgattacaccgaaatgaagaaggcgatcctgcatgtgtactgggaagagttccagaaggaccctgtgggcctgatgagccgggtggcccagcctgccagcaagaagatcgatcagaacaagctgaaacctgagatggacgagaagggcaacctgaccaccgccggctttgcctgctctcagtgtggccagcccctgttcgtgtacaagctggagcaggtgtctgagaagggcaaggcttacaccaactacttcggacggtgcaatgtggccgagcacgaaaagctgatcctgctggcccagctgaagcccgagaaggatagcgacgaagccgtgacatatagcctgggaaagtttgggcagagggccctggatttctacagcattcatgtgaccaaggagtccacccaccccgtgaagcccctggcccagatcgccggaaacagatacgcctccggacctgtgggaaaggccctgagcgacgcatgtatgggcacaatcgcctccttcctgtctaagtaccaggacatcatcatcgaacaccagaaggtggtgaagggcaaccagaagagactggagagcctgcgggagctggccggcaaggaaaacctggaataccctagcgtgaccctgccacctcagcctcacaccaaggagggcgttgatgcctacaacgaagtgatcgcccgggtgcgaatgtgggtgaacctgaacctgtggcagaagctgaagctaagcagagatgatgccaagcctctgctgagactgaagggattcccttcctttcctctggtcgagagacaggccaacgaagtggactggtgggacatggtgtgtaacgtgaagaagctgatcaacgagaaaaaggaggatggcaaggtgttttggcagaatctggctggctacaagagacaggaagccctgagaccatacctgagcagcgaggaagatcggaagaagggaaagaaattcgctcggtaccagctgggcgacctgctgctgcacctggaaaagaagcacggcgaggactggggaaaggtgtacgacgaggcctgggagcggattgacaagaaagtggaaggcctgagcaagcacatcaagctggaagaggaacggagaagcgaggacgcccagagcaaggccgccctgaccgactggctgcgggctaaggccagcttcgtgatcgagggcctgaaggaggccgacaaggacgagttctgcagatgcgagctgaagctgcagaagtggtacggggacctgcggggaaagcccttcgccatcgaagccgagaacagcatcctggacatcagcggcttcagcaagcagtacaactgtgccttcatctggcagaaggacggcgtgaagaagctgaacctgtacctgatcatcaactacttcaagggcggcaagctgcggttcaagaagatcaaacctgaagccttcgaagccaacagattctacaccgtgatcaacaaaaagagcggcgagatcgtgcccatggaggtgaacttcaacttcgacgaccccaacctgatcatcctgcctctggcctttggcaagagacagggcagagaattcatctggaacgacctgctgtccctggaaaccggcagcctgaagctggccaacggaagagtgatcgagaagacactgtacaacagaagaacccggcaggatgagcctgccctgttcgtggccctgaccttcgagcggcgggaggtcctggactcctccaatatcaaaccaatgaacctgatcggcgtggcaagaggcgaaaacatccccgccgtgatcgccctgaccgaccccgagggctgcccactgagccggtttaaggatagcctgggaaacccaacccacatcctgagaatcggcgagagctataaggagaagcagcggaccatccaggccaagaaggaggtggagcagcggagagccggcggctacagccggaagtacgccagcaaagccaagaatctggcagacgatatggtgagaaacaccgctagagatctgctgtactacgccgtgacccaggatgccatgctgatcttcgccaacctgagccggggcttcggccggcagggcaagcggaccttcatggccgagagacagtacacacggatggaggactggctgaccgccaagctggcctacgagggcctgagcaagacctacctgtccaagacactggcccagtacacctccaagacatgcagcaactgtgggtttaccatcaccagcgccgactacgacagggtgctggagaagctgaagaagacagcaacaggctggatgaccacaattaacggcaaggagctgaaggtggagggccagattacctactacaacagatacaagagacagaacgtagtcaaggacctgtccgtcgagctggatagactgagcgaagaatctgtgaacaacgacatctcctcctggacaaagggcagaagcggagaagctctgagcctcctgaagaaaagattctcccatagacccgtgcaggagaagttcgtgtgcctgaactgcggcttcgagacacacgcagccgagcaagccgccctgaacatcgccagatcctggctgttcctgcggagccaggagtacaagaaataccagacaaacaagacaaccggcaacaccgataagagagccttcgtcgagacctggcagtccttttaccggaagaagcttaaggaggtgtggaaacctgccgtgcggtctggcggatctggcggaggctccaccagccccaagaaaaagagaaaagtctaagctgccttctgcggggcttgccttctggccatgcccttcttctctcccttgcacctgtacctcttggtctttgaataaagcctgagtaggaaggctagcaaaaaaaaaaaaaaaaaaaaaaaaaaaaaaaaaaaaaaaaaaaaaaaaaaaaaaaaaaaaaaaaaaaaaaaaaaaaaaaa

SEQ ID NO: 12596 - RNA, 5785 nt, synthetic construct
  source 1..5785: mol_type = other RNA
aggaaataagagagaaaagaagagtaagaagaaatataagagccaccatggcccctaagaagaagcgtaaagtgagccggatggaacgcctcgtctacgaggtgcggcagaagtgcagaaacatcgaggacatctgcatctcctgcggatctctgaacgtgaccctggagcacccactgttcatcggcggcatgtgccagaactgtaaaaactgttttctggagtgtgcctatcaatacgacgatgacggctaccagagctactgcaccatctgttgcggcggaagagaggtgctgatgtgtggaaataacaactgctgccggtgcttctgcgtggaatgcgtggacctgctggtgggccccggcgccgcccaggccgctattaaggaagatccttggaactgctacatgtgcggccacaagggcacatacggcctgctgagacggagagaggactggcctagcagactgcagatgttcttcgccaataaccacgaccaggagttcgacccccctaaggtgtaccctcccgtccccgccgagaagagaaagcccatccgggtcctgagcctgttcgatggcatcgccaccggtctgctggtgctgaaggacctgggcatccaggtggataggtacattgcctccgaggtgtgcgaggactccatcaccgtgggaatggtgcgtcatcagggcaagatcatgtacgtgggcgacgtgcggagcgtgacacagaagcatatccaggagtggggccctttcgacctggtgatcggcggcagcccttgcaatgacctgagcatcgtgaacccagcccggaagggcctgtacgagggaaccggcagactgttcttcgagttttacagactgctgcacgacgcccggcctaaggaaggcgacgaccggcccttcttttggctgttcgagaatgtggtggccatgggagtcagcgacaagcgggatattagccggttcctggagagcaaccccgtgatgatcgatgccaaggaagtgagcgccgcccaccgggccagatacttctggggcaatctgcctggcatgaacagacccctggccagcaccgtgaacgacaagctggagctgcaggagtgcctggagcacggccggatcgccaagttcagcaaggtgagaaccatcaccacccgaagcaacagcatcaaacaaggcaaggaccagcactttcctgtgttcatgaacgagaaggaggacatcctgtggtgtaccgagatggagagagtgttcgggttcccagtccactacacagatgtcagcaacatgtctagactggccagacagagactgctgggaagaagctggtccgtccctgtgatcagacacctgttcgcccctctgaaggagtacttcgcctgcgtgagcagcggcaacagcaacgccaacagccggggccccagcttctctagcggcctggtgccactgtccctgagagggagccacatgggccccatggagatctacaaaaccgtgagcgcctggaagcggcagcctgtgcgcgtgctgagcctgtttcggaatatcgataaagtcctgaaaagcctgggattcctggagagcggctctggctccggcggtggcaccctgaagtacgtggaggatgtgacaaacgtggtcagacgggatgtggagaagtggggccccttcgatctggtgtacggcagcacccaacccctgggcagctcttgtgaccggtgccctggctggtacatgtttcagttccaccggatcctgcagtacgccctgccgagacaggagtcccagcggccattcttttggattttcatggacaacttgctgctgaccgaggatgaccaggaaactaccactcggttcctgcagaccgaagccgtgaccctgcaggacgtgagaggccgggactaccagaacgccatgcgggtgtggtccaacatccctggactgaaaagcaagcacgcacctctgacccctaaagaagaggagtacctgcaggcccaggtgcggagcagaagcaagctggacgcccctaaggtggatctgctggtgaagaattgcctcctgcccctgagagagtacttcaagtatttcagccagaatagtctgcccctgggaggcagcggcggcggcgaggaggtgcccgtggtgttcgaggacgtggccgtgtacttcaccagggaggagtgggccgccctggacaagaggcagaaggagctgtacagggacgtgatgaggaccaactacgagctgctggccagcctgggccccgccgccgccaagcccgacctgatcagcaagctggagaggagggccgccccctggatcagggaccccgacggccccgagtggggcaagggcaggccccccggcaagggcggcccaagcagcggcgcccctcctcccagcggcggcagcccagccggctccccaacctctaccgaggagggcacctctgagtccgccacccccgagagcggccctggcacctccaccgagcccagcgagggcagcgcacccggcagccctgccggcagccccacctccacagaggagggaaccagcaccgagcccagcgaaggcagcgccccaggcaccagcaccgagcctagtgagcaggagattaaacggatcaacaagatcagaagaagacttgtgaaagacagcaacaccaagaaggccggcaagacaggccccatgaaaaccctgctggttagagtgatgacacccgatctgagagagcggctggaaaacctgagaaagaagcctgaaaatatcccccagcccatcagcaatacatctagagccaacctgaataagctgctgaccgattacaccgaaatgaagaaggcgatcctgcatgtgtactgggaagagttccagaaggaccctgtgggcctgatgagccgggtggcccagcctgccagcaagaagatcgatcagaacaagctgaaacctgagatggacgagaagggcaacctgaccaccgccggctttgcctgctctcagtgtggccagcccctgttcgtgtacaagctggagcaggtgtctgagaagggcaaggcttacaccaactacttcggacggtgcaatgtggccgagcacgaaaagctgatcctgctggcccagctgaagcccgagaaggatagcgacgaagccgtgacatatagcctgggaaagtttgggcagagggccctggatttctacagcattcatgtgaccaaggagtccacccaccccgtgaagcccctggcccagatcgccggaaacagatacgcctccggacctgtgggaaaggccctgagcgacgcatgtatgggcacaatcgcctccttcctgtctaagtaccaggacatcatcatcgaacaccagaaggtggtgaagggcaaccagaagagactggagagcctgcgggagctggccggcaaggaaaacctggaataccctagcgtgaccctgccacctcagcctcacaccaaggagggcgttgatgcctacaacgaagtgatcgcccgggtgcgaatgtgggtgaacctgaacctgtggcagaagctgaagctaagcagagatgatgccaagcctctgctgagactgaagggattcccttcctttcctctggtcgagagacaggccaacgaagtggactggtgggacatggtgtgtaacgtgaagaagctgatcaacgagaaaaaggaggatggcaaggtgttttggcagaatctggctggctacaagagacaggaagccctgagaccatacctgagcagcgaggaagatcggaagaagggaaagaaattcgctcggtaccagctgggcgacctgctgctgcacctggaaaagaagcacggcgaggactggggaaaggtgtacgacgaggcctgggagcggattgacaagaaagtggaaggcctgagcaagcacatcaagctggaagaggaacggagaagcgaggacgcccagagcaaggccgccctgaccgactggctgcgggctaaggccagcttcgtgatcgagggcctgaaggaggccgacaaggacgagttctgcagatgcgagctgaagctgcagaagtggtacggggacctgcggggaaagcccttcgccatcgaagccgagaacagcatcctggacatcagcggcttcagcaagcagtacaactgtgccttcatctggcagaaggacggcgtgaagaagctgaacctgtacctgatcatcaactacttcaagggcggcaagctgcggttcaagaagatcaaacctgaagccttcgaagccaacagattctacaccgtgatcaacaaaaagagcggcgagatcgtgcccatggaggtgaacttcaacttcgacgaccccaacctgatcatcctgcctctggcctttggcaagagacagggcagagaattcatctggaacgacctgctgtccctggaaaccggcagcctgaagctggccaacggaagagtgatcgagaagacactgtacaacagaagaacccggcaggatgagcctgccctgttcgtggccctgaccttcgagcggcgggaggtcctggactcctccaatatcaaaccaatgaacctgatcggcgtggcaagaggcgaaaacatccccgccgtgatcgccctgaccgaccccgagggctgcccactgagccggtttaaggatagcctgggaaacccaacccacatcctgagaatcggcgagagctataaggagaagcagcggaccatccaggccaagaaggaggtggagcagcggagagccggcggctacagccggaagtacgccagcaaagccaagaatctggcagacgatatggtgagaaacaccgctagagatctgctgtactacgccgtgacccaggatgccatgctgatcttcgccaacctgagccggggcttcggccggcagggcaagcggaccttcatggccgagagacagtacacacggatggaggactggctgaccgccaagctggcctacgagggcctgagcaagacctacctgtccaagacactggcccagtacacctccaagacatgcagcaactgtgggtttaccatcaccagcgccgactacgacagggtgctggagaagctgaagaagacagcaacaggctggatgaccacaattaacggcaaggagctgaaggtggagggccagattacctactacaacagatacaagagacagaacgtagtcaaggacctgtccgtcgagctggatagactgagcgaagaatctgtgaacaacgacatctcctcctggacaaagggcagaagcggagaagctctgagcctcctgaagaaaagattctcccatagacccgtgcaggagaagttcgtgtgcctgaactgcggcttcgagacacacgcagccgagcaagccgccctgaacatcgccagatcctggctgttcctgcggagccaggagtacaagaaataccagacaaacaagacaaccggcaacaccgataagagagccttcgtcgagacctggcagtccttttaccggaagaagcttaaggaggtgtggaaacctgccgtgcggtctggcggatctggcggaggctccaccagccccaagaaaaagagaaaagtctaagctgccttctgcggggcttgccttctggccatgcccttcttctctcccttgcacctgtacctcttggtctttgaataaagcctgagtaggaaggctagcaaaaaaaaaaaaaaaaaaaaaaaaaaaaaaaaaaaaaaaaaaaaaaaaaaaaaaaaaaaaaaaaaaaaaaaaaaaaaaaa

SEQ ID NO: 12597 - RNA, 5785 nt, synthetic construct
  source 1..5785: mol_type = other RNA
aggaaataagagagaaaagaagagtaagaagaaatataagagccaccatggcccctaagaagaagcgtaaagtgagccggatggaacgcctcgtctacgaggtgcggcagaagtgcagaaacatcgaggacatctgcatctcctgcggatctctgaacgtgaccctggagcacccactgttcatcggcggcatgtgccagaactgtaaaaactgttttctggagtgtgcctatcaatacgacgatgacggctaccagagctactgcaccatctgttgcggcggaagagaggtgctgatgtgtggaaataacaactgctgccggtgcttctgcgtggaatgcgtggacctgctggtgggccccggcgccgcccaggccgctattaaggaagatccttggaactgctacatgtgcggccacaagggcacatacggcctgctgagacggagagaggactggcctagcagactgcagatgttcttcgccaataaccacgaccaggagttcgacccccctaaggtgtaccctcccgtccccgccgagaagagaaagcccatccgggtcctgagcctgttcgatggcatcgccaccggtctgctggtgctgaaggacctgggcatccaggtggataggtacattgcctccgaggtgtgcgaggactccatcaccgtgggaatggtgcgtcatcagggcaagatcatgtacgtgggcgacgtgcggagcgtgacacagaagcatatccaggagtggggccctttcgacctggtgatcggcggcagcccttgcaatgacctgagcatcgtgaacccagcccggaagggcctgtacgagggaaccggcagactgttcttcgagttttacagactgctgcacgacgcccggcctaaggaaggcgacgaccggcccttcttttggctgttcgagaatgtggtggccatgggagtcagcgacaagcgggatattagccggttcctggagagcaaccccgtgatgatcgatgccaaggaagtgagcgccgcccaccgggccagatacttctggggcaatctgcctggcatgaacagacccctggccagcaccgtgaacgacaagctggagctgcaggagtgcctggagcacggccggatcgccaagttcagcaaggtgagaaccatcaccacccgaagcaacagcatcaaacaaggcaaggaccagcactttcctgtgttcatgaacgagaaggaggacatcctgtggtgtaccgagatggagagagtgttcgggttcccagtccactacacagatgtcagcaacatgtctagactggccagacagagactgctgggaagaagctggtccgtccctgtgatcagacacctgttcgcccctctgaaggagtacttcgcctgcgtgagcagcggcaacagcaacgccaacagccggggccccagcttctctagcggcctggtgccactgtccctgagagggagccacatgggccccatggagatctacaaaaccgtgagcgcctggaagcggcagcctgtgcgcgtgctgagcctgtttcggaatatcgataaagtcctgaaaagcctgggattcctggagagcggctctggctccggcggtggcaccctgaagtacgtggaggatgtgacaaacgtggtcagacgggatgtggagaagtggggccccttcgatctggtgtacggcagcacccaacccctgggcagctcttgtgaccggtgccctggctggtacatgtttcagttccaccggatcctgcagtacgccctgccgagacaggagtcccagcggccattcttttggattttcatggacaacttgctgctgaccgaggatgaccaggaaactaccactcggttcctgcagaccgaagccgtgaccctgcaggacgtgagaggccgggactaccagaacgccatgcgggtgtggtccaacatccctggactgaaaagcaagcacgcacctctgacccctaaagaagaggagtacctgcaggcccaggtgcggagcagaagcaagctggacgcccctaaggtggatctgctggtgaagaattgcctcctgcccctgagagagtacttcaagtatttcagccagaatagtctgcccctgggaggcagcggcggcggcagccagagcctggtgaccttcggcgacgtggccgtggacttcagccaggaggagtgggagtggctgaacagcgcccagaggaacctgtacaggagcgtgatgctggagaactacaggaacctggtgagcctgggcctgtgcgtgagcaagcccgacgtgatcagcagcctggagcagaggaaggagccctggatggtgaagaggaagctgaccaggggcaggtgccccgacctgaagaccgtgggcggcccaagcagcggcgcccctcctcccagcggcggcagcccagccggctccccaacctctaccgaggagggcacctctgagtccgccacccccgagagcggccctggcacctccaccgagcccagcgagggcagcgcacccggcagccctgccggcagccccacctccacagaggagggaaccagcaccgagcccagcgaaggcagcgccccaggcaccagcaccgagcctagtgagcaggagattaaacggatcaacaagatcagaagaagacttgtgaaagacagcaacaccaagaaggccggcaagacaggccccatgaaaaccctgctggttagagtgatgacacccgatctgagagagcggctggaaaacctgagaaagaagcctgaaaatatcccccagcccatcagcaatacatctagagccaacctgaataagctgctgaccgattacaccgaaatgaagaaggcgatcctgcatgtgtactgggaagagttccagaaggaccctgtgggcctgatgagccgggtggcccagcctgccagcaagaagatcgatcagaacaagctgaaacctgagatggacgagaagggcaacctgaccaccgccggctttgcctgctctcagtgtggccagcccctgttcgtgtacaagctggagcaggtgtctgagaagggcaaggcttacaccaactacttcggacggtgcaatgtggccgagcacgaaaagctgatcctgctggcccagctgaagcccgagaaggatagcgacgaagccgtgacatatagcctgggaaagtttgggcagagggccctggatttctacagcattcatgtgaccaaggagtccacccaccccgtgaagcccctggcccagatcgccggaaacagatacgcctccggacctgtgggaaaggccctgagcgacgcatgtatgggcacaatcgcctccttcctgtctaagtaccaggacatcatcatcgaacaccagaaggtggtgaagggcaaccagaagagactggagagcctgcgggagctggccggcaaggaaaacctggaataccctagcgtgaccctgccacctcagcctcacaccaaggagggcgttgatgcctacaacgaagtgatcgcccgggtgcgaatgtgggtgaacctgaacctgtggcagaagctgaagctaagcagagatgatgccaagcctctgctgagactgaagggattcccttcctttcctctggtcgagagacaggccaacgaagtggactggtgggacatggtgtgtaacgtgaagaagctgatcaacgagaaaaaggaggatggcaaggtgttttggcagaatctggctggctacaagagacaggaagccctgagaccatacctgagcagcgaggaagatcggaagaagggaaagaaattcgctcggtaccagctgggcgacctgctgctgcacctggaaaagaagcacggcgaggactggggaaaggtgtacgacgaggcctgggagcggattgacaagaaagtggaaggcctgagcaagcacatcaagctggaagaggaacggagaagcgaggacgcccagagcaaggccgccctgaccgactggctgcgggctaaggccagcttcgtgatcgagggcctgaaggaggccgacaaggacgagttctgcagatgcgagctgaagctgcagaagtggtacggggacctgcggggaaagcccttcgccatcgaagccgagaacagcatcctggacatcagcggcttcagcaagcagtacaactgtgccttcatctggcagaaggacggcgtgaagaagctgaacctgtacctgatcatcaactacttcaagggcggcaagctgcggttcaagaagatcaaacctgaagccttcgaagccaacagattctacaccgtgatcaacaaaaagagcggcgagatcgtgcccatggaggtgaacttcaacttcgacgaccccaacctgatcatcctgcctctggcctttggcaagagacagggcagagaattcatctggaacgacctgctgtccctggaaaccggcagcctgaagctggccaacggaagagtgatcgagaagacactgtacaacagaagaacccggcaggatgagcctgccctgttcgtggccctgaccttcgagcggcgggaggtcctggactcctccaatatcaaaccaatgaacctgatcggcgtggcaagaggcgaaaacatccccgccgtgatcgccctgaccgaccccgagggctgcccactgagccggtttaaggatagcctgggaaacccaacccacatcctgagaatcggcgagagctataaggagaagcagcggaccatccaggccaagaaggaggtggagcagcggagagccggcggctacagccggaagtacgccagcaaagccaagaatctggcagacgatatggtgagaaacaccgctagagatctgctgtactacgccgtgacccaggatgccatgctgatcttcgccaacctgagccggggcttcggccggcagggcaagcggaccttcatggccgagagacagtacacacggatggaggactggctgaccgccaagctggcctacgagggcctgagcaagacctacctgtccaagacactggcccagtacacctccaagacatgcagcaactgtgggtttaccatcaccagcgccgactacgacagggtgctggagaagctgaagaagacagcaacaggctggatgaccacaattaacggcaaggagctgaaggtggagggccagattacctactacaacagatacaagagacagaacgtagtcaaggacctgtccgtcgagctggatagactgagcgaagaatctgtgaacaacgacatctcctcctggacaaagggcagaagcggagaagctctgagcctcctgaagaaaagattctcccatagacccgtgcaggagaagttcgtgtgcctgaactgcggcttcgagacacacgcagccgagcaagccgccctgaacatcgccagatcctggctgttcctgcggagccaggagtacaagaaataccagacaaacaagacaaccggcaacaccgataagagagccttcgtcgagacctggcagtccttttaccggaagaagcttaaggaggtgtggaaacctgccgtgcggtctggcggatctggcggaggctccaccagccccaagaaaaagagaaaagtctaagctgccttctgcggggcttgccttctggccatgcccttcttctctcccttgcacctgtacctcttggtctttgaataaagcctgagtaggaaggctagcaaaaaaaaaaaaaaaaaaaaaaaaaaaaaaaaaaaaaaaaaaaaaaaaaaaaaaaaaaaaaaaaaaaaaaaaaaaaaaaa

SEQ ID NO: 12598 - RNA, 5785 nt, synthetic construct
  source 1..5785: mol_type = other RNA
aggaaataagagagaaaagaagagtaagaagaaatataagagccaccatggcccctaagaagaagcgtaaagtgagccggatggaacgcctcgtctacgaggtgcggcagaagtgcagaaacatcgaggacatctgcatctcctgcggatctctgaacgtgaccctggagcacccactgttcatcggcggcatgtgccagaactgtaaaaactgttttctggagtgtgcctatcaatacgacgatgacggctaccagagctactgcaccatctgttgcggcggaagagaggtgctgatgtgtggaaataacaactgctgccggtgcttctgcgtggaatgcgtggacctgctggtgggccccggcgccgcccaggccgctattaaggaagatccttggaactgctacatgtgcggccacaagggcacatacggcctgctgagacggagagaggactggcctagcagactgcagatgttcttcgccaataaccacgaccaggagttcgacccccctaaggtgtaccctcccgtccccgccgagaagagaaagcccatccgggtcctgagcctgttcgatggcatcgccaccggtctgctggtgctgaaggacctgggcatccaggtggataggtacattgcctccgaggtgtgcgaggactccatcaccgtgggaatggtgcgtcatcagggcaagatcatgtacgtgggcgacgtgcggagcgtgacacagaagcatatccaggagtggggccctttcgacctggtgatcggcggcagcccttgcaatgacctgagcatcgtgaacccagcccggaagggcctgtacgagggaaccggcagactgttcttcgagttttacagactgctgcacgacgcccggcctaaggaaggcgacgaccggcccttcttttggctgttcgagaatgtggtggccatgggagtcagcgacaagcgggatattagccggttcctggagagcaaccccgtgatgatcgatgccaaggaagtgagcgccgcccaccgggccagatacttctggggcaatctgcctggcatgaacagacccctggccagcaccgtgaacgacaagctggagctgcaggagtgcctggagcacggccggatcgccaagttcagcaaggtgagaaccatcaccacccgaagcaacagcatcaaacaaggcaaggaccagcactttcctgtgttcatgaacgagaaggaggacatcctgtggtgtaccgagatggagagagtgttcgggttcccagtccactacacagatgtcagcaacatgtctagactggccagacagagactgctgggaagaagctggtccgtccctgtgatcagacacctgttcgcccctctgaaggagtacttcgcctgcgtgagcagcggcaacagcaacgccaacagccggggccccagcttctctagcggcctggtgccactgtccctgagagggagccacatgggccccatggagatctacaaaaccgtgagcgcctggaagcggcagcctgtgcgcgtgctgagcctgtttcggaatatcgataaagtcctgaaaagcctgggattcctggagagcggctctggctccggcggtggcaccctgaagtacgtggaggatgtgacaaacgtggtcagacgggatgtggagaagtggggccccttcgatctggtgtacggcagcacccaacccctgggcagctcttgtgaccggtgccctggctggtacatgtttcagttccaccggatcctgcagtacgccctgccgagacaggagtcccagcggccattcttttggattttcatggacaacttgctgctgaccgaggatgaccaggaaactaccactcggttcctgcagaccgaagccgtgaccctgcaggacgtgagaggccgggactaccagaacgccatgcgggtgtggtccaacatccctggactgaaaagcaagcacgcacctctgacccctaaagaagaggagtacctgcaggcccaggtgcggagcagaagcaagctggacgcccctaaggtggatctgctggtgaagaattgcctcctgcccctgagagagtacttcaagtatttcagccagaatagtctgcccctgggaggcagcggcggcggcgcccaggagagcgtgatgttcagcgacgtgagcatcgacttcagccaggaggagtgggagtgcctgaacgacgaccagagggccctgtacagggacgtgatgctggagaactacagcaacctggtgagcatggccggccacagcatcagcaagcccgacgtgatcagcttcctggagcagggcaaggagccctggctggtggacagggagctgaccaggggccagtggcccgtgctggagagcggcggcccaagcagcggcgcccctcctcccagcggcggcagcccagccggctccccaacctctaccgaggagggcacctctgagtccgccacccccgagagcggccctggcacctccaccgagcccagcgagggcagcgcacccggcagccctgccggcagccccacctccacagaggagggaaccagcaccgagcccagcgaaggcagcgccccaggcaccagcaccgagcctagtgagcaggagattaaacggatcaacaagatcagaagaagacttgtgaaagacagcaacaccaagaaggccggcaagacaggccccatgaaaaccctgctggttagagtgatgacacccgatctgagagagcggctggaaaacctgagaaagaagcctgaaaatatcccccagcccatcagcaatacatctagagccaacctgaataagctgctgaccgattacaccgaaatgaagaaggcgatcctgcatgtgtactgggaagagttccagaaggaccctgtgggcctgatgagccgggtggcccagcctgccagcaagaagatcgatcagaacaagctgaaacctgagatggacgagaagggcaacctgaccaccgccggctttgcctgctctcagtgtggccagcccctgttcgtgtacaagctggagcaggtgtctgagaagggcaaggcttacaccaactacttcggacggtgcaatgtggccgagcacgaaaagctgatcctgctggcccagctgaagcccgagaaggatagcgacgaagccgtgacatatagcctgggaaagtttgggcagagggccctggatttctacagcattcatgtgaccaaggagtccacccaccccgtgaagcccctggcccagatcgccggaaacagatacgcctccggacctgtgggaaaggccctgagcgacgcatgtatgggcacaatcgcctccttcctgtctaagtaccaggacatcatcatcgaacaccagaaggtggtgaagggcaaccagaagagactggagagcctgcgggagctggccggcaaggaaaacctggaataccctagcgtgaccctgccacctcagcctcacaccaaggagggcgttgatgcctacaacgaagtgatcgcccgggtgcgaatgtgggtgaacctgaacctgtggcagaagctgaagctaagcagagatgatgccaagcctctgctgagactgaagggattcccttcctttcctctggtcgagagacaggccaacgaagtggactggtgggacatggtgtgtaacgtgaagaagctgatcaacgagaaaaaggaggatggcaaggtgttttggcagaatctggctggctacaagagacaggaagccctgagaccatacctgagcagcgaggaagatcggaagaagggaaagaaattcgctcggtaccagctgggcgacctgctgctgcacctggaaaagaagcacggcgaggactggggaaaggtgtacgacgaggcctgggagcggattgacaagaaagtggaaggcctgagcaagcacatcaagctggaagaggaacggagaagcgaggacgcccagagcaaggccgccctgaccgactggctgcgggctaaggccagcttcgtgatcgagggcctgaaggaggccgacaaggacgagttctgcagatgcgagctgaagctgcagaagtggtacggggacctgcggggaaagcccttcgccatcgaagccgagaacagcatcctggacatcagcggcttcagcaagcagtacaactgtgccttcatctggcagaaggacggcgtgaagaagctgaacctgtacctgatcatcaactacttcaagggcggcaagctgcggttcaagaagatcaaacctgaagccttcgaagccaacagattctacaccgtgatcaacaaaaagagcggcgagatcgtgcccatggaggtgaacttcaacttcgacgaccccaacctgatcatcctgcctctggcctttggcaagagacagggcagagaattcatctggaacgacctgctgtccctggaaaccggcagcctgaagctggccaacggaagagtgatcgagaagacactgtacaacagaagaacccggcaggatgagcctgccctgttcgtggccctgaccttcgagcggcgggaggtcctggactcctccaatatcaaaccaatgaacctgatcggcgtggcaagaggcgaaaacatccccgccgtgatcgccctgaccgaccccgagggctgcccactgagccggtttaaggatagcctgggaaacccaacccacatcctgagaatcggcgagagctataaggagaagcagcggaccatccaggccaagaaggaggtggagcagcggagagccggcggctacagccggaagtacgccagcaaagccaagaatctggcagacgatatggtgagaaacaccgctagagatctgctgtactacgccgtgacccaggatgccatgctgatcttcgccaacctgagccggggcttcggccggcagggcaagcggaccttcatggccgagagacagtacacacggatggaggactggctgaccgccaagctggcctacgagggcctgagcaagacctacctgtccaagacactggcccagtacacctccaagacatgcagcaactgtgggtttaccatcaccagcgccgactacgacagggtgctggagaagctgaagaagacagcaacaggctggatgaccacaattaacggcaaggagctgaaggtggagggccagattacctactacaacagatacaagagacagaacgtagtcaaggacctgtccgtcgagctggatagactgagcgaagaatctgtgaacaacgacatctcctcctggacaaagggcagaagcggagaagctctgagcctcctgaagaaaagattctcccatagacccgtgcaggagaagttcgtgtgcctgaactgcggcttcgagacacacgcagccgagcaagccgccctgaacatcgccagatcctggctgttcctgcggagccaggagtacaagaaataccagacaaacaagacaaccggcaacaccgataagagagccttcgtcgagacctggcagtccttttaccggaagaagcttaaggaggtgtggaaacctgccgtgcggtctggcggatctggcggaggctccaccagccccaagaaaaagagaaaagtctaagctgccttctgcggggcttgccttctggccatgcccttcttctctcccttgcacctgtacctcttggtctttgaataaagcctgagtaggaaggctagcaaaaaaaaaaaaaaaaaaaaaaaaaaaaaaaaaaaaaaaaaaaaaaaaaaaaaaaaaaaaaaaaaaaaaaaaaaaaaaaa

SEQ ID NO: 12599 - RNA, 5785 nt, synthetic construct
  source 1..5785: mol_type = other RNA
aggaaataagagagaaaagaagagtaagaagaaatataagagccaccatggcccctaagaagaagcgtaaagtgagccggatggaacgcctcgtctacgaggtgcggcagaagtgcagaaacatcgaggacatctgcatctcctgcggatctctgaacgtgaccctggagcacccactgttcatcggcggcatgtgccagaactgtaaaaactgttttctggagtgtgcctatcaatacgacgatgacggctaccagagctactgcaccatctgttgcggcggaagagaggtgctgatgtgtggaaataacaactgctgccggtgcttctgcgtggaatgcgtggacctgctggtgggccccggcgccgcccaggccgctattaaggaagatccttggaactgctacatgtgcggccacaagggcacatacggcctgctgagacggagagaggactggcctagcagactgcagatgttcttcgccaataaccacgaccaggagttcgacccccctaaggtgtaccctcccgtccccgccgagaagagaaagcccatccgggtcctgagcctgttcgatggcatcgccaccggtctgctggtgctgaaggacctgggcatccaggtggataggtacattgcctccgaggtgtgcgaggactccatcaccgtgggaatggtgcgtcatcagggcaagatcatgtacgtgggcgacgtgcggagcgtgacacagaagcatatccaggagtggggccctttcgacctggtgatcggcggcagcccttgcaatgacctgagcatcgtgaacccagcccggaagggcctgtacgagggaaccggcagactgttcttcgagttttacagactgctgcacgacgcccggcctaaggaaggcgacgaccggcccttcttttggctgttcgagaatgtggtggccatgggagtcagcgacaagcgggatattagccggttcctggagagcaaccccgtgatgatcgatgccaaggaagtgagcgccgcccaccgggccagatacttctggggcaatctgcctggcatgaacagacccctggccagcaccgtgaacgacaagctggagctgcaggagtgcctggagcacggccggatcgccaagttcagcaaggtgagaaccatcaccacccgaagcaacagcatcaaacaaggcaaggaccagcactttcctgtgttcatgaacgagaaggaggacatcctgtggtgtaccgagatggagagagtgttcgggttcccagtccactacacagatgtcagcaacatgtctagactggccagacagagactgctgggaagaagctggtccgtccctgtgatcagacacctgttcgcccctctgaaggagtacttcgcctgcgtgagcagcggcaacagcaacgccaacagccggggccccagcttctctagcggcctggtgccactgtccctgagagggagccacatgggccccatggagatctacaaaaccgtgagcgcctggaagcggcagcctgtgcgcgtgctgagcctgtttcggaatatcgataaagtcctgaaaagcctgggattcctggagagcggctctggctccggcggtggcaccctgaagtacgtggaggatgtgacaaacgtggtcagacgggatgtggagaagtggggccccttcgatctggtgtacggcagcacccaacccctgggcagctcttgtgaccggtgccctggctggtacatgtttcagttccaccggatcctgcagtacgccctgccgagacaggagtcccagcggccattcttttggattttcatggacaacttgctgctgaccgaggatgaccaggaaactaccactcggttcctgcagaccgaagccgtgaccctgcaggacgtgagaggccgggactaccagaacgccatgcgggtgtggtccaacatccctggactgaaaagcaagcacgcacctctgacccctaaagaagaggagtacctgcaggcccaggtgcggagcagaagcaagctggacgcccctaaggtggatctgctggtgaagaattgcctcctgcccctgagagagtacttcaagtatttcagccagaatagtctgcccctgggaggcagcggcggcggcgcccaccacctggtgatgttcagggacgtggccgtggacttcagccaggacgagtgggagtgcctgaacagctaccagaggaacctgtacagggacgtgatcctggagaactacagcaacctggtgagcgtggccggctgcagcatcagcaagcccgacgtgatcaccctgctggagcagggcagggagccctggatggtggtgagggacgagaggaggaggaggaccctggacctggagagcggcggcccaagcagcggcgcccctcctcccagcggcggcagcccagccggctccccaacctctaccgaggagggcacctctgagtccgccacccccgagagcggccctggcacctccaccgagcccagcgagggcagcgcacccggcagccctgccggcagccccacctccacagaggagggaaccagcaccgagcccagcgaaggcagcgccccaggcaccagcaccgagcctagtgagcaggagattaaacggatcaacaagatcagaagaagacttgtgaaagacagcaacaccaagaaggccggcaagacaggccccatgaaaaccctgctggttagagtgatgacacccgatctgagagagcggctggaaaacctgagaaagaagcctgaaaatatcccccagcccatcagcaatacatctagagccaacctgaataagctgctgaccgattacaccgaaatgaagaaggcgatcctgcatgtgtactgggaagagttccagaaggaccctgtgggcctgatgagccgggtggcccagcctgccagcaagaagatcgatcagaacaagctgaaacctgagatggacgagaagggcaacctgaccaccgccggctttgcctgctctcagtgtggccagcccctgttcgtgtacaagctggagcaggtgtctgagaagggcaaggcttacaccaactacttcggacggtgcaatgtggccgagcacgaaaagctgatcctgctggcccagctgaagcccgagaaggatagcgacgaagccgtgacatatagcctgggaaagtttgggcagagggccctggatttctacagcattcatgtgaccaaggagtccacccaccccgtgaagcccctggcccagatcgccggaaacagatacgcctccggacctgtgggaaaggccctgagcgacgcatgtatgggcacaatcgcctccttcctgtctaagtaccaggacatcatcatcgaacaccagaaggtggtgaagggcaaccagaagagactggagagcctgcgggagctggccggcaaggaaaacctggaataccctagcgtgaccctgccacctcagcctcacaccaaggagggcgttgatgcctacaacgaagtgatcgcccgggtgcgaatgtgggtgaacctgaacctgtggcagaagctgaagctaagcagagatgatgccaagcctctgctgagactgaagggattcccttcctttcctctggtcgagagacaggccaacgaagtggactggtgggacatggtgtgtaacgtgaagaagctgatcaacgagaaaaaggaggatggcaaggtgttttggcagaatctggctggctacaagagacaggaagccctgagaccatacctgagcagcgaggaagatcggaagaagggaaagaaattcgctcggtaccagctgggcgacctgctgctgcacctggaaaagaagcacggcgaggactggggaaaggtgtacgacgaggcctgggagcggattgacaagaaagtggaaggcctgagcaagcacatcaagctggaagaggaacggagaagcgaggacgcccagagcaaggccgccctgaccgactggctgcgggctaaggccagcttcgtgatcgagggcctgaaggaggccgacaaggacgagttctgcagatgcgagctgaagctgcagaagtggtacggggacctgcggggaaagcccttcgccatcgaagccgagaacagcatcctggacatcagcggcttcagcaagcagtacaactgtgccttcatctggcagaaggacggcgtgaagaagctgaacctgtacctgatcatcaactacttcaagggcggcaagctgcggttcaagaagatcaaacctgaagccttcgaagccaacagattctacaccgtgatcaacaaaaagagcggcgagatcgtgcccatggaggtgaacttcaacttcgacgaccccaacctgatcatcctgcctctggcctttggcaagagacagggcagagaattcatctggaacgacctgctgtccctggaaaccggcagcctgaagctggccaacggaagagtgatcgagaagacactgtacaacagaagaacccggcaggatgagcctgccctgttcgtggccctgaccttcgagcggcgggaggtcctggactcctccaatatcaaaccaatgaacctgatcggcgtggcaagaggcgaaaacatccccgccgtgatcgccctgaccgaccccgagggctgcccactgagccggtttaaggatagcctgggaaacccaacccacatcctgagaatcggcgagagctataaggagaagcagcggaccatccaggccaagaaggaggtggagcagcggagagccggcggctacagccggaagtacgccagcaaagccaagaatctggcagacgatatggtgagaaacaccgctagagatctgctgtactacgccgtgacccaggatgccatgctgatcttcgccaacctgagccggggcttcggccggcagggcaagcggaccttcatggccgagagacagtacacacggatggaggactggctgaccgccaagctggcctacgagggcctgagcaagacctacctgtccaagacactggcccagtacacctccaagacatgcagcaactgtgggtttaccatcaccagcgccgactacgacagggtgctggagaagctgaagaagacagcaacaggctggatgaccacaattaacggcaaggagctgaaggtggagggccagattacctactacaacagatacaagagacagaacgtagtcaaggacctgtccgtcgagctggatagactgagcgaagaatctgtgaacaacgacatctcctcctggacaaagggcagaagcggagaagctctgagcctcctgaagaaaagattctcccatagacccgtgcaggagaagttcgtgtgcctgaactgcggcttcgagacacacgcagccgagcaagccgccctgaacatcgccagatcctggctgttcctgcggagccaggagtacaagaaataccagacaaacaagacaaccggcaacaccgataagagagccttcgtcgagacctggcagtccttttaccggaagaagcttaaggaggtgtggaaacctgccgtgcggtctggcggatctggcggaggctccaccagccccaagaaaaagagaaaagtctaagctgccttctgcggggcttgccttctggccatgcccttcttctctcccttgcacctgtacctcttggtctttgaataaagcctgagtaggaaggctagcaaaaaaaaaaaaaaaaaaaaaaaaaaaaaaaaaaaaaaaaaaaaaaaaaaaaaaaaaaaaaaaaaaaaaaaaaaaaaaaa

SEQ ID NO: 12600 - RNA, 5785 nt, synthetic construct
  source 1..5785: mol_type = other RNA
aggaaataagagagaaaagaagagtaagaagaaatataagagccaccatggcccctaagaagaagcgtaaagtgagccggatggaacgcctcgtctacgaggtgcggcagaagtgcagaaacatcgaggacatctgcatctcctgcggatctctgaacgtgaccctggagcacccactgttcatcggcggcatgtgccagaactgtaaaaactgttttctggagtgtgcctatcaatacgacgatgacggctaccagagctactgcaccatctgttgcggcggaagagaggtgctgatgtgtggaaataacaactgctgccggtgcttctgcgtggaatgcgtggacctgctggtgggccccggcgccgcccaggccgctattaaggaagatccttggaactgctacatgtgcggccacaagggcacatacggcctgctgagacggagagaggactggcctagcagactgcagatgttcttcgccaataaccacgaccaggagttcgacccccctaaggtgtaccctcccgtccccgccgagaagagaaagcccatccgggtcctgagcctgttcgatggcatcgccaccggtctgctggtgctgaaggacctgggcatccaggtggataggtacattgcctccgaggtgtgcgaggactccatcaccgtgggaatggtgcgtcatcagggcaagatcatgtacgtgggcgacgtgcggagcgtgacacagaagcatatccaggagtggggccctttcgacctggtgatcggcggcagcccttgcaatgacctgagcatcgtgaacccagcccggaagggcctgtacgagggaaccggcagactgttcttcgagttttacagactgctgcacgacgcccggcctaaggaaggcgacgaccggcccttcttttggctgttcgagaatgtggtggccatgggagtcagcgacaagcgggatattagccggttcctggagagcaaccccgtgatgatcgatgccaaggaagtgagcgccgcccaccgggccagatacttctggggcaatctgcctggcatgaacagacccctggccagcaccgtgaacgacaagctggagctgcaggagtgcctggagcacggccggatcgccaagttcagcaaggtgagaaccatcaccacccgaagcaacagcatcaaacaaggcaaggaccagcactttcctgtgttcatgaacgagaaggaggacatcctgtggtgtaccgagatggagagagtgttcgggttcccagtccactacacagatgtcagcaacatgtctagactggccagacagagactgctgggaagaagctggtccgtccctgtgatcagacacctgttcgcccctctgaaggagtacttcgcctgcgtgagcagcggcaacagcaacgccaacagccggggccccagcttctctagcggcctggtgccactgtccctgagagggagccacatgggccccatggagatctacaaaaccgtgagcgcctggaagcggcagcctgtgcgcgtgctgagcctgtttcggaatatcgataaagtcctgaaaagcctgggattcctggagagcggctctggctccggcggtggcaccctgaagtacgtggaggatgtgacaaacgtggtcagacgggatgtggagaagtggggccccttcgatctggtgtacggcagcacccaacccctgggcagctcttgtgaccggtgccctggctggtacatgtttcagttccaccggatcctgcagtacgccctgccgagacaggagtcccagcggccattcttttggattttcatggacaacttgctgctgaccgaggatgaccaggaaactaccactcggttcctgcagaccgaagccgtgaccctgcaggacgtgagaggccgggactaccagaacgccatgcgggtgtggtccaacatccctggactgaaaagcaagcacgcacctctgacccctaaagaagaggagtacctgcaggcccaggtgcggagcagaagcaagctggacgcccctaaggtggatctgctggtgaagaattgcctcctgcccctgagagagtacttcaagtatttcagccagaatagtctgcccctgggaggcagcggcggcggcgagcccgtgagcttcgaggaggtggccgtgtacttcagcagggaggagtgggccctgctggaccccgcccagagggccctgtacagggacgtgatgctggagacctacgagtgcgtggccagcctggcccccctgcccggccccaagcccatggtgatcagcctgctggaggagggcgaggagccctggatccccgacgtgggcagccccgaggccgtggccggcgacgtgagccccggcgagggcggcccaagcagcggcgcccctcctcccagcggcggcagcccagccggctccccaacctctaccgaggagggcacctctgagtccgccacccccgagagcggccctggcacctccaccgagcccagcgagggcagcgcacccggcagccctgccggcagccccacctccacagaggagggaaccagcaccgagcccagcgaaggcagcgccccaggcaccagcaccgagcctagtgagcaggagattaaacggatcaacaagatcagaagaagacttgtgaaagacagcaacaccaagaaggccggcaagacaggccccatgaaaaccctgctggttagagtgatgacacccgatctgagagagcggctggaaaacctgagaaagaagcctgaaaatatcccccagcccatcagcaatacatctagagccaacctgaataagctgctgaccgattacaccgaaatgaagaaggcgatcctgcatgtgtactgggaagagttccagaaggaccctgtgggcctgatgagccgggtggcccagcctgccagcaagaagatcgatcagaacaagctgaaacctgagatggacgagaagggcaacctgaccaccgccggctttgcctgctctcagtgtggccagcccctgttcgtgtacaagctggagcaggtgtctgagaagggcaaggcttacaccaactacttcggacggtgcaatgtggccgagcacgaaaagctgatcctgctggcccagctgaagcccgagaaggatagcgacgaagccgtgacatatagcctgggaaagtttgggcagagggccctggatttctacagcattcatgtgaccaaggagtccacccaccccgtgaagcccctggcccagatcgccggaaacagatacgcctccggacctgtgggaaaggccctgagcgacgcatgtatgggcacaatcgcctccttcctgtctaagtaccaggacatcatcatcgaacaccagaaggtggtgaagggcaaccagaagagactggagagcctgcgggagctggccggcaaggaaaacctggaataccctagcgtgaccctgccacctcagcctcacaccaaggagggcgttgatgcctacaacgaagtgatcgcccgggtgcgaatgtgggtgaacctgaacctgtggcagaagctgaagctaagcagagatgatgccaagcctctgctgagactgaagggattcccttcctttcctctggtcgagagacaggccaacgaagtggactggtgggacatggtgtgtaacgtgaagaagctgatcaacgagaaaaaggaggatggcaaggtgttttggcagaatctggctggctacaagagacaggaagccctgagaccatacctgagcagcgaggaagatcggaagaagggaaagaaattcgctcggtaccagctgggcgacctgctgctgcacctggaaaagaagcacggcgaggactggggaaaggtgtacgacgaggcctgggagcggattgacaagaaagtggaaggcctgagcaagcacatcaagctggaagaggaacggagaagcgaggacgcccagagcaaggccgccctgaccgactggctgcgggctaaggccagcttcgtgatcgagggcctgaaggaggccgacaaggacgagttctgcagatgcgagctgaagctgcagaagtggtacggggacctgcggggaaagcccttcgccatcgaagccgagaacagcatcctggacatcagcggcttcagcaagcagtacaactgtgccttcatctggcagaaggacggcgtgaagaagctgaacctgtacctgatcatcaactacttcaagggcggcaagctgcggttcaagaagatcaaacctgaagccttcgaagccaacagattctacaccgtgatcaacaaaaagagcggcgagatcgtgcccatggaggtgaacttcaacttcgacgaccccaacctgatcatcctgcctctggcctttggcaagagacagggcagagaattcatctggaacgacctgctgtccctggaaaccggcagcctgaagctggccaacggaagagtgatcgagaagacactgtacaacagaagaacccggcaggatgagcctgccctgttcgtggccctgaccttcgagcggcgggaggtcctggactcctccaatatcaaaccaatgaacctgatcggcgtggcaagaggcgaaaacatccccgccgtgatcgccctgaccgaccccgagggctgcccactgagccggtttaaggatagcctgggaaacccaacccacatcctgagaatcggcgagagctataaggagaagcagcggaccatccaggccaagaaggaggtggagcagcggagagccggcggctacagccggaagtacgccagcaaagccaagaatctggcagacgatatggtgagaaacaccgctagagatctgctgtactacgccgtgacccaggatgccatgctgatcttcgccaacctgagccggggcttcggccggcagggcaagcggaccttcatggccgagagacagtacacacggatggaggactggctgaccgccaagctggcctacgagggcctgagcaagacctacctgtccaagacactggcccagtacacctccaagacatgcagcaactgtgggtttaccatcaccagcgccgactacgacagggtgctggagaagctgaagaagacagcaacaggctggatgaccacaattaacggcaaggagctgaaggtggagggccagattacctactacaacagatacaagagacagaacgtagtcaaggacctgtccgtcgagctggatagactgagcgaagaatctgtgaacaacgacatctcctcctggacaaagggcagaagcggagaagctctgagcctcctgaagaaaagattctcccatagacccgtgcaggagaagttcgtgtgcctgaactgcggcttcgagacacacgcagccgagcaagccgccctgaacatcgccagatcctggctgttcctgcggagccaggagtacaagaaataccagacaaacaagacaaccggcaacaccgataagagagccttcgtcgagacctggcagtccttttaccggaagaagcttaaggaggtgtggaaacctgccgtgcggtctggcggatctggcggaggctccaccagccccaagaaaaagagaaaagtctaagctgccttctgcggggcttgccttctggccatgcccttcttctctcccttgcacctgtacctcttggtctttgaataaagcctgagtaggaaggctagcaaaaaaaaaaaaaaaaaaaaaaaaaaaaaaaaaaaaaaaaaaaaaaaaaaaaaaaaaaaaaaaaaaaaaaaaaaaaaaaa

SEQ ID NO: 12601 - RNA, 5785 nt, synthetic construct
  source 1..5785: mol_type = other RNA
aggaaataagagagaaaagaagagtaagaagaaatataagagccaccatggcccctaagaagaagcgtaaagtgagccggatggaacgcctcgtctacgaggtgcggcagaagtgcagaaacatcgaggacatctgcatctcctgcggatctctgaacgtgaccctggagcacccactgttcatcggcggcatgtgccagaactgtaaaaactgttttctggagtgtgcctatcaatacgacgatgacggctaccagagctactgcaccatctgttgcggcggaagagaggtgctgatgtgtggaaataacaactgctgccggtgcttctgcgtggaatgcgtggacctgctggtgggccccggcgccgcccaggccgctattaaggaagatccttggaactgctacatgtgcggccacaagggcacatacggcctgctgagacggagagaggactggcctagcagactgcagatgttcttcgccaataaccacgaccaggagttcgacccccctaaggtgtaccctcccgtccccgccgagaagagaaagcccatccgggtcctgagcctgttcgatggcatcgccaccggtctgctggtgctgaaggacctgggcatccaggtggataggtacattgcctccgaggtgtgcgaggactccatcaccgtgggaatggtgcgtcatcagggcaagatcatgtacgtgggcgacgtgcggagcgtgacacagaagcatatccaggagtggggccctttcgacctggtgatcggcggcagcccttgcaatgacctgagcatcgtgaacccagcccggaagggcctgtacgagggaaccggcagactgttcttcgagttttacagactgctgcacgacgcccggcctaaggaaggcgacgaccggcccttcttttggctgttcgagaatgtggtggccatgggagtcagcgacaagcgggatattagccggttcctggagagcaaccccgtgatgatcgatgccaaggaagtgagcgccgcccaccgggccagatacttctggggcaatctgcctggcatgaacagacccctggccagcaccgtgaacgacaagctggagctgcaggagtgcctggagcacggccggatcgccaagttcagcaaggtgagaaccatcaccacccgaagcaacagcatcaaacaaggcaaggaccagcactttcctgtgttcatgaacgagaaggaggacatcctgtggtgtaccgagatggagagagtgttcgggttcccagtccactacacagatgtcagcaacatgtctagactggccagacagagactgctgggaagaagctggtccgtccctgtgatcagacacctgttcgcccctctgaaggagtacttcgcctgcgtgagcagcggcaacagcaacgccaacagccggggccccagcttctctagcggcctggtgccactgtccctgagagggagccacatgggccccatggagatctacaaaaccgtgagcgcctggaagcggcagcctgtgcgcgtgctgagcctgtttcggaatatcgataaagtcctgaaaagcctgggattcctggagagcggctctggctccggcggtggcaccctgaagtacgtggaggatgtgacaaacgtggtcagacgggatgtggagaagtggggccccttcgatctggtgtacggcagcacccaacccctgggcagctcttgtgaccggtgccctggctggtacatgtttcagttccaccggatcctgcagtacgccctgccgagacaggagtcccagcggccattcttttggattttcatggacaacttgctgctgaccgaggatgaccaggaaactaccactcggttcctgcagaccgaagccgtgaccctgcaggacgtgagaggccgggactaccagaacgccatgcgggtgtggtccaacatccctggactgaaaagcaagcacgcacctctgacccctaaagaagaggagtacctgcaggcccaggtgcggagcagaagcaagctggacgcccctaaggtggatctgctggtgaagaattgcctcctgcccctgagagagtacttcaagtatttcagccagaatagtctgcccctgggaggcagcggcggcggcaaggaggccttcgtggccttcggcgacgtggccgtggacttcacccaggaggagtggaggctgctgagccccgcccagaggaccctgcacagggaggtgatgctggagacctacaaccacctggtgagcctggagatccccttcagcaagcccaagctgatcagccagctggagaggggcgaggagccctggatcgaggagaggcagaggcccctgggcctgtgccccgccagcaggcccaccggcggcccaagcagcggcgcccctcctcccagcggcggcagcccagccggctccccaacctctaccgaggagggcacctctgagtccgccacccccgagagcggccctggcacctccaccgagcccagcgagggcagcgcacccggcagccctgccggcagccccacctccacagaggagggaaccagcaccgagcccagcgaaggcagcgccccaggcaccagcaccgagcctagtgagcaggagattaaacggatcaacaagatcagaagaagacttgtgaaagacagcaacaccaagaaggccggcaagacaggccccatgaaaaccctgctggttagagtgatgacacccgatctgagagagcggctggaaaacctgagaaagaagcctgaaaatatcccccagcccatcagcaatacatctagagccaacctgaataagctgctgaccgattacaccgaaatgaagaaggcgatcctgcatgtgtactgggaagagttccagaaggaccctgtgggcctgatgagccgggtggcccagcctgccagcaagaagatcgatcagaacaagctgaaacctgagatggacgagaagggcaacctgaccaccgccggctttgcctgctctcagtgtggccagcccctgttcgtgtacaagctggagcaggtgtctgagaagggcaaggcttacaccaactacttcggacggtgcaatgtggccgagcacgaaaagctgatcctgctggcccagctgaagcccgagaaggatagcgacgaagccgtgacatatagcctgggaaagtttgggcagagggccctggatttctacagcattcatgtgaccaaggagtccacccaccccgtgaagcccctggcccagatcgccggaaacagatacgcctccggacctgtgggaaaggccctgagcgacgcatgtatgggcacaatcgcctccttcctgtctaagtaccaggacatcatcatcgaacaccagaaggtggtgaagggcaaccagaagagactggagagcctgcgggagctggccggcaaggaaaacctggaataccctagcgtgaccctgccacctcagcctcacaccaaggagggcgttgatgcctacaacgaagtgatcgcccgggtgcgaatgtgggtgaacctgaacctgtggcagaagctgaagctaagcagagatgatgccaagcctctgctgagactgaagggattcccttcctttcctctggtcgagagacaggccaacgaagtggactggtgggacatggtgtgtaacgtgaagaagctgatcaacgagaaaaaggaggatggcaaggtgttttggcagaatctggctggctacaagagacaggaagccctgagaccatacctgagcagcgaggaagatcggaagaagggaaagaaattcgctcggtaccagctgggcgacctgctgctgcacctggaaaagaagcacggcgaggactggggaaaggtgtacgacgaggcctgggagcggattgacaagaaagtggaaggcctgagcaagcacatcaagctggaagaggaacggagaagcgaggacgcccagagcaaggccgccctgaccgactggctgcgggctaaggccagcttcgtgatcgagggcctgaaggaggccgacaaggacgagttctgcagatgcgagctgaagctgcagaagtggtacggggacctgcggggaaagcccttcgccatcgaagccgagaacagcatcctggacatcagcggcttcagcaagcagtacaactgtgccttcatctggcagaaggacggcgtgaagaagctgaacctgtacctgatcatcaactacttcaagggcggcaagctgcggttcaagaagatcaaacctgaagccttcgaagccaacagattctacaccgtgatcaacaaaaagagcggcgagatcgtgcccatggaggtgaacttcaacttcgacgaccccaacctgatcatcctgcctctggcctttggcaagagacagggcagagaattcatctggaacgacctgctgtccctggaaaccggcagcctgaagctggccaacggaagagtgatcgagaagacactgtacaacagaagaacccggcaggatgagcctgccctgttcgtggccctgaccttcgagcggcgggaggtcctggactcctccaatatcaaaccaatgaacctgatcggcgtggcaagaggcgaaaacatccccgccgtgatcgccctgaccgaccccgagggctgcccactgagccggtttaaggatagcctgggaaacccaacccacatcctgagaatcggcgagagctataaggagaagcagcggaccatccaggccaagaaggaggtggagcagcggagagccggcggctacagccggaagtacgccagcaaagccaagaatctggcagacgatatggtgagaaacaccgctagagatctgctgtactacgccgtgacccaggatgccatgctgatcttcgccaacctgagccggggcttcggccggcagggcaagcggaccttcatggccgagagacagtacacacggatggaggactggctgaccgccaagctggcctacgagggcctgagcaagacctacctgtccaagacactggcccagtacacctccaagacatgcagcaactgtgggtttaccatcaccagcgccgactacgacagggtgctggagaagctgaagaagacagcaacaggctggatgaccacaattaacggcaaggagctgaaggtggagggccagattacctactacaacagatacaagagacagaacgtagtcaaggacctgtccgtcgagctggatagactgagcgaagaatctgtgaacaacgacatctcctcctggacaaagggcagaagcggagaagctctgagcctcctgaagaaaagattctcccatagacccgtgcaggagaagttcgtgtgcctgaactgcggcttcgagacacacgcagccgagcaagccgccctgaacatcgccagatcctggctgttcctgcggagccaggagtacaagaaataccagacaaacaagacaaccggcaacaccgataagagagccttcgtcgagacctggcagtccttttaccggaagaagcttaaggaggtgtggaaacctgccgtgcggtctggcggatctggcggaggctccaccagccccaagaaaaagagaaaagtctaagctgccttctgcggggcttgccttctggccatgcccttcttctctcccttgcacctgtacctcttggtctttgaataaagcctgagtaggaaggctagcaaaaaaaaaaaaaaaaaaaaaaaaaaaaaaaaaaaaaaaaaaaaaaaaaaaaaaaaaaaaaaaaaaaaaaaaaaaaaaaa

SEQ ID NO: 12602 - RNA, 5785 nt, synthetic construct
  source 1..5785: mol_type = other RNA
aggaaataagagagaaaagaagagtaagaagaaatataagagccaccatggcccctaagaagaagcgtaaagtgagccggatggaacgcctcgtctacgaggtgcggcagaagtgcagaaacatcgaggacatctgcatctcctgcggatctctgaacgtgaccctggagcacccactgttcatcggcggcatgtgccagaactgtaaaaactgttttctggagtgtgcctatcaatacgacgatgacggctaccagagctactgcaccatctgttgcggcggaagagaggtgctgatgtgtggaaataacaactgctgccggtgcttctgcgtggaatgcgtggacctgctggtgggccccggcgccgcccaggccgctattaaggaagatccttggaactgctacatgtgcggccacaagggcacatacggcctgctgagacggagagaggactggcctagcagactgcagatgttcttcgccaataaccacgaccaggagttcgacccccctaaggtgtaccctcccgtccccgccgagaagagaaagcccatccgggtcctgagcctgttcgatggcatcgccaccggtctgctggtgctgaaggacctgggcatccaggtggataggtacattgcctccgaggtgtgcgaggactccatcaccgtgggaatggtgcgtcatcagggcaagatcatgtacgtgggcgacgtgcggagcgtgacacagaagcatatccaggagtggggccctttcgacctggtgatcggcggcagcccttgcaatgacctgagcatcgtgaacccagcccggaagggcctgtacgagggaaccggcagactgttcttcgagttttacagactgctgcacgacgcccggcctaaggaaggcgacgaccggcccttcttttggctgttcgagaatgtggtggccatgggagtcagcgacaagcgggatattagccggttcctggagagcaaccccgtgatgatcgatgccaaggaagtgagcgccgcccaccgggccagatacttctggggcaatctgcctggcatgaacagacccctggccagcaccgtgaacgacaagctggagctgcaggagtgcctggagcacggccggatcgccaagttcagcaaggtgagaaccatcaccacccgaagcaacagcatcaaacaaggcaaggaccagcactttcctgtgttcatgaacgagaaggaggacatcctgtggtgtaccgagatggagagagtgttcgggttcccagtccactacacagatgtcagcaacatgtctagactggccagacagagactgctgggaagaagctggtccgtccctgtgatcagacacctgttcgcccctctgaaggagtacttcgcctgcgtgagcagcggcaacagcaacgccaacagccggggccccagcttctctagcggcctggtgccactgtccctgagagggagccacatgggccccatggagatctacaaaaccgtgagcgcctggaagcggcagcctgtgcgcgtgctgagcctgtttcggaatatcgataaagtcctgaaaagcctgggattcctggagagcggctctggctccggcggtggcaccctgaagtacgtggaggatgtgacaaacgtggtcagacgggatgtggagaagtggggccccttcgatctggtgtacggcagcacccaacccctgggcagctcttgtgaccggtgccctggctggtacatgtttcagttccaccggatcctgcagtacgccctgccgagacaggagtcccagcggccattcttttggattttcatggacaacttgctgctgaccgaggatgaccaggaaactaccactcggttcctgcagaccgaagccgtgaccctgcaggacgtgagaggccgggactaccagaacgccatgcgggtgtggtccaacatccctggactgaaaagcaagcacgcacctctgacccctaaagaagaggagtacctgcaggcccaggtgcggagcagaagcaagctggacgcccctaaggtggatctgctggtgaagaattgcctcctgcccctgagagagtacttcaagtatttcagccagaatagtctgcccctgggaggcagcggcggcggcccccaggagagcgtgaccttcaaggacatcgccgtggacttcacccaggaggagtgggccctgctggacaccagccagaggaagctgtacagggacgtgatgctggagaacatcagccacctggtgagcgtgggctaccacctgtgcaagagcgacgtggtgagccagctggagcagggcgtggagctgtggagggagggcaggggcttcccccagggccccaaccccgacaggaagagcggcggcggcccaagcagcggcgcccctcctcccagcggcggcagcccagccggctccccaacctctaccgaggagggcacctctgagtccgccacccccgagagcggccctggcacctccaccgagcccagcgagggcagcgcacccggcagccctgccggcagccccacctccacagaggagggaaccagcaccgagcccagcgaaggcagcgccccaggcaccagcaccgagcctagtgagcaggagattaaacggatcaacaagatcagaagaagacttgtgaaagacagcaacaccaagaaggccggcaagacaggccccatgaaaaccctgctggttagagtgatgacacccgatctgagagagcggctggaaaacctgagaaagaagcctgaaaatatcccccagcccatcagcaatacatctagagccaacctgaataagctgctgaccgattacaccgaaatgaagaaggcgatcctgcatgtgtactgggaagagttccagaaggaccctgtgggcctgatgagccgggtggcccagcctgccagcaagaagatcgatcagaacaagctgaaacctgagatggacgagaagggcaacctgaccaccgccggctttgcctgctctcagtgtggccagcccctgttcgtgtacaagctggagcaggtgtctgagaagggcaaggcttacaccaactacttcggacggtgcaatgtggccgagcacgaaaagctgatcctgctggcccagctgaagcccgagaaggatagcgacgaagccgtgacatatagcctgggaaagtttgggcagagggccctggatttctacagcattcatgtgaccaaggagtccacccaccccgtgaagcccctggcccagatcgccggaaacagatacgcctccggacctgtgggaaaggccctgagcgacgcatgtatgggcacaatcgcctccttcctgtctaagtaccaggacatcatcatcgaacaccagaaggtggtgaagggcaaccagaagagactggagagcctgcgggagctggccggcaaggaaaacctggaataccctagcgtgaccctgccacctcagcctcacaccaaggagggcgttgatgcctacaacgaagtgatcgcccgggtgcgaatgtgggtgaacctgaacctgtggcagaagctgaagctaagcagagatgatgccaagcctctgctgagactgaagggattcccttcctttcctctggtcgagagacaggccaacgaagtggactggtgggacatggtgtgtaacgtgaagaagctgatcaacgagaaaaaggaggatggcaaggtgttttggcagaatctggctggctacaagagacaggaagccctgagaccatacctgagcagcgaggaagatcggaagaagggaaagaaattcgctcggtaccagctgggcgacctgctgctgcacctggaaaagaagcacggcgaggactggggaaaggtgtacgacgaggcctgggagcggattgacaagaaagtggaaggcctgagcaagcacatcaagctggaagaggaacggagaagcgaggacgcccagagcaaggccgccctgaccgactggctgcgggctaaggccagcttcgtgatcgagggcctgaaggaggccgacaaggacgagttctgcagatgcgagctgaagctgcagaagtggtacggggacctgcggggaaagcccttcgccatcgaagccgagaacagcatcctggacatcagcggcttcagcaagcagtacaactgtgccttcatctggcagaaggacggcgtgaagaagctgaacctgtacctgatcatcaactacttcaagggcggcaagctgcggttcaagaagatcaaacctgaagccttcgaagccaacagattctacaccgtgatcaacaaaaagagcggcgagatcgtgcccatggaggtgaacttcaacttcgacgaccccaacctgatcatcctgcctctggcctttggcaagagacagggcagagaattcatctggaacgacctgctgtccctggaaaccggcagcctgaagctggccaacggaagagtgatcgagaagacactgtacaacagaagaacccggcaggatgagcctgccctgttcgtggccctgaccttcgagcggcgggaggtcctggactcctccaatatcaaaccaatgaacctgatcggcgtggcaagaggcgaaaacatccccgccgtgatcgccctgaccgaccccgagggctgcccactgagccggtttaaggatagcctgggaaacccaacccacatcctgagaatcggcgagagctataaggagaagcagcggaccatccaggccaagaaggaggtggagcagcggagagccggcggctacagccggaagtacgccagcaaagccaagaatctggcagacgatatggtgagaaacaccgctagagatctgctgtactacgccgtgacccaggatgccatgctgatcttcgccaacctgagccggggcttcggccggcagggcaagcggaccttcatggccgagagacagtacacacggatggaggactggctgaccgccaagctggcctacgagggcctgagcaagacctacctgtccaagacactggcccagtacacctccaagacatgcagcaactgtgggtttaccatcaccagcgccgactacgacagggtgctggagaagctgaagaagacagcaacaggctggatgaccacaattaacggcaaggagctgaaggtggagggccagattacctactacaacagatacaagagacagaacgtagtcaaggacctgtccgtcgagctggatagactgagcgaagaatctgtgaacaacgacatctcctcctggacaaagggcagaagcggagaagctctgagcctcctgaagaaaagattctcccatagacccgtgcaggagaagttcgtgtgcctgaactgcggcttcgagacacacgcagccgagcaagccgccctgaacatcgccagatcctggctgttcctgcggagccaggagtacaagaaataccagacaaacaagacaaccggcaacaccgataagagagccttcgtcgagacctggcagtccttttaccggaagaagcttaaggaggtgtggaaacctgccgtgcggtctggcggatctggcggaggctccaccagccccaagaaaaagagaaaagtctaagctgccttctgcggggcttgccttctggccatgcccttcttctctcccttgcacctgtacctcttggtctttgaataaagcctgagtaggaaggctagcaaaaaaaaaaaaaaaaaaaaaaaaaaaaaaaaaaaaaaaaaaaaaaaaaaaaaaaaaaaaaaaaaaaaaaaaaaaaaaaa

SEQ ID NO: 12603 - RNA, 5785 nt, synthetic construct
  source 1..5785: mol_type = other RNA
aggaaataagagagaaaagaagagtaagaagaaatataagagccaccatggcccctaagaagaagcgtaaagtgagccggatggaacgcctcgtctacgaggtgcggcagaagtgcagaaacatcgaggacatctgcatctcctgcggatctctgaacgtgaccctggagcacccactgttcatcggcggcatgtgccagaactgtaaaaactgttttctggagtgtgcctatcaatacgacgatgacggctaccagagctactgcaccatctgttgcggcggaagagaggtgctgatgtgtggaaataacaactgctgccggtgcttctgcgtggaatgcgtggacctgctggtgggccccggcgccgcccaggccgctattaaggaagatccttggaactgctacatgtgcggccacaagggcacatacggcctgctgagacggagagaggactggcctagcagactgcagatgttcttcgccaataaccacgaccaggagttcgacccccctaaggtgtaccctcccgtccccgccgagaagagaaagcccatccgggtcctgagcctgttcgatggcatcgccaccggtctgctggtgctgaaggacctgggcatccaggtggataggtacattgcctccgaggtgtgcgaggactccatcaccgtgggaatggtgcgtcatcagggcaagatcatgtacgtgggcgacgtgcggagcgtgacacagaagcatatccaggagtggggccctttcgacctggtgatcggcggcagcccttgcaatgacctgagcatcgtgaacccagcccggaagggcctgtacgagggaaccggcagactgttcttcgagttttacagactgctgcacgacgcccggcctaaggaaggcgacgaccggcccttcttttggctgttcgagaatgtggtggccatgggagtcagcgacaagcgggatattagccggttcctggagagcaaccccgtgatgatcgatgccaaggaagtgagcgccgcccaccgggccagatacttctggggcaatctgcctggcatgaacagacccctggccagcaccgtgaacgacaagctggagctgcaggagtgcctggagcacggccggatcgccaagttcagcaaggtgagaaccatcaccacccgaagcaacagcatcaaacaaggcaaggaccagcactttcctgtgttcatgaacgagaaggaggacatcctgtggtgtaccgagatggagagagtgttcgggttcccagtccactacacagatgtcagcaacatgtctagactggccagacagagactgctgggaagaagctggtccgtccctgtgatcagacacctgttcgcccctctgaaggagtacttcgcctgcgtgagcagcggcaacagcaacgccaacagccggggccccagcttctctagcggcctggtgccactgtccctgagagggagccacatgggccccatggagatctacaaaaccgtgagcgcctggaagcggcagcctgtgcgcgtgctgagcctgtttcggaatatcgataaagtcctgaaaagcctgggattcctggagagcggctctggctccggcggtggcaccctgaagtacgtggaggatgtgacaaacgtggtcagacgggatgtggagaagtggggccccttcgatctggtgtacggcagcacccaacccctgggcagctcttgtgaccggtgccctggctggtacatgtttcagttccaccggatcctgcagtacgccctgccgagacaggagtcccagcggccattcttttggattttcatggacaacttgctgctgaccgaggatgaccaggaaactaccactcggttcctgcagaccgaagccgtgaccctgcaggacgtgagaggccgggactaccagaacgccatgcgggtgtggtccaacatccctggactgaaaagcaagcacgcacctctgacccctaaagaagaggagtacctgcaggcccaggtgcggagcagaagcaagctggacgcccctaaggtggatctgctggtgaagaattgcctcctgcccctgagagagtacttcaagtatttcagccagaatagtctgcccctgggaggcagcggcggcggcatggccgagggcctgaagttcaaggacgtggtgatctacttcagccagaaggagtgggagtgcctgcacagcgcccagaaggacctgtacagggacgtgatgctggagaactacggcaacctggtgctgctgggcctgagcgacaccaagcccaacgtgatcagcctgctggagcagaagaaggagccctggatggtgaagaggaaggagaccaaggagtggtgccccgactgggagttcggcggcggcccaagcagcggcgcccctcctcccagcggcggcagcccagccggctccccaacctctaccgaggagggcacctctgagtccgccacccccgagagcggccctggcacctccaccgagcccagcgagggcagcgcacccggcagccctgccggcagccccacctccacagaggagggaaccagcaccgagcccagcgaaggcagcgccccaggcaccagcaccgagcctagtgagcaggagattaaacggatcaacaagatcagaagaagacttgtgaaagacagcaacaccaagaaggccggcaagacaggccccatgaaaaccctgctggttagagtgatgacacccgatctgagagagcggctggaaaacctgagaaagaagcctgaaaatatcccccagcccatcagcaatacatctagagccaacctgaataagctgctgaccgattacaccgaaatgaagaaggcgatcctgcatgtgtactgggaagagttccagaaggaccctgtgggcctgatgagccgggtggcccagcctgccagcaagaagatcgatcagaacaagctgaaacctgagatggacgagaagggcaacctgaccaccgccggctttgcctgctctcagtgtggccagcccctgttcgtgtacaagctggagcaggtgtctgagaagggcaaggcttacaccaactacttcggacggtgcaatgtggccgagcacgaaaagctgatcctgctggcccagctgaagcccgagaaggatagcgacgaagccgtgacatatagcctgggaaagtttgggcagagggccctggatttctacagcattcatgtgaccaaggagtccacccaccccgtgaagcccctggcccagatcgccggaaacagatacgcctccggacctgtgggaaaggccctgagcgacgcatgtatgggcacaatcgcctccttcctgtctaagtaccaggacatcatcatcgaacaccagaaggtggtgaagggcaaccagaagagactggagagcctgcgggagctggccggcaaggaaaacctggaataccctagcgtgaccctgccacctcagcctcacaccaaggagggcgttgatgcctacaacgaagtgatcgcccgggtgcgaatgtgggtgaacctgaacctgtggcagaagctgaagctaagcagagatgatgccaagcctctgctgagactgaagggattcccttcctttcctctggtcgagagacaggccaacgaagtggactggtgggacatggtgtgtaacgtgaagaagctgatcaacgagaaaaaggaggatggcaaggtgttttggcagaatctggctggctacaagagacaggaagccctgagaccatacctgagcagcgaggaagatcggaagaagggaaagaaattcgctcggtaccagctgggcgacctgctgctgcacctggaaaagaagcacggcgaggactggggaaaggtgtacgacgaggcctgggagcggattgacaagaaagtggaaggcctgagcaagcacatcaagctggaagaggaacggagaagcgaggacgcccagagcaaggccgccctgaccgactggctgcgggctaaggccagcttcgtgatcgagggcctgaaggaggccgacaaggacgagttctgcagatgcgagctgaagctgcagaagtggtacggggacctgcggggaaagcccttcgccatcgaagccgagaacagcatcctggacatcagcggcttcagcaagcagtacaactgtgccttcatctggcagaaggacggcgtgaagaagctgaacctgtacctgatcatcaactacttcaagggcggcaagctgcggttcaagaagatcaaacctgaagccttcgaagccaacagattctacaccgtgatcaacaaaaagagcggcgagatcgtgcccatggaggtgaacttcaacttcgacgaccccaacctgatcatcctgcctctggcctttggcaagagacagggcagagaattcatctggaacgacctgctgtccctggaaaccggcagcctgaagctggccaacggaagagtgatcgagaagacactgtacaacagaagaacccggcaggatgagcctgccctgttcgtggccctgaccttcgagcggcgggaggtcctggactcctccaatatcaaaccaatgaacctgatcggcgtggcaagaggcgaaaacatccccgccgtgatcgccctgaccgaccccgagggctgcccactgagccggtttaaggatagcctgggaaacccaacccacatcctgagaatcggcgagagctataaggagaagcagcggaccatccaggccaagaaggaggtggagcagcggagagccggcggctacagccggaagtacgccagcaaagccaagaatctggcagacgatatggtgagaaacaccgctagagatctgctgtactacgccgtgacccaggatgccatgctgatcttcgccaacctgagccggggcttcggccggcagggcaagcggaccttcatggccgagagacagtacacacggatggaggactggctgaccgccaagctggcctacgagggcctgagcaagacctacctgtccaagacactggcccagtacacctccaagacatgcagcaactgtgggtttaccatcaccagcgccgactacgacagggtgctggagaagctgaagaagacagcaacaggctggatgaccacaattaacggcaaggagctgaaggtggagggccagattacctactacaacagatacaagagacagaacgtagtcaaggacctgtccgtcgagctggatagactgagcgaagaatctgtgaacaacgacatctcctcctggacaaagggcagaagcggagaagctctgagcctcctgaagaaaagattctcccatagacccgtgcaggagaagttcgtgtgcctgaactgcggcttcgagacacacgcagccgagcaagccgccctgaacatcgccagatcctggctgttcctgcggagccaggagtacaagaaataccagacaaacaagacaaccggcaacaccgataagagagccttcgtcgagacctggcagtccttttaccggaagaagcttaaggaggtgtggaaacctgccgtgcggtctggcggatctggcggaggctccaccagccccaagaaaaagagaaaagtctaagctgccttctgcggggcttgccttctggccatgcccttcttctctcccttgcacctgtacctcttggtctttgaataaagcctgagtaggaaggctagcaaaaaaaaaaaaaaaaaaaaaaaaaaaaaaaaaaaaaaaaaaaaaaaaaaaaaaaaaaaaaaaaaaaaaaaaaaaaaaaa

SEQ ID NO: 12604 - RNA, 5785 nt, synthetic construct
  source 1..5785: mol_type = other RNA
aggaaataagagagaaaagaagagtaagaagaaatataagagccaccatggcccctaagaagaagcgtaaagtgagccggatggaacgcctcgtctacgaggtgcggcagaagtgcagaaacatcgaggacatctgcatctcctgcggatctctgaacgtgaccctggagcacccactgttcatcggcggcatgtgccagaactgtaaaaactgttttctggagtgtgcctatcaatacgacgatgacggctaccagagctactgcaccatctgttgcggcggaagagaggtgctgatgtgtggaaataacaactgctgccggtgcttctgcgtggaatgcgtggacctgctggtgggccccggcgccgcccaggccgctattaaggaagatccttggaactgctacatgtgcggccacaagggcacatacggcctgctgagacggagagaggactggcctagcagactgcagatgttcttcgccaataaccacgaccaggagttcgacccccctaaggtgtaccctcccgtccccgccgagaagagaaagcccatccgggtcctgagcctgttcgatggcatcgccaccggtctgctggtgctgaaggacctgggcatccaggtggataggtacattgcctccgaggtgtgcgaggactccatcaccgtgggaatggtgcgtcatcagggcaagatcatgtacgtgggcgacgtgcggagcgtgacacagaagcatatccaggagtggggccctttcgacctggtgatcggcggcagcccttgcaatgacctgagcatcgtgaacccagcccggaagggcctgtacgagggaaccggcagactgttcttcgagttttacagactgctgcacgacgcccggcctaaggaaggcgacgaccggcccttcttttggctgttcgagaatgtggtggccatgggagtcagcgacaagcgggatattagccggttcctggagagcaaccccgtgatgatcgatgccaaggaagtgagcgccgcccaccgggccagatacttctggggcaatctgcctggcatgaacagacccctggccagcaccgtgaacgacaagctggagctgcaggagtgcctggagcacggccggatcgccaagttcagcaaggtgagaaccatcaccacccgaagcaacagcatcaaacaaggcaaggaccagcactttcctgtgttcatgaacgagaaggaggacatcctgtggtgtaccgagatggagagagtgttcgggttcccagtccactacacagatgtcagcaacatgtctagactggccagacagagactgctgggaagaagctggtccgtccctgtgatcagacacctgttcgcccctctgaaggagtacttcgcctgcgtgagcagcggcaacagcaacgccaacagccggggccccagcttctctagcggcctggtgccactgtccctgagagggagccacatgggccccatggagatctacaaaaccgtgagcgcctggaagcggcagcctgtgcgcgtgctgagcctgtttcggaatatcgataaagtcctgaaaagcctgggattcctggagagcggctctggctccggcggtggcaccctgaagtacgtggaggatgtgacaaacgtggtcagacgggatgtggagaagtggggccccttcgatctggtgtacggcagcacccaacccctgggcagctcttgtgaccggtgccctggctggtacatgtttcagttccaccggatcctgcagtacgccctgccgagacaggagtcccagcggccattcttttggattttcatggacaacttgctgctgaccgaggatgaccaggaaactaccactcggttcctgcagaccgaagccgtgaccctgcaggacgtgagaggccgggactaccagaacgccatgcgggtgtggtccaacatccctggactgaaaagcaagcacgcacctctgacccctaaagaagaggagtacctgcaggcccaggtgcggagcagaagcaagctggacgcccctaaggtggatctgctggtgaagaattgcctcctgcccctgagagagtacttcaagtatttcagccagaatagtctgcccctgggaggcagcggcggcggcgagggcgaggcccagaagaggaaggccgaggagagcggcatgcccctgacccagggccacctgaccttcagggacgtggccatcgagttcagccaggaggagtggaagtgcctggaccccgtgcagaaggccctgtacagggacgtgatgctggagaactacaggaacctggtgagcctgggcatctgcctgcccgacctgagcatcttcagcatgatgaagcagaggaccgagagctggaccggcggcccaagcagcggcgcccctcctcccagcggcggcagcccagccggctccccaacctctaccgaggagggcacctctgagtccgccacccccgagagcggccctggcacctccaccgagcccagcgagggcagcgcacccggcagccctgccggcagccccacctccacagaggagggaaccagcaccgagcccagcgaaggcagcgccccaggcaccagcaccgagcctagtgagcaggagattaaacggatcaacaagatcagaagaagacttgtgaaagacagcaacaccaagaaggccggcaagacaggccccatgaaaaccctgctggttagagtgatgacacccgatctgagagagcggctggaaaacctgagaaagaagcctgaaaatatcccccagcccatcagcaatacatctagagccaacctgaataagctgctgaccgattacaccgaaatgaagaaggcgatcctgcatgtgtactgggaagagttccagaaggaccctgtgggcctgatgagccgggtggcccagcctgccagcaagaagatcgatcagaacaagctgaaacctgagatggacgagaagggcaacctgaccaccgccggctttgcctgctctcagtgtggccagcccctgttcgtgtacaagctggagcaggtgtctgagaagggcaaggcttacaccaactacttcggacggtgcaatgtggccgagcacgaaaagctgatcctgctggcccagctgaagcccgagaaggatagcgacgaagccgtgacatatagcctgggaaagtttgggcagagggccctggatttctacagcattcatgtgaccaaggagtccacccaccccgtgaagcccctggcccagatcgccggaaacagatacgcctccggacctgtgggaaaggccctgagcgacgcatgtatgggcacaatcgcctccttcctgtctaagtaccaggacatcatcatcgaacaccagaaggtggtgaagggcaaccagaagagactggagagcctgcgggagctggccggcaaggaaaacctggaataccctagcgtgaccctgccacctcagcctcacaccaaggagggcgttgatgcctacaacgaagtgatcgcccgggtgcgaatgtgggtgaacctgaacctgtggcagaagctgaagctaagcagagatgatgccaagcctctgctgagactgaagggattcccttcctttcctctggtcgagagacaggccaacgaagtggactggtgggacatggtgtgtaacgtgaagaagctgatcaacgagaaaaaggaggatggcaaggtgttttggcagaatctggctggctacaagagacaggaagccctgagaccatacctgagcagcgaggaagatcggaagaagggaaagaaattcgctcggtaccagctgggcgacctgctgctgcacctggaaaagaagcacggcgaggactggggaaaggtgtacgacgaggcctgggagcggattgacaagaaagtggaaggcctgagcaagcacatcaagctggaagaggaacggagaagcgaggacgcccagagcaaggccgccctgaccgactggctgcgggctaaggccagcttcgtgatcgagggcctgaaggaggccgacaaggacgagttctgcagatgcgagctgaagctgcagaagtggtacggggacctgcggggaaagcccttcgccatcgaagccgagaacagcatcctggacatcagcggcttcagcaagcagtacaactgtgccttcatctggcagaaggacggcgtgaagaagctgaacctgtacctgatcatcaactacttcaagggcggcaagctgcggttcaagaagatcaaacctgaagccttcgaagccaacagattctacaccgtgatcaacaaaaagagcggcgagatcgtgcccatggaggtgaacttcaacttcgacgaccccaacctgatcatcctgcctctggcctttggcaagagacagggcagagaattcatctggaacgacctgctgtccctggaaaccggcagcctgaagctggccaacggaagagtgatcgagaagacactgtacaacagaagaacccggcaggatgagcctgccctgttcgtggccctgaccttcgagcggcgggaggtcctggactcctccaatatcaaaccaatgaacctgatcggcgtggcaagaggcgaaaacatccccgccgtgatcgccctgaccgaccccgagggctgcccactgagccggtttaaggatagcctgggaaacccaacccacatcctgagaatcggcgagagctataaggagaagcagcggaccatccaggccaagaaggaggtggagcagcggagagccggcggctacagccggaagtacgccagcaaagccaagaatctggcagacgatatggtgagaaacaccgctagagatctgctgtactacgccgtgacccaggatgccatgctgatcttcgccaacctgagccggggcttcggccggcagggcaagcggaccttcatggccgagagacagtacacacggatggaggactggctgaccgccaagctggcctacgagggcctgagcaagacctacctgtccaagacactggcccagtacacctccaagacatgcagcaactgtgggtttaccatcaccagcgccgactacgacagggtgctggagaagctgaagaagacagcaacaggctggatgaccacaattaacggcaaggagctgaaggtggagggccagattacctactacaacagatacaagagacagaacgtagtcaaggacctgtccgtcgagctggatagactgagcgaagaatctgtgaacaacgacatctcctcctggacaaagggcagaagcggagaagctctgagcctcctgaagaaaagattctcccatagacccgtgcaggagaagttcgtgtgcctgaactgcggcttcgagacacacgcagccgagcaagccgccctgaacatcgccagatcctggctgttcctgcggagccaggagtacaagaaataccagacaaacaagacaaccggcaacaccgataagagagccttcgtcgagacctggcagtccttttaccggaagaagcttaaggaggtgtggaaacctgccgtgcggtctggcggatctggcggaggctccaccagccccaagaaaaagagaaaagtctaagctgccttctgcggggcttgccttctggccatgcccttcttctctcccttgcacctgtacctcttggtctttgaataaagcctgagtaggaaggctagcaaaaaaaaaaaaaaaaaaaaaaaaaaaaaaaaaaaaaaaaaaaaaaaaaaaaaaaaaaaaaaaaaaaaaaaaaaaaaaaa

SEQ ID NO: 12605 - RNA, 5785 nt, synthetic construct
  source 1..5785: mol_type = other RNA
aggaaataagagagaaaagaagagtaagaagaaatataagagccaccatggcccctaagaagaagcgtaaagtgagccggatggaacgcctcgtctacgaggtgcggcagaagtgcagaaacatcgaggacatctgcatctcctgcggatctctgaacgtgaccctggagcacccactgttcatcggcggcatgtgccagaactgtaaaaactgttttctggagtgtgcctatcaatacgacgatgacggctaccagagctactgcaccatctgttgcggcggaagagaggtgctgatgtgtggaaataacaactgctgccggtgcttctgcgtggaatgcgtggacctgctggtgggccccggcgccgcccaggccgctattaaggaagatccttggaactgctacatgtgcggccacaagggcacatacggcctgctgagacggagagaggactggcctagcagactgcagatgttcttcgccaataaccacgaccaggagttcgacccccctaaggtgtaccctcccgtccccgccgagaagagaaagcccatccgggtcctgagcctgttcgatggcatcgccaccggtctgctggtgctgaaggacctgggcatccaggtggataggtacattgcctccgaggtgtgcgaggactccatcaccgtgggaatggtgcgtcatcagggcaagatcatgtacgtgggcgacgtgcggagcgtgacacagaagcatatccaggagtggggccctttcgacctggtgatcggcggcagcccttgcaatgacctgagcatcgtgaacccagcccggaagggcctgtacgagggaaccggcagactgttcttcgagttttacagactgctgcacgacgcccggcctaaggaaggcgacgaccggcccttcttttggctgttcgagaatgtggtggccatgggagtcagcgacaagcgggatattagccggttcctggagagcaaccccgtgatgatcgatgccaaggaagtgagcgccgcccaccgggccagatacttctggggcaatctgcctggcatgaacagacccctggccagcaccgtgaacgacaagctggagctgcaggagtgcctggagcacggccggatcgccaagttcagcaaggtgagaaccatcaccacccgaagcaacagcatcaaacaaggcaaggaccagcactttcctgtgttcatgaacgagaaggaggacatcctgtggtgtaccgagatggagagagtgttcgggttcccagtccactacacagatgtcagcaacatgtctagactggccagacagagactgctgggaagaagctggtccgtccctgtgatcagacacctgttcgcccctctgaaggagtacttcgcctgcgtgagcagcggcaacagcaacgccaacagccggggccccagcttctctagcggcctggtgccactgtccctgagagggagccacatgggccccatggagatctacaaaaccgtgagcgcctggaagcggcagcctgtgcgcgtgctgagcctgtttcggaatatcgataaagtcctgaaaagcctgggattcctggagagcggctctggctccggcggtggcaccctgaagtacgtggaggatgtgacaaacgtggtcagacgggatgtggagaagtggggccccttcgatctggtgtacggcagcacccaacccctgggcagctcttgtgaccggtgccctggctggtacatgtttcagttccaccggatcctgcagtacgccctgccgagacaggagtcccagcggccattcttttggattttcatggacaacttgctgctgaccgaggatgaccaggaaactaccactcggttcctgcagaccgaagccgtgaccctgcaggacgtgagaggccgggactaccagaacgccatgcgggtgtggtccaacatccctggactgaaaagcaagcacgcacctctgacccctaaagaagaggagtacctgcaggcccaggtgcggagcagaagcaagctggacgcccctaaggtggatctgctggtgaagaattgcctcctgcccctgagagagtacttcaagtatttcagccagaatagtctgcccctgggaggcagcggcggcggcatggaggaccccctgagcttcaccgacgtggccatcgacttcagcgccgacgagtgcgagtgcctggacagcgcccagtggaacctgtacaaggaggtgatgctggagaactacagcaacctggtgttcctgggcctggccttcagcaagccccacctggtgaccttcctggagcagagcagcgacccctggagcgtgaagaggaaggccagcgccaccatccccctgggcagcaagccccacggcggcccaagcagcggcgcccctcctcccagcggcggcagcccagccggctccccaacctctaccgaggagggcacctctgagtccgccacccccgagagcggccctggcacctccaccgagcccagcgagggcagcgcacccggcagccctgccggcagccccacctccacagaggagggaaccagcaccgagcccagcgaaggcagcgccccaggcaccagcaccgagcctagtgagcaggagattaaacggatcaacaagatcagaagaagacttgtgaaagacagcaacaccaagaaggccggcaagacaggccccatgaaaaccctgctggttagagtgatgacacccgatctgagagagcggctggaaaacctgagaaagaagcctgaaaatatcccccagcccatcagcaatacatctagagccaacctgaataagctgctgaccgattacaccgaaatgaagaaggcgatcctgcatgtgtactgggaagagttccagaaggaccctgtgggcctgatgagccgggtggcccagcctgccagcaagaagatcgatcagaacaagctgaaacctgagatggacgagaagggcaacctgaccaccgccggctttgcctgctctcagtgtggccagcccctgttcgtgtacaagctggagcaggtgtctgagaagggcaaggcttacaccaactacttcggacggtgcaatgtggccgagcacgaaaagctgatcctgctggcccagctgaagcccgagaaggatagcgacgaagccgtgacatatagcctgggaaagtttgggcagagggccctggatttctacagcattcatgtgaccaaggagtccacccaccccgtgaagcccctggcccagatcgccggaaacagatacgcctccggacctgtgggaaaggccctgagcgacgcatgtatgggcacaatcgcctccttcctgtctaagtaccaggacatcatcatcgaacaccagaaggtggtgaagggcaaccagaagagactggagagcctgcgggagctggccggcaaggaaaacctggaataccctagcgtgaccctgccacctcagcctcacaccaaggagggcgttgatgcctacaacgaagtgatcgcccgggtgcgaatgtgggtgaacctgaacctgtggcagaagctgaagctaagcagagatgatgccaagcctctgctgagactgaagggattcccttcctttcctctggtcgagagacaggccaacgaagtggactggtgggacatggtgtgtaacgtgaagaagctgatcaacgagaaaaaggaggatggcaaggtgttttggcagaatctggctggctacaagagacaggaagccctgagaccatacctgagcagcgaggaagatcggaagaagggaaagaaattcgctcggtaccagctgggcgacctgctgctgcacctggaaaagaagcacggcgaggactggggaaaggtgtacgacgaggcctgggagcggattgacaagaaagtggaaggcctgagcaagcacatcaagctggaagaggaacggagaagcgaggacgcccagagcaaggccgccctgaccgactggctgcgggctaaggccagcttcgtgatcgagggcctgaaggaggccgacaaggacgagttctgcagatgcgagctgaagctgcagaagtggtacggggacctgcggggaaagcccttcgccatcgaagccgagaacagcatcctggacatcagcggcttcagcaagcagtacaactgtgccttcatctggcagaaggacggcgtgaagaagctgaacctgtacctgatcatcaactacttcaagggcggcaagctgcggttcaagaagatcaaacctgaagccttcgaagccaacagattctacaccgtgatcaacaaaaagagcggcgagatcgtgcccatggaggtgaacttcaacttcgacgaccccaacctgatcatcctgcctctggcctttggcaagagacagggcagagaattcatctggaacgacctgctgtccctggaaaccggcagcctgaagctggccaacggaagagtgatcgagaagacactgtacaacagaagaacccggcaggatgagcctgccctgttcgtggccctgaccttcgagcggcgggaggtcctggactcctccaatatcaaaccaatgaacctgatcggcgtggcaagaggcgaaaacatccccgccgtgatcgccctgaccgaccccgagggctgcccactgagccggtttaaggatagcctgggaaacccaacccacatcctgagaatcggcgagagctataaggagaagcagcggaccatccaggccaagaaggaggtggagcagcggagagccggcggctacagccggaagtacgccagcaaagccaagaatctggcagacgatatggtgagaaacaccgctagagatctgctgtactacgccgtgacccaggatgccatgctgatcttcgccaacctgagccggggcttcggccggcagggcaagcggaccttcatggccgagagacagtacacacggatggaggactggctgaccgccaagctggcctacgagggcctgagcaagacctacctgtccaagacactggcccagtacacctccaagacatgcagcaactgtgggtttaccatcaccagcgccgactacgacagggtgctggagaagctgaagaagacagcaacaggctggatgaccacaattaacggcaaggagctgaaggtggagggccagattacctactacaacagatacaagagacagaacgtagtcaaggacctgtccgtcgagctggatagactgagcgaagaatctgtgaacaacgacatctcctcctggacaaagggcagaagcggagaagctctgagcctcctgaagaaaagattctcccatagacccgtgcaggagaagttcgtgtgcctgaactgcggcttcgagacacacgcagccgagcaagccgccctgaacatcgccagatcctggctgttcctgcggagccaggagtacaagaaataccagacaaacaagacaaccggcaacaccgataagagagccttcgtcgagacctggcagtccttttaccggaagaagcttaaggaggtgtggaaacctgccgtgcggtctggcggatctggcggaggctccaccagccccaagaaaaagagaaaagtctaagctgccttctgcggggcttgccttctggccatgcccttcttctctcccttgcacctgtacctcttggtctttgaataaagcctgagtaggaaggctagcaaaaaaaaaaaaaaaaaaaaaaaaaaaaaaaaaaaaaaaaaaaaaaaaaaaaaaaaaaaaaaaaaaaaaaaaaaaaaaaa

SEQ ID NO: 12606 - RNA, 5785 nt, synthetic construct
  source 1..5785: mol_type = other RNA
aggaaataagagagaaaagaagagtaagaagaaatataagagccaccatggcccctaagaagaagcgtaaagtgagccggatggaacgcctcgtctacgaggtgcggcagaagtgcagaaacatcgaggacatctgcatctcctgcggatctctgaacgtgaccctggagcacccactgttcatcggcggcatgtgccagaactgtaaaaactgttttctggagtgtgcctatcaatacgacgatgacggctaccagagctactgcaccatctgttgcggcggaagagaggtgctgatgtgtggaaataacaactgctgccggtgcttctgcgtggaatgcgtggacctgctggtgggccccggcgccgcccaggccgctattaaggaagatccttggaactgctacatgtgcggccacaagggcacatacggcctgctgagacggagagaggactggcctagcagactgcagatgttcttcgccaataaccacgaccaggagttcgacccccctaaggtgtaccctcccgtccccgccgagaagagaaagcccatccgggtcctgagcctgttcgatggcatcgccaccggtctgctggtgctgaaggacctgggcatccaggtggataggtacattgcctccgaggtgtgcgaggactccatcaccgtgggaatggtgcgtcatcagggcaagatcatgtacgtgggcgacgtgcggagcgtgacacagaagcatatccaggagtggggccctttcgacctggtgatcggcggcagcccttgcaatgacctgagcatcgtgaacccagcccggaagggcctgtacgagggaaccggcagactgttcttcgagttttacagactgctgcacgacgcccggcctaaggaaggcgacgaccggcccttcttttggctgttcgagaatgtggtggccatgggagtcagcgacaagcgggatattagccggttcctggagagcaaccccgtgatgatcgatgccaaggaagtgagcgccgcccaccgggccagatacttctggggcaatctgcctggcatgaacagacccctggccagcaccgtgaacgacaagctggagctgcaggagtgcctggagcacggccggatcgccaagttcagcaaggtgagaaccatcaccacccgaagcaacagcatcaaacaaggcaaggaccagcactttcctgtgttcatgaacgagaaggaggacatcctgtggtgtaccgagatggagagagtgttcgggttcccagtccactacacagatgtcagcaacatgtctagactggccagacagagactgctgggaagaagctggtccgtccctgtgatcagacacctgttcgcccctctgaaggagtacttcgcctgcgtgagcagcggcaacagcaacgccaacagccggggccccagcttctctagcggcctggtgccactgtccctgagagggagccacatgggccccatggagatctacaaaaccgtgagcgcctggaagcggcagcctgtgcgcgtgctgagcctgtttcggaatatcgataaagtcctgaaaagcctgggattcctggagagcggctctggctccggcggtggcaccctgaagtacgtggaggatgtgacaaacgtggtcagacgggatgtggagaagtggggccccttcgatctggtgtacggcagcacccaacccctgggcagctcttgtgaccggtgccctggctggtacatgtttcagttccaccggatcctgcagtacgccctgccgagacaggagtcccagcggccattcttttggattttcatggacaacttgctgctgaccgaggatgaccaggaaactaccactcggttcctgcagaccgaagccgtgaccctgcaggacgtgagaggccgggactaccagaacgccatgcgggtgtggtccaacatccctggactgaaaagcaagcacgcacctctgacccctaaagaagaggagtacctgcaggcccaggtgcggagcagaagcaagctggacgcccctaaggtggatctgctggtgaagaattgcctcctgcccctgagagagtacttcaagtatttcagccagaatagtctgcccctgggaggcagcggcggcggcgcccccggcagcgtgaccttcagggacgtggccatcgacttcagccaggaggagtggaagtggctgcagcccgcccagagggacctgtacaggtgcgtgatgctggagaactacggccacctggtgagcctgggcctgtgcatcagcaagcccgacgtggtgagcctgctggagcagggcaaggagccctggctgggcaagggcggcgtgaacagggacctgttcagcgtgagcgacggcaagggcggcccaagcagcggcgcccctcctcccagcggcggcagcccagccggctccccaacctctaccgaggagggcacctctgagtccgccacccccgagagcggccctggcacctccaccgagcccagcgagggcagcgcacccggcagccctgccggcagccccacctccacagaggagggaaccagcaccgagcccagcgaaggcagcgccccaggcaccagcaccgagcctagtgagcaggagattaaacggatcaacaagatcagaagaagacttgtgaaagacagcaacaccaagaaggccggcaagacaggccccatgaaaaccctgctggttagagtgatgacacccgatctgagagagcggctggaaaacctgagaaagaagcctgaaaatatcccccagcccatcagcaatacatctagagccaacctgaataagctgctgaccgattacaccgaaatgaagaaggcgatcctgcatgtgtactgggaagagttccagaaggaccctgtgggcctgatgagccgggtggcccagcctgccagcaagaagatcgatcagaacaagctgaaacctgagatggacgagaagggcaacctgaccaccgccggctttgcctgctctcagtgtggccagcccctgttcgtgtacaagctggagcaggtgtctgagaagggcaaggcttacaccaactacttcggacggtgcaatgtggccgagcacgaaaagctgatcctgctggcccagctgaagcccgagaaggatagcgacgaagccgtgacatatagcctgggaaagtttgggcagagggccctggatttctacagcattcatgtgaccaaggagtccacccaccccgtgaagcccctggcccagatcgccggaaacagatacgcctccggacctgtgggaaaggccctgagcgacgcatgtatgggcacaatcgcctccttcctgtctaagtaccaggacatcatcatcgaacaccagaaggtggtgaagggcaaccagaagagactggagagcctgcgggagctggccggcaaggaaaacctggaataccctagcgtgaccctgccacctcagcctcacaccaaggagggcgttgatgcctacaacgaagtgatcgcccgggtgcgaatgtgggtgaacctgaacctgtggcagaagctgaagctaagcagagatgatgccaagcctctgctgagactgaagggattcccttcctttcctctggtcgagagacaggccaacgaagtggactggtgggacatggtgtgtaacgtgaagaagctgatcaacgagaaaaaggaggatggcaaggtgttttggcagaatctggctggctacaagagacaggaagccctgagaccatacctgagcagcgaggaagatcggaagaagggaaagaaattcgctcggtaccagctgggcgacctgctgctgcacctggaaaagaagcacggcgaggactggggaaaggtgtacgacgaggcctgggagcggattgacaagaaagtggaaggcctgagcaagcacatcaagctggaagaggaacggagaagcgaggacgcccagagcaaggccgccctgaccgactggctgcgggctaaggccagcttcgtgatcgagggcctgaaggaggccgacaaggacgagttctgcagatgcgagctgaagctgcagaagtggtacggggacctgcggggaaagcccttcgccatcgaagccgagaacagcatcctggacatcagcggcttcagcaagcagtacaactgtgccttcatctggcagaaggacggcgtgaagaagctgaacctgtacctgatcatcaactacttcaagggcggcaagctgcggttcaagaagatcaaacctgaagccttcgaagccaacagattctacaccgtgatcaacaaaaagagcggcgagatcgtgcccatggaggtgaacttcaacttcgacgaccccaacctgatcatcctgcctctggcctttggcaagagacagggcagagaattcatctggaacgacctgctgtccctggaaaccggcagcctgaagctggccaacggaagagtgatcgagaagacactgtacaacagaagaacccggcaggatgagcctgccctgttcgtggccctgaccttcgagcggcgggaggtcctggactcctccaatatcaaaccaatgaacctgatcggcgtggcaagaggcgaaaacatccccgccgtgatcgccctgaccgaccccgagggctgcccactgagccggtttaaggatagcctgggaaacccaacccacatcctgagaatcggcgagagctataaggagaagcagcggaccatccaggccaagaaggaggtggagcagcggagagccggcggctacagccggaagtacgccagcaaagccaagaatctggcagacgatatggtgagaaacaccgctagagatctgctgtactacgccgtgacccaggatgccatgctgatcttcgccaacctgagccggggcttcggccggcagggcaagcggaccttcatggccgagagacagtacacacggatggaggactggctgaccgccaagctggcctacgagggcctgagcaagacctacctgtccaagacactggcccagtacacctccaagacatgcagcaactgtgggtttaccatcaccagcgccgactacgacagggtgctggagaagctgaagaagacagcaacaggctggatgaccacaattaacggcaaggagctgaaggtggagggccagattacctactacaacagatacaagagacagaacgtagtcaaggacctgtccgtcgagctggatagactgagcgaagaatctgtgaacaacgacatctcctcctggacaaagggcagaagcggagaagctctgagcctcctgaagaaaagattctcccatagacccgtgcaggagaagttcgtgtgcctgaactgcggcttcgagacacacgcagccgagcaagccgccctgaacatcgccagatcctggctgttcctgcggagccaggagtacaagaaataccagacaaacaagacaaccggcaacaccgataagagagccttcgtcgagacctggcagtccttttaccggaagaagcttaaggaggtgtggaaacctgccgtgcggtctggcggatctggcggaggctccaccagccccaagaaaaagagaaaagtctaagctgccttctgcggggcttgccttctggccatgcccttcttctctcccttgcacctgtacctcttggtctttgaataaagcctgagtaggaaggctagcaaaaaaaaaaaaaaaaaaaaaaaaaaaaaaaaaaaaaaaaaaaaaaaaaaaaaaaaaaaaaaaaaaaaaaaaaaaaaaaa

SEQ ID NO: 12607 - RNA, 5785 nt, synthetic construct
  source 1..5785: mol_type = other RNA
aggaaataagagagaaaagaagagtaagaagaaatataagagccaccatggcccctaagaagaagcgtaaagtgagccggatggaacgcctcgtctacgaggtgcggcagaagtgcagaaacatcgaggacatctgcatctcctgcggatctctgaacgtgaccctggagcacccactgttcatcggcggcatgtgccagaactgtaaaaactgttttctggagtgtgcctatcaatacgacgatgacggctaccagagctactgcaccatctgttgcggcggaagagaggtgctgatgtgtggaaataacaactgctgccggtgcttctgcgtggaatgcgtggacctgctggtgggccccggcgccgcccaggccgctattaaggaagatccttggaactgctacatgtgcggccacaagggcacatacggcctgctgagacggagagaggactggcctagcagactgcagatgttcttcgccaataaccacgaccaggagttcgacccccctaaggtgtaccctcccgtccccgccgagaagagaaagcccatccgggtcctgagcctgttcgatggcatcgccaccggtctgctggtgctgaaggacctgggcatccaggtggataggtacattgcctccgaggtgtgcgaggactccatcaccgtgggaatggtgcgtcatcagggcaagatcatgtacgtgggcgacgtgcggagcgtgacacagaagcatatccaggagtggggccctttcgacctggtgatcggcggcagcccttgcaatgacctgagcatcgtgaacccagcccggaagggcctgtacgagggaaccggcagactgttcttcgagttttacagactgctgcacgacgcccggcctaaggaaggcgacgaccggcccttcttttggctgttcgagaatgtggtggccatgggagtcagcgacaagcgggatattagccggttcctggagagcaaccccgtgatgatcgatgccaaggaagtgagcgccgcccaccgggccagatacttctggggcaatctgcctggcatgaacagacccctggccagcaccgtgaacgacaagctggagctgcaggagtgcctggagcacggccggatcgccaagttcagcaaggtgagaaccatcaccacccgaagcaacagcatcaaacaaggcaaggaccagcactttcctgtgttcatgaacgagaaggaggacatcctgtggtgtaccgagatggagagagtgttcgggttcccagtccactacacagatgtcagcaacatgtctagactggccagacagagactgctgggaagaagctggtccgtccctgtgatcagacacctgttcgcccctctgaaggagtacttcgcctgcgtgagcagcggcaacagcaacgccaacagccggggccccagcttctctagcggcctggtgccactgtccctgagagggagccacatgggccccatggagatctacaaaaccgtgagcgcctggaagcggcagcctgtgcgcgtgctgagcctgtttcggaatatcgataaagtcctgaaaagcctgggattcctggagagcggctctggctccggcggtggcaccctgaagtacgtggaggatgtgacaaacgtggtcagacgggatgtggagaagtggggccccttcgatctggtgtacggcagcacccaacccctgggcagctcttgtgaccggtgccctggctggtacatgtttcagttccaccggatcctgcagtacgccctgccgagacaggagtcccagcggccattcttttggattttcatggacaacttgctgctgaccgaggatgaccaggaaactaccactcggttcctgcagaccgaagccgtgaccctgcaggacgtgagaggccgggactaccagaacgccatgcgggtgtggtccaacatccctggactgaaaagcaagcacgcacctctgacccctaaagaagaggagtacctgcaggcccaggtgcggagcagaagcaagctggacgcccctaaggtggatctgctggtgaagaattgcctcctgcccctgagagagtacttcaagtatttcagccagaatagtctgcccctgggaggcagcggcggcggcggcagcgtgatgttcagcgacgtgagcgtggacttcagccaggacgagtgggagtgcctggaccccgtgcagagggacctgtacagggaggtgatgctggagaactacagcaacctggtgagcgtgggcctgtacatccccaagccccaggtgatcagcctgctggagcagggcaaggagccctggatggtgggcaaggagctgaccaggggcctgtgcagcgacctggagagcatgtgcgagggcggcccaagcagcggcgcccctcctcccagcggcggcagcccagccggctccccaacctctaccgaggagggcacctctgagtccgccacccccgagagcggccctggcacctccaccgagcccagcgagggcagcgcacccggcagccctgccggcagccccacctccacagaggagggaaccagcaccgagcccagcgaaggcagcgccccaggcaccagcaccgagcctagtgagcaggagattaaacggatcaacaagatcagaagaagacttgtgaaagacagcaacaccaagaaggccggcaagacaggccccatgaaaaccctgctggttagagtgatgacacccgatctgagagagcggctggaaaacctgagaaagaagcctgaaaatatcccccagcccatcagcaatacatctagagccaacctgaataagctgctgaccgattacaccgaaatgaagaaggcgatcctgcatgtgtactgggaagagttccagaaggaccctgtgggcctgatgagccgggtggcccagcctgccagcaagaagatcgatcagaacaagctgaaacctgagatggacgagaagggcaacctgaccaccgccggctttgcctgctctcagtgtggccagcccctgttcgtgtacaagctggagcaggtgtctgagaagggcaaggcttacaccaactacttcggacggtgcaatgtggccgagcacgaaaagctgatcctgctggcccagctgaagcccgagaaggatagcgacgaagccgtgacatatagcctgggaaagtttgggcagagggccctggatttctacagcattcatgtgaccaaggagtccacccaccccgtgaagcccctggcccagatcgccggaaacagatacgcctccggacctgtgggaaaggccctgagcgacgcatgtatgggcacaatcgcctccttcctgtctaagtaccaggacatcatcatcgaacaccagaaggtggtgaagggcaaccagaagagactggagagcctgcgggagctggccggcaaggaaaacctggaataccctagcgtgaccctgccacctcagcctcacaccaaggagggcgttgatgcctacaacgaagtgatcgcccgggtgcgaatgtgggtgaacctgaacctgtggcagaagctgaagctaagcagagatgatgccaagcctctgctgagactgaagggattcccttcctttcctctggtcgagagacaggccaacgaagtggactggtgggacatggtgtgtaacgtgaagaagctgatcaacgagaaaaaggaggatggcaaggtgttttggcagaatctggctggctacaagagacaggaagccctgagaccatacctgagcagcgaggaagatcggaagaagggaaagaaattcgctcggtaccagctgggcgacctgctgctgcacctggaaaagaagcacggcgaggactggggaaaggtgtacgacgaggcctgggagcggattgacaagaaagtggaaggcctgagcaagcacatcaagctggaagaggaacggagaagcgaggacgcccagagcaaggccgccctgaccgactggctgcgggctaaggccagcttcgtgatcgagggcctgaaggaggccgacaaggacgagttctgcagatgcgagctgaagctgcagaagtggtacggggacctgcggggaaagcccttcgccatcgaagccgagaacagcatcctggacatcagcggcttcagcaagcagtacaactgtgccttcatctggcagaaggacggcgtgaagaagctgaacctgtacctgatcatcaactacttcaagggcggcaagctgcggttcaagaagatcaaacctgaagccttcgaagccaacagattctacaccgtgatcaacaaaaagagcggcgagatcgtgcccatggaggtgaacttcaacttcgacgaccccaacctgatcatcctgcctctggcctttggcaagagacagggcagagaattcatctggaacgacctgctgtccctggaaaccggcagcctgaagctggccaacggaagagtgatcgagaagacactgtacaacagaagaacccggcaggatgagcctgccctgttcgtggccctgaccttcgagcggcgggaggtcctggactcctccaatatcaaaccaatgaacctgatcggcgtggcaagaggcgaaaacatccccgccgtgatcgccctgaccgaccccgagggctgcccactgagccggtttaaggatagcctgggaaacccaacccacatcctgagaatcggcgagagctataaggagaagcagcggaccatccaggccaagaaggaggtggagcagcggagagccggcggctacagccggaagtacgccagcaaagccaagaatctggcagacgatatggtgagaaacaccgctagagatctgctgtactacgccgtgacccaggatgccatgctgatcttcgccaacctgagccggggcttcggccggcagggcaagcggaccttcatggccgagagacagtacacacggatggaggactggctgaccgccaagctggcctacgagggcctgagcaagacctacctgtccaagacactggcccagtacacctccaagacatgcagcaactgtgggtttaccatcaccagcgccgactacgacagggtgctggagaagctgaagaagacagcaacaggctggatgaccacaattaacggcaaggagctgaaggtggagggccagattacctactacaacagatacaagagacagaacgtagtcaaggacctgtccgtcgagctggatagactgagcgaagaatctgtgaacaacgacatctcctcctggacaaagggcagaagcggagaagctctgagcctcctgaagaaaagattctcccatagacccgtgcaggagaagttcgtgtgcctgaactgcggcttcgagacacacgcagccgagcaagccgccctgaacatcgccagatcctggctgttcctgcggagccaggagtacaagaaataccagacaaacaagacaaccggcaacaccgataagagagccttcgtcgagacctggcagtccttttaccggaagaagcttaaggaggtgtggaaacctgccgtgcggtctggcggatctggcggaggctccaccagccccaagaaaaagagaaaagtctaagctgccttctgcggggcttgccttctggccatgcccttcttctctcccttgcacctgtacctcttggtctttgaataaagcctgagtaggaaggctagcaaaaaaaaaaaaaaaaaaaaaaaaaaaaaaaaaaaaaaaaaaaaaaaaaaaaaaaaaaaaaaaaaaaaaaaaaaaaaaaa

SEQ ID NO: 12608 - RNA, 5785 nt, synthetic construct
  source 1..5785: mol_type = other RNA
aggaaataagagagaaaagaagagtaagaagaaatataagagccaccatggcccctaagaagaagcgtaaagtgagccggatggaacgcctcgtctacgaggtgcggcagaagtgcagaaacatcgaggacatctgcatctcctgcggatctctgaacgtgaccctggagcacccactgttcatcggcggcatgtgccagaactgtaaaaactgttttctggagtgtgcctatcaatacgacgatgacggctaccagagctactgcaccatctgttgcggcggaagagaggtgctgatgtgtggaaataacaactgctgccggtgcttctgcgtggaatgcgtggacctgctggtgggccccggcgccgcccaggccgctattaaggaagatccttggaactgctacatgtgcggccacaagggcacatacggcctgctgagacggagagaggactggcctagcagactgcagatgttcttcgccaataaccacgaccaggagttcgacccccctaaggtgtaccctcccgtccccgccgagaagagaaagcccatccgggtcctgagcctgttcgatggcatcgccaccggtctgctggtgctgaaggacctgggcatccaggtggataggtacattgcctccgaggtgtgcgaggactccatcaccgtgggaatggtgcgtcatcagggcaagatcatgtacgtgggcgacgtgcggagcgtgacacagaagcatatccaggagtggggccctttcgacctggtgatcggcggcagcccttgcaatgacctgagcatcgtgaacccagcccggaagggcctgtacgagggaaccggcagactgttcttcgagttttacagactgctgcacgacgcccggcctaaggaaggcgacgaccggcccttcttttggctgttcgagaatgtggtggccatgggagtcagcgacaagcgggatattagccggttcctggagagcaaccccgtgatgatcgatgccaaggaagtgagcgccgcccaccgggccagatacttctggggcaatctgcctggcatgaacagacccctggccagcaccgtgaacgacaagctggagctgcaggagtgcctggagcacggccggatcgccaagttcagcaaggtgagaaccatcaccacccgaagcaacagcatcaaacaaggcaaggaccagcactttcctgtgttcatgaacgagaaggaggacatcctgtggtgtaccgagatggagagagtgttcgggttcccagtccactacacagatgtcagcaacatgtctagactggccagacagagactgctgggaagaagctggtccgtccctgtgatcagacacctgttcgcccctctgaaggagtacttcgcctgcgtgagcagcggcaacagcaacgccaacagccggggccccagcttctctagcggcctggtgccactgtccctgagagggagccacatgggccccatggagatctacaaaaccgtgagcgcctggaagcggcagcctgtgcgcgtgctgagcctgtttcggaatatcgataaagtcctgaaaagcctgggattcctggagagcggctctggctccggcggtggcaccctgaagtacgtggaggatgtgacaaacgtggtcagacgggatgtggagaagtggggccccttcgatctggtgtacggcagcacccaacccctgggcagctcttgtgaccggtgccctggctggtacatgtttcagttccaccggatcctgcagtacgccctgccgagacaggagtcccagcggccattcttttggattttcatggacaacttgctgctgaccgaggatgaccaggaaactaccactcggttcctgcagaccgaagccgtgaccctgcaggacgtgagaggccgggactaccagaacgccatgcgggtgtggtccaacatccctggactgaaaagcaagcacgcacctctgacccctaaagaagaggagtacctgcaggcccaggtgcggagcagaagcaagctggacgcccctaaggtggatctgctggtgaagaattgcctcctgcccctgagagagtacttcaagtatttcagccagaatagtctgcccctgggaggcagcggcggcggcggcagcgtgtgcgaggtgagcgtgagcttcgaggacgtgaccgtggacttcagcagggaggagtggcagcacctggaccccgcccagaggaggctgtactgggacgtgaccctggagaactacagccacctgtgcagcgtgggctaccaggtgcccaagcccgaggtgatcttcaagctggagcagggcgagggcccctggaccctggaggaggagaccccccaccagagctgcagcggcgccggcggcccaagcagcggcgcccctcctcccagcggcggcagcccagccggctccccaacctctaccgaggagggcacctctgagtccgccacccccgagagcggccctggcacctccaccgagcccagcgagggcagcgcacccggcagccctgccggcagccccacctccacagaggagggaaccagcaccgagcccagcgaaggcagcgccccaggcaccagcaccgagcctagtgagcaggagattaaacggatcaacaagatcagaagaagacttgtgaaagacagcaacaccaagaaggccggcaagacaggccccatgaaaaccctgctggttagagtgatgacacccgatctgagagagcggctggaaaacctgagaaagaagcctgaaaatatcccccagcccatcagcaatacatctagagccaacctgaataagctgctgaccgattacaccgaaatgaagaaggcgatcctgcatgtgtactgggaagagttccagaaggaccctgtgggcctgatgagccgggtggcccagcctgccagcaagaagatcgatcagaacaagctgaaacctgagatggacgagaagggcaacctgaccaccgccggctttgcctgctctcagtgtggccagcccctgttcgtgtacaagctggagcaggtgtctgagaagggcaaggcttacaccaactacttcggacggtgcaatgtggccgagcacgaaaagctgatcctgctggcccagctgaagcccgagaaggatagcgacgaagccgtgacatatagcctgggaaagtttgggcagagggccctggatttctacagcattcatgtgaccaaggagtccacccaccccgtgaagcccctggcccagatcgccggaaacagatacgcctccggacctgtgggaaaggccctgagcgacgcatgtatgggcacaatcgcctccttcctgtctaagtaccaggacatcatcatcgaacaccagaaggtggtgaagggcaaccagaagagactggagagcctgcgggagctggccggcaaggaaaacctggaataccctagcgtgaccctgccacctcagcctcacaccaaggagggcgttgatgcctacaacgaagtgatcgcccgggtgcgaatgtgggtgaacctgaacctgtggcagaagctgaagctaagcagagatgatgccaagcctctgctgagactgaagggattcccttcctttcctctggtcgagagacaggccaacgaagtggactggtgggacatggtgtgtaacgtgaagaagctgatcaacgagaaaaaggaggatggcaaggtgttttggcagaatctggctggctacaagagacaggaagccctgagaccatacctgagcagcgaggaagatcggaagaagggaaagaaattcgctcggtaccagctgggcgacctgctgctgcacctggaaaagaagcacggcgaggactggggaaaggtgtacgacgaggcctgggagcggattgacaagaaagtggaaggcctgagcaagcacatcaagctggaagaggaacggagaagcgaggacgcccagagcaaggccgccctgaccgactggctgcgggctaaggccagcttcgtgatcgagggcctgaaggaggccgacaaggacgagttctgcagatgcgagctgaagctgcagaagtggtacggggacctgcggggaaagcccttcgccatcgaagccgagaacagcatcctggacatcagcggcttcagcaagcagtacaactgtgccttcatctggcagaaggacggcgtgaagaagctgaacctgtacctgatcatcaactacttcaagggcggcaagctgcggttcaagaagatcaaacctgaagccttcgaagccaacagattctacaccgtgatcaacaaaaagagcggcgagatcgtgcccatggaggtgaacttcaacttcgacgaccccaacctgatcatcctgcctctggcctttggcaagagacagggcagagaattcatctggaacgacctgctgtccctggaaaccggcagcctgaagctggccaacggaagagtgatcgagaagacactgtacaacagaagaacccggcaggatgagcctgccctgttcgtggccctgaccttcgagcggcgggaggtcctggactcctccaatatcaaaccaatgaacctgatcggcgtggcaagaggcgaaaacatccccgccgtgatcgccctgaccgaccccgagggctgcccactgagccggtttaaggatagcctgggaaacccaacccacatcctgagaatcggcgagagctataaggagaagcagcggaccatccaggccaagaaggaggtggagcagcggagagccggcggctacagccggaagtacgccagcaaagccaagaatctggcagacgatatggtgagaaacaccgctagagatctgctgtactacgccgtgacccaggatgccatgctgatcttcgccaacctgagccggggcttcggccggcagggcaagcggaccttcatggccgagagacagtacacacggatggaggactggctgaccgccaagctggcctacgagggcctgagcaagacctacctgtccaagacactggcccagtacacctccaagacatgcagcaactgtgggtttaccatcaccagcgccgactacgacagggtgctggagaagctgaagaagacagcaacaggctggatgaccacaattaacggcaaggagctgaaggtggagggccagattacctactacaacagatacaagagacagaacgtagtcaaggacctgtccgtcgagctggatagactgagcgaagaatctgtgaacaacgacatctcctcctggacaaagggcagaagcggagaagctctgagcctcctgaagaaaagattctcccatagacccgtgcaggagaagttcgtgtgcctgaactgcggcttcgagacacacgcagccgagcaagccgccctgaacatcgccagatcctggctgttcctgcggagccaggagtacaagaaataccagacaaacaagacaaccggcaacaccgataagagagccttcgtcgagacctggcagtccttttaccggaagaagcttaaggaggtgtggaaacctgccgtgcggtctggcggatctggcggaggctccaccagccccaagaaaaagagaaaagtctaagctgccttctgcggggcttgccttctggccatgcccttcttctctcccttgcacctgtacctcttggtctttgaataaagcctgagtaggaaggctagcaaaaaaaaaaaaaaaaaaaaaaaaaaaaaaaaaaaaaaaaaaaaaaaaaaaaaaaaaaaaaaaaaaaaaaaaaaaaaaaa

SEQ ID NO: 12609 - RNA, 5785 nt, synthetic construct
  source 1..5785: mol_type = other RNA
aggaaataagagagaaaagaagagtaagaagaaatataagagccaccatggcccctaagaagaagcgtaaagtgagccggatggaacgcctcgtctacgaggtgcggcagaagtgcagaaacatcgaggacatctgcatctcctgcggatctctgaacgtgaccctggagcacccactgttcatcggcggcatgtgccagaactgtaaaaactgttttctggagtgtgcctatcaatacgacgatgacggctaccagagctactgcaccatctgttgcggcggaagagaggtgctgatgtgtggaaataacaactgctgccggtgcttctgcgtggaatgcgtggacctgctggtgggccccggcgccgcccaggccgctattaaggaagatccttggaactgctacatgtgcggccacaagggcacatacggcctgctgagacggagagaggactggcctagcagactgcagatgttcttcgccaataaccacgaccaggagttcgacccccctaaggtgtaccctcccgtccccgccgagaagagaaagcccatccgggtcctgagcctgttcgatggcatcgccaccggtctgctggtgctgaaggacctgggcatccaggtggataggtacattgcctccgaggtgtgcgaggactccatcaccgtgggaatggtgcgtcatcagggcaagatcatgtacgtgggcgacgtgcggagcgtgacacagaagcatatccaggagtggggccctttcgacctggtgatcggcggcagcccttgcaatgacctgagcatcgtgaacccagcccggaagggcctgtacgagggaaccggcagactgttcttcgagttttacagactgctgcacgacgcccggcctaaggaaggcgacgaccggcccttcttttggctgttcgagaatgtggtggccatgggagtcagcgacaagcgggatattagccggttcctggagagcaaccccgtgatgatcgatgccaaggaagtgagcgccgcccaccgggccagatacttctggggcaatctgcctggcatgaacagacccctggccagcaccgtgaacgacaagctggagctgcaggagtgcctggagcacggccggatcgccaagttcagcaaggtgagaaccatcaccacccgaagcaacagcatcaaacaaggcaaggaccagcactttcctgtgttcatgaacgagaaggaggacatcctgtggtgtaccgagatggagagagtgttcgggttcccagtccactacacagatgtcagcaacatgtctagactggccagacagagactgctgggaagaagctggtccgtccctgtgatcagacacctgttcgcccctctgaaggagtacttcgcctgcgtgagcagcggcaacagcaacgccaacagccggggccccagcttctctagcggcctggtgccactgtccctgagagggagccacatgggccccatggagatctacaaaaccgtgagcgcctggaagcggcagcctgtgcgcgtgctgagcctgtttcggaatatcgataaagtcctgaaaagcctgggattcctggagagcggctctggctccggcggtggcaccctgaagtacgtggaggatgtgacaaacgtggtcagacgggatgtggagaagtggggccccttcgatctggtgtacggcagcacccaacccctgggcagctcttgtgaccggtgccctggctggtacatgtttcagttccaccggatcctgcagtacgccctgccgagacaggagtcccagcggccattcttttggattttcatggacaacttgctgctgaccgaggatgaccaggaaactaccactcggttcctgcagaccgaagccgtgaccctgcaggacgtgagaggccgggactaccagaacgccatgcgggtgtggtccaacatccctggactgaaaagcaagcacgcacctctgacccctaaagaagaggagtacctgcaggcccaggtgcggagcagaagcaagctggacgcccctaaggtggatctgctggtgaagaattgcctcctgcccctgagagagtacttcaagtatttcagccagaatagtctgcccctgggaggcagcggcggcggcatggtgttcgaggacgtggccgtgtacttcagcagggaggagtggggcctgctggacagcgcccagagggccctgtacaggcaggtgatgctggagaacttcgccctggtggccagcctgggcctgagcgccagcaggcccaggatcatcctgcagctggagaggggcgaggagccctgggtgctgagcggcctggacgtggccctggccagggacgcccagaggaggcccagccccgcccagggcggcccaagcagcggcgcccctcctcccagcggcggcagcccagccggctccccaacctctaccgaggagggcacctctgagtccgccacccccgagagcggccctggcacctccaccgagcccagcgagggcagcgcacccggcagccctgccggcagccccacctccacagaggagggaaccagcaccgagcccagcgaaggcagcgccccaggcaccagcaccgagcctagtgagcaggagattaaacggatcaacaagatcagaagaagacttgtgaaagacagcaacaccaagaaggccggcaagacaggccccatgaaaaccctgctggttagagtgatgacacccgatctgagagagcggctggaaaacctgagaaagaagcctgaaaatatcccccagcccatcagcaatacatctagagccaacctgaataagctgctgaccgattacaccgaaatgaagaaggcgatcctgcatgtgtactgggaagagttccagaaggaccctgtgggcctgatgagccgggtggcccagcctgccagcaagaagatcgatcagaacaagctgaaacctgagatggacgagaagggcaacctgaccaccgccggctttgcctgctctcagtgtggccagcccctgttcgtgtacaagctggagcaggtgtctgagaagggcaaggcttacaccaactacttcggacggtgcaatgtggccgagcacgaaaagctgatcctgctggcccagctgaagcccgagaaggatagcgacgaagccgtgacatatagcctgggaaagtttgggcagagggccctggatttctacagcattcatgtgaccaaggagtccacccaccccgtgaagcccctggcccagatcgccggaaacagatacgcctccggacctgtgggaaaggccctgagcgacgcatgtatgggcacaatcgcctccttcctgtctaagtaccaggacatcatcatcgaacaccagaaggtggtgaagggcaaccagaagagactggagagcctgcgggagctggccggcaaggaaaacctggaataccctagcgtgaccctgccacctcagcctcacaccaaggagggcgttgatgcctacaacgaagtgatcgcccgggtgcgaatgtgggtgaacctgaacctgtggcagaagctgaagctaagcagagatgatgccaagcctctgctgagactgaagggattcccttcctttcctctggtcgagagacaggccaacgaagtggactggtgggacatggtgtgtaacgtgaagaagctgatcaacgagaaaaaggaggatggcaaggtgttttggcagaatctggctggctacaagagacaggaagccctgagaccatacctgagcagcgaggaagatcggaagaagggaaagaaattcgctcggtaccagctgggcgacctgctgctgcacctggaaaagaagcacggcgaggactggggaaaggtgtacgacgaggcctgggagcggattgacaagaaagtggaaggcctgagcaagcacatcaagctggaagaggaacggagaagcgaggacgcccagagcaaggccgccctgaccgactggctgcgggctaaggccagcttcgtgatcgagggcctgaaggaggccgacaaggacgagttctgcagatgcgagctgaagctgcagaagtggtacggggacctgcggggaaagcccttcgccatcgaagccgagaacagcatcctggacatcagcggcttcagcaagcagtacaactgtgccttcatctggcagaaggacggcgtgaagaagctgaacctgtacctgatcatcaactacttcaagggcggcaagctgcggttcaagaagatcaaacctgaagccttcgaagccaacagattctacaccgtgatcaacaaaaagagcggcgagatcgtgcccatggaggtgaacttcaacttcgacgaccccaacctgatcatcctgcctctggcctttggcaagagacagggcagagaattcatctggaacgacctgctgtccctggaaaccggcagcctgaagctggccaacggaagagtgatcgagaagacactgtacaacagaagaacccggcaggatgagcctgccctgttcgtggccctgaccttcgagcggcgggaggtcctggactcctccaatatcaaaccaatgaacctgatcggcgtggcaagaggcgaaaacatccccgccgtgatcgccctgaccgaccccgagggctgcccactgagccggtttaaggatagcctgggaaacccaacccacatcctgagaatcggcgagagctataaggagaagcagcggaccatccaggccaagaaggaggtggagcagcggagagccggcggctacagccggaagtacgccagcaaagccaagaatctggcagacgatatggtgagaaacaccgctagagatctgctgtactacgccgtgacccaggatgccatgctgatcttcgccaacctgagccggggcttcggccggcagggcaagcggaccttcatggccgagagacagtacacacggatggaggactggctgaccgccaagctggcctacgagggcctgagcaagacctacctgtccaagacactggcccagtacacctccaagacatgcagcaactgtgggtttaccatcaccagcgccgactacgacagggtgctggagaagctgaagaagacagcaacaggctggatgaccacaattaacggcaaggagctgaaggtggagggccagattacctactacaacagatacaagagacagaacgtagtcaaggacctgtccgtcgagctggatagactgagcgaagaatctgtgaacaacgacatctcctcctggacaaagggcagaagcggagaagctctgagcctcctgaagaaaagattctcccatagacccgtgcaggagaagttcgtgtgcctgaactgcggcttcgagacacacgcagccgagcaagccgccctgaacatcgccagatcctggctgttcctgcggagccaggagtacaagaaataccagacaaacaagacaaccggcaacaccgataagagagccttcgtcgagacctggcagtccttttaccggaagaagcttaaggaggtgtggaaacctgccgtgcggtctggcggatctggcggaggctccaccagccccaagaaaaagagaaaagtctaagctgccttctgcggggcttgccttctggccatgcccttcttctctcccttgcacctgtacctcttggtctttgaataaagcctgagtaggaaggctagcaaaaaaaaaaaaaaaaaaaaaaaaaaaaaaaaaaaaaaaaaaaaaaaaaaaaaaaaaaaaaaaaaaaaaaaaaaaaaaaa

SEQ ID NO: 12610 - RNA, 5785 nt, synthetic construct
  source 1..5785: mol_type = other RNA
aggaaataagagagaaaagaagagtaagaagaaatataagagccaccatggcccctaagaagaagcgtaaagtgagccggatggaacgcctcgtctacgaggtgcggcagaagtgcagaaacatcgaggacatctgcatctcctgcggatctctgaacgtgaccctggagcacccactgttcatcggcggcatgtgccagaactgtaaaaactgttttctggagtgtgcctatcaatacgacgatgacggctaccagagctactgcaccatctgttgcggcggaagagaggtgctgatgtgtggaaataacaactgctgccggtgcttctgcgtggaatgcgtggacctgctggtgggccccggcgccgcccaggccgctattaaggaagatccttggaactgctacatgtgcggccacaagggcacatacggcctgctgagacggagagaggactggcctagcagactgcagatgttcttcgccaataaccacgaccaggagttcgacccccctaaggtgtaccctcccgtccccgccgagaagagaaagcccatccgggtcctgagcctgttcgatggcatcgccaccggtctgctggtgctgaaggacctgggcatccaggtggataggtacattgcctccgaggtgtgcgaggactccatcaccgtgggaatggtgcgtcatcagggcaagatcatgtacgtgggcgacgtgcggagcgtgacacagaagcatatccaggagtggggccctttcgacctggtgatcggcggcagcccttgcaatgacctgagcatcgtgaacccagcccggaagggcctgtacgagggaaccggcagactgttcttcgagttttacagactgctgcacgacgcccggcctaaggaaggcgacgaccggcccttcttttggctgttcgagaatgtggtggccatgggagtcagcgacaagcgggatattagccggttcctggagagcaaccccgtgatgatcgatgccaaggaagtgagcgccgcccaccgggccagatacttctggggcaatctgcctggcatgaacagacccctggccagcaccgtgaacgacaagctggagctgcaggagtgcctggagcacggccggatcgccaagttcagcaaggtgagaaccatcaccacccgaagcaacagcatcaaacaaggcaaggaccagcactttcctgtgttcatgaacgagaaggaggacatcctgtggtgtaccgagatggagagagtgttcgggttcccagtccactacacagatgtcagcaacatgtctagactggccagacagagactgctgggaagaagctggtccgtccctgtgatcagacacctgttcgcccctctgaaggagtacttcgcctgcgtgagcagcggcaacagcaacgccaacagccggggccccagcttctctagcggcctggtgccactgtccctgagagggagccacatgggccccatggagatctacaaaaccgtgagcgcctggaagcggcagcctgtgcgcgtgctgagcctgtttcggaatatcgataaagtcctgaaaagcctgggattcctggagagcggctctggctccggcggtggcaccctgaagtacgtggaggatgtgacaaacgtggtcagacgggatgtggagaagtggggccccttcgatctggtgtacggcagcacccaacccctgggcagctcttgtgaccggtgccctggctggtacatgtttcagttccaccggatcctgcagtacgccctgccgagacaggagtcccagcggccattcttttggattttcatggacaacttgctgctgaccgaggatgaccaggaaactaccactcggttcctgcagaccgaagccgtgaccctgcaggacgtgagaggccgggactaccagaacgccatgcgggtgtggtccaacatccctggactgaaaagcaagcacgcacctctgacccctaaagaagaggagtacctgcaggcccaggtgcggagcagaagcaagctggacgcccctaaggtggatctgctggtgaagaattgcctcctgcccctgagagagtacttcaagtatttcagccagaatagtctgcccctgggaggcagcggcggcggcagcatcaccttcaaggacgtggtggtggacttcacccaggaggagtggtgcctgctggaccccagccagaaggagctgtacagggaggtgatgctggagaacgtgcagaacctgttcttcgtggaggccgagaccaacttcgaggtgaaggagatgagcaccaagatgaggctgttcgtggagggcagcaacagccccaggggcatgaagaggaacccctgcgacttcctgttcagggagatcggcggcccaagcagcggcgcccctcctcccagcggcggcagcccagccggctccccaacctctaccgaggagggcacctctgagtccgccacccccgagagcggccctggcacctccaccgagcccagcgagggcagcgcacccggcagccctgccggcagccccacctccacagaggagggaaccagcaccgagcccagcgaaggcagcgccccaggcaccagcaccgagcctagtgagcaggagattaaacggatcaacaagatcagaagaagacttgtgaaagacagcaacaccaagaaggccggcaagacaggccccatgaaaaccctgctggttagagtgatgacacccgatctgagagagcggctggaaaacctgagaaagaagcctgaaaatatcccccagcccatcagcaatacatctagagccaacctgaataagctgctgaccgattacaccgaaatgaagaaggcgatcctgcatgtgtactgggaagagttccagaaggaccctgtgggcctgatgagccgggtggcccagcctgccagcaagaagatcgatcagaacaagctgaaacctgagatggacgagaagggcaacctgaccaccgccggctttgcctgctctcagtgtggccagcccctgttcgtgtacaagctggagcaggtgtctgagaagggcaaggcttacaccaactacttcggacggtgcaatgtggccgagcacgaaaagctgatcctgctggcccagctgaagcccgagaaggatagcgacgaagccgtgacatatagcctgggaaagtttgggcagagggccctggatttctacagcattcatgtgaccaaggagtccacccaccccgtgaagcccctggcccagatcgccggaaacagatacgcctccggacctgtgggaaaggccctgagcgacgcatgtatgggcacaatcgcctccttcctgtctaagtaccaggacatcatcatcgaacaccagaaggtggtgaagggcaaccagaagagactggagagcctgcgggagctggccggcaaggaaaacctggaataccctagcgtgaccctgccacctcagcctcacaccaaggagggcgttgatgcctacaacgaagtgatcgcccgggtgcgaatgtgggtgaacctgaacctgtggcagaagctgaagctaagcagagatgatgccaagcctctgctgagactgaagggattcccttcctttcctctggtcgagagacaggccaacgaagtggactggtgggacatggtgtgtaacgtgaagaagctgatcaacgagaaaaaggaggatggcaaggtgttttggcagaatctggctggctacaagagacaggaagccctgagaccatacctgagcagcgaggaagatcggaagaagggaaagaaattcgctcggtaccagctgggcgacctgctgctgcacctggaaaagaagcacggcgaggactggggaaaggtgtacgacgaggcctgggagcggattgacaagaaagtggaaggcctgagcaagcacatcaagctggaagaggaacggagaagcgaggacgcccagagcaaggccgccctgaccgactggctgcgggctaaggccagcttcgtgatcgagggcctgaaggaggccgacaaggacgagttctgcagatgcgagctgaagctgcagaagtggtacggggacctgcggggaaagcccttcgccatcgaagccgagaacagcatcctggacatcagcggcttcagcaagcagtacaactgtgccttcatctggcagaaggacggcgtgaagaagctgaacctgtacctgatcatcaactacttcaagggcggcaagctgcggttcaagaagatcaaacctgaagccttcgaagccaacagattctacaccgtgatcaacaaaaagagcggcgagatcgtgcccatggaggtgaacttcaacttcgacgaccccaacctgatcatcctgcctctggcctttggcaagagacagggcagagaattcatctggaacgacctgctgtccctggaaaccggcagcctgaagctggccaacggaagagtgatcgagaagacactgtacaacagaagaacccggcaggatgagcctgccctgttcgtggccctgaccttcgagcggcgggaggtcctggactcctccaatatcaaaccaatgaacctgatcggcgtggcaagaggcgaaaacatccccgccgtgatcgccctgaccgaccccgagggctgcccactgagccggtttaaggatagcctgggaaacccaacccacatcctgagaatcggcgagagctataaggagaagcagcggaccatccaggccaagaaggaggtggagcagcggagagccggcggctacagccggaagtacgccagcaaagccaagaatctggcagacgatatggtgagaaacaccgctagagatctgctgtactacgccgtgacccaggatgccatgctgatcttcgccaacctgagccggggcttcggccggcagggcaagcggaccttcatggccgagagacagtacacacggatggaggactggctgaccgccaagctggcctacgagggcctgagcaagacctacctgtccaagacactggcccagtacacctccaagacatgcagcaactgtgggtttaccatcaccagcgccgactacgacagggtgctggagaagctgaagaagacagcaacaggctggatgaccacaattaacggcaaggagctgaaggtggagggccagattacctactacaacagatacaagagacagaacgtagtcaaggacctgtccgtcgagctggatagactgagcgaagaatctgtgaacaacgacatctcctcctggacaaagggcagaagcggagaagctctgagcctcctgaagaaaagattctcccatagacccgtgcaggagaagttcgtgtgcctgaactgcggcttcgagacacacgcagccgagcaagccgccctgaacatcgccagatcctggctgttcctgcggagccaggagtacaagaaataccagacaaacaagacaaccggcaacaccgataagagagccttcgtcgagacctggcagtccttttaccggaagaagcttaaggaggtgtggaaacctgccgtgcggtctggcggatctggcggaggctccaccagccccaagaaaaagagaaaagtctaagctgccttctgcggggcttgccttctggccatgcccttcttctctcccttgcacctgtacctcttggtctttgaataaagcctgagtaggaaggctagcaaaaaaaaaaaaaaaaaaaaaaaaaaaaaaaaaaaaaaaaaaaaaaaaaaaaaaaaaaaaaaaaaaaaaaaaaaaaaaaa

SEQ ID NO: 12611 - RNA, 5785 nt, synthetic construct
  source 1..5785: mol_type = other RNA
aggaaataagagagaaaagaagagtaagaagaaatataagagccaccatggcccctaagaagaagcgtaaagtgagccggatggaacgcctcgtctacgaggtgcggcagaagtgcagaaacatcgaggacatctgcatctcctgcggatctctgaacgtgaccctggagcacccactgttcatcggcggcatgtgccagaactgtaaaaactgttttctggagtgtgcctatcaatacgacgatgacggctaccagagctactgcaccatctgttgcggcggaagagaggtgctgatgtgtggaaataacaactgctgccggtgcttctgcgtggaatgcgtggacctgctggtgggccccggcgccgcccaggccgctattaaggaagatccttggaactgctacatgtgcggccacaagggcacatacggcctgctgagacggagagaggactggcctagcagactgcagatgttcttcgccaataaccacgaccaggagttcgacccccctaaggtgtaccctcccgtccccgccgagaagagaaagcccatccgggtcctgagcctgttcgatggcatcgccaccggtctgctggtgctgaaggacctgggcatccaggtggataggtacattgcctccgaggtgtgcgaggactccatcaccgtgggaatggtgcgtcatcagggcaagatcatgtacgtgggcgacgtgcggagcgtgacacagaagcatatccaggagtggggccctttcgacctggtgatcggcggcagcccttgcaatgacctgagcatcgtgaacccagcccggaagggcctgtacgagggaaccggcagactgttcttcgagttttacagactgctgcacgacgcccggcctaaggaaggcgacgaccggcccttcttttggctgttcgagaatgtggtggccatgggagtcagcgacaagcgggatattagccggttcctggagagcaaccccgtgatgatcgatgccaaggaagtgagcgccgcccaccgggccagatacttctggggcaatctgcctggcatgaacagacccctggccagcaccgtgaacgacaagctggagctgcaggagtgcctggagcacggccggatcgccaagttcagcaaggtgagaaccatcaccacccgaagcaacagcatcaaacaaggcaaggaccagcactttcctgtgttcatgaacgagaaggaggacatcctgtggtgtaccgagatggagagagtgttcgggttcccagtccactacacagatgtcagcaacatgtctagactggccagacagagactgctgggaagaagctggtccgtccctgtgatcagacacctgttcgcccctctgaaggagtacttcgcctgcgtgagcagcggcaacagcaacgccaacagccggggccccagcttctctagcggcctggtgccactgtccctgagagggagccacatgggccccatggagatctacaaaaccgtgagcgcctggaagcggcagcctgtgcgcgtgctgagcctgtttcggaatatcgataaagtcctgaaaagcctgggattcctggagagcggctctggctccggcggtggcaccctgaagtacgtggaggatgtgacaaacgtggtcagacgggatgtggagaagtggggccccttcgatctggtgtacggcagcacccaacccctgggcagctcttgtgaccggtgccctggctggtacatgtttcagttccaccggatcctgcagtacgccctgccgagacaggagtcccagcggccattcttttggattttcatggacaacttgctgctgaccgaggatgaccaggaaactaccactcggttcctgcagaccgaagccgtgaccctgcaggacgtgagaggccgggactaccagaacgccatgcgggtgtggtccaacatccctggactgaaaagcaagcacgcacctctgacccctaaagaagaggagtacctgcaggcccaggtgcggagcagaagcaagctggacgcccctaaggtggatctgctggtgaagaattgcctcctgcccctgagagagtacttcaagtatttcagccagaatagtctgcccctgggaggcagcggcggcggccagagcctggtgaccttcggcgacgtggccgtggacttcagcagggaggagtgggagtggctgaacagcgcccagaggaccctgcacagggacgtgatgctggagaactacaggaacctggtgagcctgggcctgtgcgtgagcaagcccgacatgatcagcagcctggagcagaggaaggagccctggatgctgaagaggaagctgaccaggggcaggtgccccgacctgaagaccatgcagggcggcccaagcagcggcgcccctcctcccagcggcggcagcccagccggctccccaacctctaccgaggagggcacctctgagtccgccacccccgagagcggccctggcacctccaccgagcccagcgagggcagcgcacccggcagccctgccggcagccccacctccacagaggagggaaccagcaccgagcccagcgaaggcagcgccccaggcaccagcaccgagcctagtgagcaggagattaaacggatcaacaagatcagaagaagacttgtgaaagacagcaacaccaagaaggccggcaagacaggccccatgaaaaccctgctggttagagtgatgacacccgatctgagagagcggctggaaaacctgagaaagaagcctgaaaatatcccccagcccatcagcaatacatctagagccaacctgaataagctgctgaccgattacaccgaaatgaagaaggcgatcctgcatgtgtactgggaagagttccagaaggaccctgtgggcctgatgagccgggtggcccagcctgccagcaagaagatcgatcagaacaagctgaaacctgagatggacgagaagggcaacctgaccaccgccggctttgcctgctctcagtgtggccagcccctgttcgtgtacaagctggagcaggtgtctgagaagggcaaggcttacaccaactacttcggacggtgcaatgtggccgagcacgaaaagctgatcctgctggcccagctgaagcccgagaaggatagcgacgaagccgtgacatatagcctgggaaagtttgggcagagggccctggatttctacagcattcatgtgaccaaggagtccacccaccccgtgaagcccctggcccagatcgccggaaacagatacgcctccggacctgtgggaaaggccctgagcgacgcatgtatgggcacaatcgcctccttcctgtctaagtaccaggacatcatcatcgaacaccagaaggtggtgaagggcaaccagaagagactggagagcctgcgggagctggccggcaaggaaaacctggaataccctagcgtgaccctgccacctcagcctcacaccaaggagggcgttgatgcctacaacgaagtgatcgcccgggtgcgaatgtgggtgaacctgaacctgtggcagaagctgaagctaagcagagatgatgccaagcctctgctgagactgaagggattcccttcctttcctctggtcgagagacaggccaacgaagtggactggtgggacatggtgtgtaacgtgaagaagctgatcaacgagaaaaaggaggatggcaaggtgttttggcagaatctggctggctacaagagacaggaagccctgagaccatacctgagcagcgaggaagatcggaagaagggaaagaaattcgctcggtaccagctgggcgacctgctgctgcacctggaaaagaagcacggcgaggactggggaaaggtgtacgacgaggcctgggagcggattgacaagaaagtggaaggcctgagcaagcacatcaagctggaagaggaacggagaagcgaggacgcccagagcaaggccgccctgaccgactggctgcgggctaaggccagcttcgtgatcgagggcctgaaggaggccgacaaggacgagttctgcagatgcgagctgaagctgcagaagtggtacggggacctgcggggaaagcccttcgccatcgaagccgagaacagcatcctggacatcagcggcttcagcaagcagtacaactgtgccttcatctggcagaaggacggcgtgaagaagctgaacctgtacctgatcatcaactacttcaagggcggcaagctgcggttcaagaagatcaaacctgaagccttcgaagccaacagattctacaccgtgatcaacaaaaagagcggcgagatcgtgcccatggaggtgaacttcaacttcgacgaccccaacctgatcatcctgcctctggcctttggcaagagacagggcagagaattcatctggaacgacctgctgtccctggaaaccggcagcctgaagctggccaacggaagagtgatcgagaagacactgtacaacagaagaacccggcaggatgagcctgccctgttcgtggccctgaccttcgagcggcgggaggtcctggactcctccaatatcaaaccaatgaacctgatcggcgtggcaagaggcgaaaacatccccgccgtgatcgccctgaccgaccccgagggctgcccactgagccggtttaaggatagcctgggaaacccaacccacatcctgagaatcggcgagagctataaggagaagcagcggaccatccaggccaagaaggaggtggagcagcggagagccggcggctacagccggaagtacgccagcaaagccaagaatctggcagacgatatggtgagaaacaccgctagagatctgctgtactacgccgtgacccaggatgccatgctgatcttcgccaacctgagccggggcttcggccggcagggcaagcggaccttcatggccgagagacagtacacacggatggaggactggctgaccgccaagctggcctacgagggcctgagcaagacctacctgtccaagacactggcccagtacacctccaagacatgcagcaactgtgggtttaccatcaccagcgccgactacgacagggtgctggagaagctgaagaagacagcaacaggctggatgaccacaattaacggcaaggagctgaaggtggagggccagattacctactacaacagatacaagagacagaacgtagtcaaggacctgtccgtcgagctggatagactgagcgaagaatctgtgaacaacgacatctcctcctggacaaagggcagaagcggagaagctctgagcctcctgaagaaaagattctcccatagacccgtgcaggagaagttcgtgtgcctgaactgcggcttcgagacacacgcagccgagcaagccgccctgaacatcgccagatcctggctgttcctgcggagccaggagtacaagaaataccagacaaacaagacaaccggcaacaccgataagagagccttcgtcgagacctggcagtccttttaccggaagaagcttaaggaggtgtggaaacctgccgtgcggtctggcggatctggcggaggctccaccagccccaagaaaaagagaaaagtctaagctgccttctgcggggcttgccttctggccatgcccttcttctctcccttgcacctgtacctcttggtctttgaataaagcctgagtaggaaggctagcaaaaaaaaaaaaaaaaaaaaaaaaaaaaaaaaaaaaaaaaaaaaaaaaaaaaaaaaaaaaaaaaaaaaaaaaaaaaaaaa

SEQ ID NO: 12612 - RNA, 5785 nt, synthetic construct
  source 1..5785: mol_type = other RNA
aggaaataagagagaaaagaagagtaagaagaaatataagagccaccatggcccctaagaagaagcgtaaagtgagccggatggaacgcctcgtctacgaggtgcggcagaagtgcagaaacatcgaggacatctgcatctcctgcggatctctgaacgtgaccctggagcacccactgttcatcggcggcatgtgccagaactgtaaaaactgttttctggagtgtgcctatcaatacgacgatgacggctaccagagctactgcaccatctgttgcggcggaagagaggtgctgatgtgtggaaataacaactgctgccggtgcttctgcgtggaatgcgtggacctgctggtgggccccggcgccgcccaggccgctattaaggaagatccttggaactgctacatgtgcggccacaagggcacatacggcctgctgagacggagagaggactggcctagcagactgcagatgttcttcgccaataaccacgaccaggagttcgacccccctaaggtgtaccctcccgtccccgccgagaagagaaagcccatccgggtcctgagcctgttcgatggcatcgccaccggtctgctggtgctgaaggacctgggcatccaggtggataggtacattgcctccgaggtgtgcgaggactccatcaccgtgggaatggtgcgtcatcagggcaagatcatgtacgtgggcgacgtgcggagcgtgacacagaagcatatccaggagtggggccctttcgacctggtgatcggcggcagcccttgcaatgacctgagcatcgtgaacccagcccggaagggcctgtacgagggaaccggcagactgttcttcgagttttacagactgctgcacgacgcccggcctaaggaaggcgacgaccggcccttcttttggctgttcgagaatgtggtggccatgggagtcagcgacaagcgggatattagccggttcctggagagcaaccccgtgatgatcgatgccaaggaagtgagcgccgcccaccgggccagatacttctggggcaatctgcctggcatgaacagacccctggccagcaccgtgaacgacaagctggagctgcaggagtgcctggagcacggccggatcgccaagttcagcaaggtgagaaccatcaccacccgaagcaacagcatcaaacaaggcaaggaccagcactttcctgtgttcatgaacgagaaggaggacatcctgtggtgtaccgagatggagagagtgttcgggttcccagtccactacacagatgtcagcaacatgtctagactggccagacagagactgctgggaagaagctggtccgtccctgtgatcagacacctgttcgcccctctgaaggagtacttcgcctgcgtgagcagcggcaacagcaacgccaacagccggggccccagcttctctagcggcctggtgccactgtccctgagagggagccacatgggccccatggagatctacaaaaccgtgagcgcctggaagcggcagcctgtgcgcgtgctgagcctgtttcggaatatcgataaagtcctgaaaagcctgggattcctggagagcggctctggctccggcggtggcaccctgaagtacgtggaggatgtgacaaacgtggtcagacgggatgtggagaagtggggccccttcgatctggtgtacggcagcacccaacccctgggcagctcttgtgaccggtgccctggctggtacatgtttcagttccaccggatcctgcagtacgccctgccgagacaggagtcccagcggccattcttttggattttcatggacaacttgctgctgaccgaggatgaccaggaaactaccactcggttcctgcagaccgaagccgtgaccctgcaggacgtgagaggccgggactaccagaacgccatgcgggtgtggtccaacatccctggactgaaaagcaagcacgcacctctgacccctaaagaagaggagtacctgcaggcccaggtgcggagcagaagcaagctggacgcccctaaggtggatctgctggtgaagaattgcctcctgcccctgagagagtacttcaagtatttcagccagaatagtctgcccctgggaggcagcggcggcggcccccagaagagcgtgaccttcgaggacgtggccgtgtacttcacccccaccgagtgggacggcctgagccccgcccagagggccctgtacagggacgtgatgctggagaactacggcaacgtggccagcctgggcttccccctgatcaagcccgccgtgatcctgcagctggagggcggcggcgagctgggcggccccagccccctggccgccgagaccggcaccgacccccccggcctgtggggcggcccaagcagcggcgcccctcctcccagcggcggcagcccagccggctccccaacctctaccgaggagggcacctctgagtccgccacccccgagagcggccctggcacctccaccgagcccagcgagggcagcgcacccggcagccctgccggcagccccacctccacagaggagggaaccagcaccgagcccagcgaaggcagcgccccaggcaccagcaccgagcctagtgagcaggagattaaacggatcaacaagatcagaagaagacttgtgaaagacagcaacaccaagaaggccggcaagacaggccccatgaaaaccctgctggttagagtgatgacacccgatctgagagagcggctggaaaacctgagaaagaagcctgaaaatatcccccagcccatcagcaatacatctagagccaacctgaataagctgctgaccgattacaccgaaatgaagaaggcgatcctgcatgtgtactgggaagagttccagaaggaccctgtgggcctgatgagccgggtggcccagcctgccagcaagaagatcgatcagaacaagctgaaacctgagatggacgagaagggcaacctgaccaccgccggctttgcctgctctcagtgtggccagcccctgttcgtgtacaagctggagcaggtgtctgagaagggcaaggcttacaccaactacttcggacggtgcaatgtggccgagcacgaaaagctgatcctgctggcccagctgaagcccgagaaggatagcgacgaagccgtgacatatagcctgggaaagtttgggcagagggccctggatttctacagcattcatgtgaccaaggagtccacccaccccgtgaagcccctggcccagatcgccggaaacagatacgcctccggacctgtgggaaaggccctgagcgacgcatgtatgggcacaatcgcctccttcctgtctaagtaccaggacatcatcatcgaacaccagaaggtggtgaagggcaaccagaagagactggagagcctgcgggagctggccggcaaggaaaacctggaataccctagcgtgaccctgccacctcagcctcacaccaaggagggcgttgatgcctacaacgaagtgatcgcccgggtgcgaatgtgggtgaacctgaacctgtggcagaagctgaagctaagcagagatgatgccaagcctctgctgagactgaagggattcccttcctttcctctggtcgagagacaggccaacgaagtggactggtgggacatggtgtgtaacgtgaagaagctgatcaacgagaaaaaggaggatggcaaggtgttttggcagaatctggctggctacaagagacaggaagccctgagaccatacctgagcagcgaggaagatcggaagaagggaaagaaattcgctcggtaccagctgggcgacctgctgctgcacctggaaaagaagcacggcgaggactggggaaaggtgtacgacgaggcctgggagcggattgacaagaaagtggaaggcctgagcaagcacatcaagctggaagaggaacggagaagcgaggacgcccagagcaaggccgccctgaccgactggctgcgggctaaggccagcttcgtgatcgagggcctgaaggaggccgacaaggacgagttctgcagatgcgagctgaagctgcagaagtggtacggggacctgcggggaaagcccttcgccatcgaagccgagaacagcatcctggacatcagcggcttcagcaagcagtacaactgtgccttcatctggcagaaggacggcgtgaagaagctgaacctgtacctgatcatcaactacttcaagggcggcaagctgcggttcaagaagatcaaacctgaagccttcgaagccaacagattctacaccgtgatcaacaaaaagagcggcgagatcgtgcccatggaggtgaacttcaacttcgacgaccccaacctgatcatcctgcctctggcctttggcaagagacagggcagagaattcatctggaacgacctgctgtccctggaaaccggcagcctgaagctggccaacggaagagtgatcgagaagacactgtacaacagaagaacccggcaggatgagcctgccctgttcgtggccctgaccttcgagcggcgggaggtcctggactcctccaatatcaaaccaatgaacctgatcggcgtggcaagaggcgaaaacatccccgccgtgatcgccctgaccgaccccgagggctgcccactgagccggtttaaggatagcctgggaaacccaacccacatcctgagaatcggcgagagctataaggagaagcagcggaccatccaggccaagaaggaggtggagcagcggagagccggcggctacagccggaagtacgccagcaaagccaagaatctggcagacgatatggtgagaaacaccgctagagatctgctgtactacgccgtgacccaggatgccatgctgatcttcgccaacctgagccggggcttcggccggcagggcaagcggaccttcatggccgagagacagtacacacggatggaggactggctgaccgccaagctggcctacgagggcctgagcaagacctacctgtccaagacactggcccagtacacctccaagacatgcagcaactgtgggtttaccatcaccagcgccgactacgacagggtgctggagaagctgaagaagacagcaacaggctggatgaccacaattaacggcaaggagctgaaggtggagggccagattacctactacaacagatacaagagacagaacgtagtcaaggacctgtccgtcgagctggatagactgagcgaagaatctgtgaacaacgacatctcctcctggacaaagggcagaagcggagaagctctgagcctcctgaagaaaagattctcccatagacccgtgcaggagaagttcgtgtgcctgaactgcggcttcgagacacacgcagccgagcaagccgccctgaacatcgccagatcctggctgttcctgcggagccaggagtacaagaaataccagacaaacaagacaaccggcaacaccgataagagagccttcgtcgagacctggcagtccttttaccggaagaagcttaaggaggtgtggaaacctgccgtgcggtctggcggatctggcggaggctccaccagccccaagaaaaagagaaaagtctaagctgccttctgcggggcttgccttctggccatgcccttcttctctcccttgcacctgtacctcttggtctttgaataaagcctgagtaggaaggctagcaaaaaaaaaaaaaaaaaaaaaaaaaaaaaaaaaaaaaaaaaaaaaaaaaaaaaaaaaaaaaaaaaaaaaaaaaaaaaaaa

SEQ ID NO: 12613 - RNA, 5785 nt, synthetic construct
  source 1..5785: mol_type = other RNA
aggaaataagagagaaaagaagagtaagaagaaatataagagccaccatggcccctaagaagaagcgtaaagtgagccggatggaacgcctcgtctacgaggtgcggcagaagtgcagaaacatcgaggacatctgcatctcctgcggatctctgaacgtgaccctggagcacccactgttcatcggcggcatgtgccagaactgtaaaaactgttttctggagtgtgcctatcaatacgacgatgacggctaccagagctactgcaccatctgttgcggcggaagagaggtgctgatgtgtggaaataacaactgctgccggtgcttctgcgtggaatgcgtggacctgctggtgggccccggcgccgcccaggccgctattaaggaagatccttggaactgctacatgtgcggccacaagggcacatacggcctgctgagacggagagaggactggcctagcagactgcagatgttcttcgccaataaccacgaccaggagttcgacccccctaaggtgtaccctcccgtccccgccgagaagagaaagcccatccgggtcctgagcctgttcgatggcatcgccaccggtctgctggtgctgaaggacctgggcatccaggtggataggtacattgcctccgaggtgtgcgaggactccatcaccgtgggaatggtgcgtcatcagggcaagatcatgtacgtgggcgacgtgcggagcgtgacacagaagcatatccaggagtggggccctttcgacctggtgatcggcggcagcccttgcaatgacctgagcatcgtgaacccagcccggaagggcctgtacgagggaaccggcagactgttcttcgagttttacagactgctgcacgacgcccggcctaaggaaggcgacgaccggcccttcttttggctgttcgagaatgtggtggccatgggagtcagcgacaagcgggatattagccggttcctggagagcaaccccgtgatgatcgatgccaaggaagtgagcgccgcccaccgggccagatacttctggggcaatctgcctggcatgaacagacccctggccagcaccgtgaacgacaagctggagctgcaggagtgcctggagcacggccggatcgccaagttcagcaaggtgagaaccatcaccacccgaagcaacagcatcaaacaaggcaaggaccagcactttcctgtgttcatgaacgagaaggaggacatcctgtggtgtaccgagatggagagagtgttcgggttcccagtccactacacagatgtcagcaacatgtctagactggccagacagagactgctgggaagaagctggtccgtccctgtgatcagacacctgttcgcccctctgaaggagtacttcgcctgcgtgagcagcggcaacagcaacgccaacagccggggccccagcttctctagcggcctggtgccactgtccctgagagggagccacatgggccccatggagatctacaaaaccgtgagcgcctggaagcggcagcctgtgcgcgtgctgagcctgtttcggaatatcgataaagtcctgaaaagcctgggattcctggagagcggctctggctccggcggtggcaccctgaagtacgtggaggatgtgacaaacgtggtcagacgggatgtggagaagtggggccccttcgatctggtgtacggcagcacccaacccctgggcagctcttgtgaccggtgccctggctggtacatgtttcagttccaccggatcctgcagtacgccctgccgagacaggagtcccagcggccattcttttggattttcatggacaacttgctgctgaccgaggatgaccaggaaactaccactcggttcctgcagaccgaagccgtgaccctgcaggacgtgagaggccgggactaccagaacgccatgcgggtgtggtccaacatccctggactgaaaagcaagcacgcacctctgacccctaaagaagaggagtacctgcaggcccaggtgcggagcagaagcaagctggacgcccctaaggtggatctgctggtgaagaattgcctcctgcccctgagagagtacttcaagtatttcagccagaatagtctgcccctgggaggcagcggcggcggcagcaaggcccccgtgaccttcggcgacctggccatctacttcagccaggaggagtgggagtggctgagccccatccagaaggacctgtacgaggacgtgatgctggagaactacaccaacctggtgagcctgggcctgagcagcaggaggcccaacgtgatcgccctgctggagaagggcaaggccccctggatggtggagccccccaggaggaggcagggccccgacagcaggagcaagtgcggcggcccaagcagcggcgcccctcctcccagcggcggcagcccagccggctccccaacctctaccgaggagggcacctctgagtccgccacccccgagagcggccctggcacctccaccgagcccagcgagggcagcgcacccggcagccctgccggcagccccacctccacagaggagggaaccagcaccgagcccagcgaaggcagcgccccaggcaccagcaccgagcctagtgagcaggagattaaacggatcaacaagatcagaagaagacttgtgaaagacagcaacaccaagaaggccggcaagacaggccccatgaaaaccctgctggttagagtgatgacacccgatctgagagagcggctggaaaacctgagaaagaagcctgaaaatatcccccagcccatcagcaatacatctagagccaacctgaataagctgctgaccgattacaccgaaatgaagaaggcgatcctgcatgtgtactgggaagagttccagaaggaccctgtgggcctgatgagccgggtggcccagcctgccagcaagaagatcgatcagaacaagctgaaacctgagatggacgagaagggcaacctgaccaccgccggctttgcctgctctcagtgtggccagcccctgttcgtgtacaagctggagcaggtgtctgagaagggcaaggcttacaccaactacttcggacggtgcaatgtggccgagcacgaaaagctgatcctgctggcccagctgaagcccgagaaggatagcgacgaagccgtgacatatagcctgggaaagtttgggcagagggccctggatttctacagcattcatgtgaccaaggagtccacccaccccgtgaagcccctggcccagatcgccggaaacagatacgcctccggacctgtgggaaaggccctgagcgacgcatgtatgggcacaatcgcctccttcctgtctaagtaccaggacatcatcatcgaacaccagaaggtggtgaagggcaaccagaagagactggagagcctgcgggagctggccggcaaggaaaacctggaataccctagcgtgaccctgccacctcagcctcacaccaaggagggcgttgatgcctacaacgaagtgatcgcccgggtgcgaatgtgggtgaacctgaacctgtggcagaagctgaagctaagcagagatgatgccaagcctctgctgagactgaagggattcccttcctttcctctggtcgagagacaggccaacgaagtggactggtgggacatggtgtgtaacgtgaagaagctgatcaacgagaaaaaggaggatggcaaggtgttttggcagaatctggctggctacaagagacaggaagccctgagaccatacctgagcagcgaggaagatcggaagaagggaaagaaattcgctcggtaccagctgggcgacctgctgctgcacctggaaaagaagcacggcgaggactggggaaaggtgtacgacgaggcctgggagcggattgacaagaaagtggaaggcctgagcaagcacatcaagctggaagaggaacggagaagcgaggacgcccagagcaaggccgccctgaccgactggctgcgggctaaggccagcttcgtgatcgagggcctgaaggaggccgacaaggacgagttctgcagatgcgagctgaagctgcagaagtggtacggggacctgcggggaaagcccttcgccatcgaagccgagaacagcatcctggacatcagcggcttcagcaagcagtacaactgtgccttcatctggcagaaggacggcgtgaagaagctgaacctgtacctgatcatcaactacttcaagggcggcaagctgcggttcaagaagatcaaacctgaagccttcgaagccaacagattctacaccgtgatcaacaaaaagagcggcgagatcgtgcccatggaggtgaacttcaacttcgacgaccccaacctgatcatcctgcctctggcctttggcaagagacagggcagagaattcatctggaacgacctgctgtccctggaaaccggcagcctgaagctggccaacggaagagtgatcgagaagacactgtacaacagaagaacccggcaggatgagcctgccctgttcgtggccctgaccttcgagcggcgggaggtcctggactcctccaatatcaaaccaatgaacctgatcggcgtggcaagaggcgaaaacatccccgccgtgatcgccctgaccgaccccgagggctgcccactgagccggtttaaggatagcctgggaaacccaacccacatcctgagaatcggcgagagctataaggagaagcagcggaccatccaggccaagaaggaggtggagcagcggagagccggcggctacagccggaagtacgccagcaaagccaagaatctggcagacgatatggtgagaaacaccgctagagatctgctgtactacgccgtgacccaggatgccatgctgatcttcgccaacctgagccggggcttcggccggcagggcaagcggaccttcatggccgagagacagtacacacggatggaggactggctgaccgccaagctggcctacgagggcctgagcaagacctacctgtccaagacactggcccagtacacctccaagacatgcagcaactgtgggtttaccatcaccagcgccgactacgacagggtgctggagaagctgaagaagacagcaacaggctggatgaccacaattaacggcaaggagctgaaggtggagggccagattacctactacaacagatacaagagacagaacgtagtcaaggacctgtccgtcgagctggatagactgagcgaagaatctgtgaacaacgacatctcctcctggacaaagggcagaagcggagaagctctgagcctcctgaagaaaagattctcccatagacccgtgcaggagaagttcgtgtgcctgaactgcggcttcgagacacacgcagccgagcaagccgccctgaacatcgccagatcctggctgttcctgcggagccaggagtacaagaaataccagacaaacaagacaaccggcaacaccgataagagagccttcgtcgagacctggcagtccttttaccggaagaagcttaaggaggtgtggaaacctgccgtgcggtctggcggatctggcggaggctccaccagccccaagaaaaagagaaaagtctaagctgccttctgcggggcttgccttctggccatgcccttcttctctcccttgcacctgtacctcttggtctttgaataaagcctgagtaggaaggctagcaaaaaaaaaaaaaaaaaaaaaaaaaaaaaaaaaaaaaaaaaaaaaaaaaaaaaaaaaaaaaaaaaaaaaaaaaaaaaaaa

SEQ ID NO: 12614 - RNA, 5785 nt, synthetic construct
  source 1..5785: mol_type = other RNA
aggaaataagagagaaaagaagagtaagaagaaatataagagccaccatggcccctaagaagaagcgtaaagtgagccggatggaacgcctcgtctacgaggtgcggcagaagtgcagaaacatcgaggacatctgcatctcctgcggatctctgaacgtgaccctggagcacccactgttcatcggcggcatgtgccagaactgtaaaaactgttttctggagtgtgcctatcaatacgacgatgacggctaccagagctactgcaccatctgttgcggcggaagagaggtgctgatgtgtggaaataacaactgctgccggtgcttctgcgtggaatgcgtggacctgctggtgggccccggcgccgcccaggccgctattaaggaagatccttggaactgctacatgtgcggccacaagggcacatacggcctgctgagacggagagaggactggcctagcagactgcagatgttcttcgccaataaccacgaccaggagttcgacccccctaaggtgtaccctcccgtccccgccgagaagagaaagcccatccgggtcctgagcctgttcgatggcatcgccaccggtctgctggtgctgaaggacctgggcatccaggtggataggtacattgcctccgaggtgtgcgaggactccatcaccgtgggaatggtgcgtcatcagggcaagatcatgtacgtgggcgacgtgcggagcgtgacacagaagcatatccaggagtggggccctttcgacctggtgatcggcggcagcccttgcaatgacctgagcatcgtgaacccagcccggaagggcctgtacgagggaaccggcagactgttcttcgagttttacagactgctgcacgacgcccggcctaaggaaggcgacgaccggcccttcttttggctgttcgagaatgtggtggccatgggagtcagcgacaagcgggatattagccggttcctggagagcaaccccgtgatgatcgatgccaaggaagtgagcgccgcccaccgggccagatacttctggggcaatctgcctggcatgaacagacccctggccagcaccgtgaacgacaagctggagctgcaggagtgcctggagcacggccggatcgccaagttcagcaaggtgagaaccatcaccacccgaagcaacagcatcaaacaaggcaaggaccagcactttcctgtgttcatgaacgagaaggaggacatcctgtggtgtaccgagatggagagagtgttcgggttcccagtccactacacagatgtcagcaacatgtctagactggccagacagagactgctgggaagaagctggtccgtccctgtgatcagacacctgttcgcccctctgaaggagtacttcgcctgcgtgagcagcggcaacagcaacgccaacagccggggccccagcttctctagcggcctggtgccactgtccctgagagggagccacatgggccccatggagatctacaaaaccgtgagcgcctggaagcggcagcctgtgcgcgtgctgagcctgtttcggaatatcgataaagtcctgaaaagcctgggattcctggagagcggctctggctccggcggtggcaccctgaagtacgtggaggatgtgacaaacgtggtcagacgggatgtggagaagtggggccccttcgatctggtgtacggcagcacccaacccctgggcagctcttgtgaccggtgccctggctggtacatgtttcagttccaccggatcctgcagtacgccctgccgagacaggagtcccagcggccattcttttggattttcatggacaacttgctgctgaccgaggatgaccaggaaactaccactcggttcctgcagaccgaagccgtgaccctgcaggacgtgagaggccgggactaccagaacgccatgcgggtgtggtccaacatccctggactgaaaagcaagcacgcacctctgacccctaaagaagaggagtacctgcaggcccaggtgcggagcagaagcaagctggacgcccctaaggtggatctgctggtgaagaattgcctcctgcccctgagagagtacttcaagtatttcagccagaatagtctgcccctgggaggcagcggcggcggcttccagggcagcgtgagcttcaaggacgtgaccgtggacttcagcagggaggagtggcagcagctggacctggcccagaagagcctgtacagggacgtgatgctggagaactacttcaacctgatcagcgtgggctgccaggtgcccaagcccgaggtgatcttcaacctggagaggggcgagcagccctgcatgctggacggcgagatcagcagccagagctacctggaccagggcatcggcggcggcccaagcagcggcgcccctcctcccagcggcggcagcccagccggctccccaacctctaccgaggagggcacctctgagtccgccacccccgagagcggccctggcacctccaccgagcccagcgagggcagcgcacccggcagccctgccggcagccccacctccacagaggagggaaccagcaccgagcccagcgaaggcagcgccccaggcaccagcaccgagcctagtgagcaggagattaaacggatcaacaagatcagaagaagacttgtgaaagacagcaacaccaagaaggccggcaagacaggccccatgaaaaccctgctggttagagtgatgacacccgatctgagagagcggctggaaaacctgagaaagaagcctgaaaatatcccccagcccatcagcaatacatctagagccaacctgaataagctgctgaccgattacaccgaaatgaagaaggcgatcctgcatgtgtactgggaagagttccagaaggaccctgtgggcctgatgagccgggtggcccagcctgccagcaagaagatcgatcagaacaagctgaaacctgagatggacgagaagggcaacctgaccaccgccggctttgcctgctctcagtgtggccagcccctgttcgtgtacaagctggagcaggtgtctgagaagggcaaggcttacaccaactacttcggacggtgcaatgtggccgagcacgaaaagctgatcctgctggcccagctgaagcccgagaaggatagcgacgaagccgtgacatatagcctgggaaagtttgggcagagggccctggatttctacagcattcatgtgaccaaggagtccacccaccccgtgaagcccctggcccagatcgccggaaacagatacgcctccggacctgtgggaaaggccctgagcgacgcatgtatgggcacaatcgcctccttcctgtctaagtaccaggacatcatcatcgaacaccagaaggtggtgaagggcaaccagaagagactggagagcctgcgggagctggccggcaaggaaaacctggaataccctagcgtgaccctgccacctcagcctcacaccaaggagggcgttgatgcctacaacgaagtgatcgcccgggtgcgaatgtgggtgaacctgaacctgtggcagaagctgaagctaagcagagatgatgccaagcctctgctgagactgaagggattcccttcctttcctctggtcgagagacaggccaacgaagtggactggtgggacatggtgtgtaacgtgaagaagctgatcaacgagaaaaaggaggatggcaaggtgttttggcagaatctggctggctacaagagacaggaagccctgagaccatacctgagcagcgaggaagatcggaagaagggaaagaaattcgctcggtaccagctgggcgacctgctgctgcacctggaaaagaagcacggcgaggactggggaaaggtgtacgacgaggcctgggagcggattgacaagaaagtggaaggcctgagcaagcacatcaagctggaagaggaacggagaagcgaggacgcccagagcaaggccgccctgaccgactggctgcgggctaaggccagcttcgtgatcgagggcctgaaggaggccgacaaggacgagttctgcagatgcgagctgaagctgcagaagtggtacggggacctgcggggaaagcccttcgccatcgaagccgagaacagcatcctggacatcagcggcttcagcaagcagtacaactgtgccttcatctggcagaaggacggcgtgaagaagctgaacctgtacctgatcatcaactacttcaagggcggcaagctgcggttcaagaagatcaaacctgaagccttcgaagccaacagattctacaccgtgatcaacaaaaagagcggcgagatcgtgcccatggaggtgaacttcaacttcgacgaccccaacctgatcatcctgcctctggcctttggcaagagacagggcagagaattcatctggaacgacctgctgtccctggaaaccggcagcctgaagctggccaacggaagagtgatcgagaagacactgtacaacagaagaacccggcaggatgagcctgccctgttcgtggccctgaccttcgagcggcgggaggtcctggactcctccaatatcaaaccaatgaacctgatcggcgtggcaagaggcgaaaacatccccgccgtgatcgccctgaccgaccccgagggctgcccactgagccggtttaaggatagcctgggaaacccaacccacatcctgagaatcggcgagagctataaggagaagcagcggaccatccaggccaagaaggaggtggagcagcggagagccggcggctacagccggaagtacgccagcaaagccaagaatctggcagacgatatggtgagaaacaccgctagagatctgctgtactacgccgtgacccaggatgccatgctgatcttcgccaacctgagccggggcttcggccggcagggcaagcggaccttcatggccgagagacagtacacacggatggaggactggctgaccgccaagctggcctacgagggcctgagcaagacctacctgtccaagacactggcccagtacacctccaagacatgcagcaactgtgggtttaccatcaccagcgccgactacgacagggtgctggagaagctgaagaagacagcaacaggctggatgaccacaattaacggcaaggagctgaaggtggagggccagattacctactacaacagatacaagagacagaacgtagtcaaggacctgtccgtcgagctggatagactgagcgaagaatctgtgaacaacgacatctcctcctggacaaagggcagaagcggagaagctctgagcctcctgaagaaaagattctcccatagacccgtgcaggagaagttcgtgtgcctgaactgcggcttcgagacacacgcagccgagcaagccgccctgaacatcgccagatcctggctgttcctgcggagccaggagtacaagaaataccagacaaacaagacaaccggcaacaccgataagagagccttcgtcgagacctggcagtccttttaccggaagaagcttaaggaggtgtggaaacctgccgtgcggtctggcggatctggcggaggctccaccagccccaagaaaaagagaaaagtctaagctgccttctgcggggcttgccttctggccatgcccttcttctctcccttgcacctgtacctcttggtctttgaataaagcctgagtaggaaggctagcaaaaaaaaaaaaaaaaaaaaaaaaaaaaaaaaaaaaaaaaaaaaaaaaaaaaaaaaaaaaaaaaaaaaaaaaaaaaaaaa

SEQ ID NO: 12615 - RNA, 5785 nt, synthetic construct
  source 1..5785: mol_type = other RNA
aggaaataagagagaaaagaagagtaagaagaaatataagagccaccatggcccctaagaagaagcgtaaagtgagccggatggaacgcctcgtctacgaggtgcggcagaagtgcagaaacatcgaggacatctgcatctcctgcggatctctgaacgtgaccctggagcacccactgttcatcggcggcatgtgccagaactgtaaaaactgttttctggagtgtgcctatcaatacgacgatgacggctaccagagctactgcaccatctgttgcggcggaagagaggtgctgatgtgtggaaataacaactgctgccggtgcttctgcgtggaatgcgtggacctgctggtgggccccggcgccgcccaggccgctattaaggaagatccttggaactgctacatgtgcggccacaagggcacatacggcctgctgagacggagagaggactggcctagcagactgcagatgttcttcgccaataaccacgaccaggagttcgacccccctaaggtgtaccctcccgtccccgccgagaagagaaagcccatccgggtcctgagcctgttcgatggcatcgccaccggtctgctggtgctgaaggacctgggcatccaggtggataggtacattgcctccgaggtgtgcgaggactccatcaccgtgggaatggtgcgtcatcagggcaagatcatgtacgtgggcgacgtgcggagcgtgacacagaagcatatccaggagtggggccctttcgacctggtgatcggcggcagcccttgcaatgacctgagcatcgtgaacccagcccggaagggcctgtacgagggaaccggcagactgttcttcgagttttacagactgctgcacgacgcccggcctaaggaaggcgacgaccggcccttcttttggctgttcgagaatgtggtggccatgggagtcagcgacaagcgggatattagccggttcctggagagcaaccccgtgatgatcgatgccaaggaagtgagcgccgcccaccgggccagatacttctggggcaatctgcctggcatgaacagacccctggccagcaccgtgaacgacaagctggagctgcaggagtgcctggagcacggccggatcgccaagttcagcaaggtgagaaccatcaccacccgaagcaacagcatcaaacaaggcaaggaccagcactttcctgtgttcatgaacgagaaggaggacatcctgtggtgtaccgagatggagagagtgttcgggttcccagtccactacacagatgtcagcaacatgtctagactggccagacagagactgctgggaagaagctggtccgtccctgtgatcagacacctgttcgcccctctgaaggagtacttcgcctgcgtgagcagcggcaacagcaacgccaacagccggggccccagcttctctagcggcctggtgccactgtccctgagagggagccacatgggccccatggagatctacaaaaccgtgagcgcctggaagcggcagcctgtgcgcgtgctgagcctgtttcggaatatcgataaagtcctgaaaagcctgggattcctggagagcggctctggctccggcggtggcaccctgaagtacgtggaggatgtgacaaacgtggtcagacgggatgtggagaagtggggccccttcgatctggtgtacggcagcacccaacccctgggcagctcttgtgaccggtgccctggctggtacatgtttcagttccaccggatcctgcagtacgccctgccgagacaggagtcccagcggccattcttttggattttcatggacaacttgctgctgaccgaggatgaccaggaaactaccactcggttcctgcagaccgaagccgtgaccctgcaggacgtgagaggccgggactaccagaacgccatgcgggtgtggtccaacatccctggactgaaaagcaagcacgcacctctgacccctaaagaagaggagtacctgcaggcccaggtgcggagcagaagcaagctggacgcccctaaggtggatctgctggtgaagaattgcctcctgcccctgagagagtacttcaagtatttcagccagaatagtctgcccctgggaggcagcggcggcggcatgagcctgggcagcgagctgttcagggacgtggccatcgtgttcagccaggaggagtggcagtggctggcccccgcccagagggacctgtacagggacgtgatgctggagacctacagcaacctggtgagcctgggcctggccatcagcaagcccgacgtgatcagcttcctggagcagggcaaggagccctggatggtggagagggtggtgagcaggggcctgtgccccgtgctggagagcggcggcccaagcagcggcgcccctcctcccagcggcggcagcccagccggctccccaacctctaccgaggagggcacctctgagtccgccacccccgagagcggccctggcacctccaccgagcccagcgagggcagcgcacccggcagccctgccggcagccccacctccacagaggagggaaccagcaccgagcccagcgaaggcagcgccccaggcaccagcaccgagcctagtgagcaggagattaaacggatcaacaagatcagaagaagacttgtgaaagacagcaacaccaagaaggccggcaagacaggccccatgaaaaccctgctggttagagtgatgacacccgatctgagagagcggctggaaaacctgagaaagaagcctgaaaatatcccccagcccatcagcaatacatctagagccaacctgaataagctgctgaccgattacaccgaaatgaagaaggcgatcctgcatgtgtactgggaagagttccagaaggaccctgtgggcctgatgagccgggtggcccagcctgccagcaagaagatcgatcagaacaagctgaaacctgagatggacgagaagggcaacctgaccaccgccggctttgcctgctctcagtgtggccagcccctgttcgtgtacaagctggagcaggtgtctgagaagggcaaggcttacaccaactacttcggacggtgcaatgtggccgagcacgaaaagctgatcctgctggcccagctgaagcccgagaaggatagcgacgaagccgtgacatatagcctgggaaagtttgggcagagggccctggatttctacagcattcatgtgaccaaggagtccacccaccccgtgaagcccctggcccagatcgccggaaacagatacgcctccggacctgtgggaaaggccctgagcgacgcatgtatgggcacaatcgcctccttcctgtctaagtaccaggacatcatcatcgaacaccagaaggtggtgaagggcaaccagaagagactggagagcctgcgggagctggccggcaaggaaaacctggaataccctagcgtgaccctgccacctcagcctcacaccaaggagggcgttgatgcctacaacgaagtgatcgcccgggtgcgaatgtgggtgaacctgaacctgtggcagaagctgaagctaagcagagatgatgccaagcctctgctgagactgaagggattcccttcctttcctctggtcgagagacaggccaacgaagtggactggtgggacatggtgtgtaacgtgaagaagctgatcaacgagaaaaaggaggatggcaaggtgttttggcagaatctggctggctacaagagacaggaagccctgagaccatacctgagcagcgaggaagatcggaagaagggaaagaaattcgctcggtaccagctgggcgacctgctgctgcacctggaaaagaagcacggcgaggactggggaaaggtgtacgacgaggcctgggagcggattgacaagaaagtggaaggcctgagcaagcacatcaagctggaagaggaacggagaagcgaggacgcccagagcaaggccgccctgaccgactggctgcgggctaaggccagcttcgtgatcgagggcctgaaggaggccgacaaggacgagttctgcagatgcgagctgaagctgcagaagtggtacggggacctgcggggaaagcccttcgccatcgaagccgagaacagcatcctggacatcagcggcttcagcaagcagtacaactgtgccttcatctggcagaaggacggcgtgaagaagctgaacctgtacctgatcatcaactacttcaagggcggcaagctgcggttcaagaagatcaaacctgaagccttcgaagccaacagattctacaccgtgatcaacaaaaagagcggcgagatcgtgcccatggaggtgaacttcaacttcgacgaccccaacctgatcatcctgcctctggcctttggcaagagacagggcagagaattcatctggaacgacctgctgtccctggaaaccggcagcctgaagctggccaacggaagagtgatcgagaagacactgtacaacagaagaacccggcaggatgagcctgccctgttcgtggccctgaccttcgagcggcgggaggtcctggactcctccaatatcaaaccaatgaacctgatcggcgtggcaagaggcgaaaacatccccgccgtgatcgccctgaccgaccccgagggctgcccactgagccggtttaaggatagcctgggaaacccaacccacatcctgagaatcggcgagagctataaggagaagcagcggaccatccaggccaagaaggaggtggagcagcggagagccggcggctacagccggaagtacgccagcaaagccaagaatctggcagacgatatggtgagaaacaccgctagagatctgctgtactacgccgtgacccaggatgccatgctgatcttcgccaacctgagccggggcttcggccggcagggcaagcggaccttcatggccgagagacagtacacacggatggaggactggctgaccgccaagctggcctacgagggcctgagcaagacctacctgtccaagacactggcccagtacacctccaagacatgcagcaactgtgggtttaccatcaccagcgccgactacgacagggtgctggagaagctgaagaagacagcaacaggctggatgaccacaattaacggcaaggagctgaaggtggagggccagattacctactacaacagatacaagagacagaacgtagtcaaggacctgtccgtcgagctggatagactgagcgaagaatctgtgaacaacgacatctcctcctggacaaagggcagaagcggagaagctctgagcctcctgaagaaaagattctcccatagacccgtgcaggagaagttcgtgtgcctgaactgcggcttcgagacacacgcagccgagcaagccgccctgaacatcgccagatcctggctgttcctgcggagccaggagtacaagaaataccagacaaacaagacaaccggcaacaccgataagagagccttcgtcgagacctggcagtccttttaccggaagaagcttaaggaggtgtggaaacctgccgtgcggtctggcggatctggcggaggctccaccagccccaagaaaaagagaaaagtctaagctgccttctgcggggcttgccttctggccatgcccttcttctctcccttgcacctgtacctcttggtctttgaataaagcctgagtaggaaggctagcaaaaaaaaaaaaaaaaaaaaaaaaaaaaaaaaaaaaaaaaaaaaaaaaaaaaaaaaaaaaaaaaaaaaaaaaaaaaaaaa

SEQ ID NO: 12616 - RNA, 5785 nt, synthetic construct
  source 1..5785: mol_type = other RNA
aggaaataagagagaaaagaagagtaagaagaaatataagagccaccatggcccctaagaagaagcgtaaagtgagccggatggaacgcctcgtctacgaggtgcggcagaagtgcagaaacatcgaggacatctgcatctcctgcggatctctgaacgtgaccctggagcacccactgttcatcggcggcatgtgccagaactgtaaaaactgttttctggagtgtgcctatcaatacgacgatgacggctaccagagctactgcaccatctgttgcggcggaagagaggtgctgatgtgtggaaataacaactgctgccggtgcttctgcgtggaatgcgtggacctgctggtgggccccggcgccgcccaggccgctattaaggaagatccttggaactgctacatgtgcggccacaagggcacatacggcctgctgagacggagagaggactggcctagcagactgcagatgttcttcgccaataaccacgaccaggagttcgacccccctaaggtgtaccctcccgtccccgccgagaagagaaagcccatccgggtcctgagcctgttcgatggcatcgccaccggtctgctggtgctgaaggacctgggcatccaggtggataggtacattgcctccgaggtgtgcgaggactccatcaccgtgggaatggtgcgtcatcagggcaagatcatgtacgtgggcgacgtgcggagcgtgacacagaagcatatccaggagtggggccctttcgacctggtgatcggcggcagcccttgcaatgacctgagcatcgtgaacccagcccggaagggcctgtacgagggaaccggcagactgttcttcgagttttacagactgctgcacgacgcccggcctaaggaaggcgacgaccggcccttcttttggctgttcgagaatgtggtggccatgggagtcagcgacaagcgggatattagccggttcctggagagcaaccccgtgatgatcgatgccaaggaagtgagcgccgcccaccgggccagatacttctggggcaatctgcctggcatgaacagacccctggccagcaccgtgaacgacaagctggagctgcaggagtgcctggagcacggccggatcgccaagttcagcaaggtgagaaccatcaccacccgaagcaacagcatcaaacaaggcaaggaccagcactttcctgtgttcatgaacgagaaggaggacatcctgtggtgtaccgagatggagagagtgttcgggttcccagtccactacacagatgtcagcaacatgtctagactggccagacagagactgctgggaagaagctggtccgtccctgtgatcagacacctgttcgcccctctgaaggagtacttcgcctgcgtgagcagcggcaacagcaacgccaacagccggggccccagcttctctagcggcctggtgccactgtccctgagagggagccacatgggccccatggagatctacaaaaccgtgagcgcctggaagcggcagcctgtgcgcgtgctgagcctgtttcggaatatcgataaagtcctgaaaagcctgggattcctggagagcggctctggctccggcggtggcaccctgaagtacgtggaggatgtgacaaacgtggtcagacgggatgtggagaagtggggccccttcgatctggtgtacggcagcacccaacccctgggcagctcttgtgaccggtgccctggctggtacatgtttcagttccaccggatcctgcagtacgccctgccgagacaggagtcccagcggccattcttttggattttcatggacaacttgctgctgaccgaggatgaccaggaaactaccactcggttcctgcagaccgaagccgtgaccctgcaggacgtgagaggccgggactaccagaacgccatgcgggtgtggtccaacatccctggactgaaaagcaagcacgcacctctgacccctaaagaagaggagtacctgcaggcccaggtgcggagcagaagcaagctggacgcccctaaggtggatctgctggtgaagaattgcctcctgcccctgagagagtacttcaagtatttcagccagaatagtctgcccctgggaggcagcggcggcggcgcccaggagagcgtgatgttcagcgacgtgagcatcgacttcagccaggaggagtgggagtgcctgaccgacgaccagaggcacctgtacagggacgtgatgctggagaactacagcaacctggtgagcatgggccacagcatcagcaagcccaacgtgatcagctacctggagcagggcaaggagccctggctggtggacaggggcaggaccaggggccagtggcccgtgctggagagcaccggcggcccaagcagcggcgcccctcctcccagcggcggcagcccagccggctccccaacctctaccgaggagggcacctctgagtccgccacccccgagagcggccctggcacctccaccgagcccagcgagggcagcgcacccggcagccctgccggcagccccacctccacagaggagggaaccagcaccgagcccagcgaaggcagcgccccaggcaccagcaccgagcctagtgagcaggagattaaacggatcaacaagatcagaagaagacttgtgaaagacagcaacaccaagaaggccggcaagacaggccccatgaaaaccctgctggttagagtgatgacacccgatctgagagagcggctggaaaacctgagaaagaagcctgaaaatatcccccagcccatcagcaatacatctagagccaacctgaataagctgctgaccgattacaccgaaatgaagaaggcgatcctgcatgtgtactgggaagagttccagaaggaccctgtgggcctgatgagccgggtggcccagcctgccagcaagaagatcgatcagaacaagctgaaacctgagatggacgagaagggcaacctgaccaccgccggctttgcctgctctcagtgtggccagcccctgttcgtgtacaagctggagcaggtgtctgagaagggcaaggcttacaccaactacttcggacggtgcaatgtggccgagcacgaaaagctgatcctgctggcccagctgaagcccgagaaggatagcgacgaagccgtgacatatagcctgggaaagtttgggcagagggccctggatttctacagcattcatgtgaccaaggagtccacccaccccgtgaagcccctggcccagatcgccggaaacagatacgcctccggacctgtgggaaaggccctgagcgacgcatgtatgggcacaatcgcctccttcctgtctaagtaccaggacatcatcatcgaacaccagaaggtggtgaagggcaaccagaagagactggagagcctgcgggagctggccggcaaggaaaacctggaataccctagcgtgaccctgccacctcagcctcacaccaaggagggcgttgatgcctacaacgaagtgatcgcccgggtgcgaatgtgggtgaacctgaacctgtggcagaagctgaagctaagcagagatgatgccaagcctctgctgagactgaagggattcccttcctttcctctggtcgagagacaggccaacgaagtggactggtgggacatggtgtgtaacgtgaagaagctgatcaacgagaaaaaggaggatggcaaggtgttttggcagaatctggctggctacaagagacaggaagccctgagaccatacctgagcagcgaggaagatcggaagaagggaaagaaattcgctcggtaccagctgggcgacctgctgctgcacctggaaaagaagcacggcgaggactggggaaaggtgtacgacgaggcctgggagcggattgacaagaaagtggaaggcctgagcaagcacatcaagctggaagaggaacggagaagcgaggacgcccagagcaaggccgccctgaccgactggctgcgggctaaggccagcttcgtgatcgagggcctgaaggaggccgacaaggacgagttctgcagatgcgagctgaagctgcagaagtggtacggggacctgcggggaaagcccttcgccatcgaagccgagaacagcatcctggacatcagcggcttcagcaagcagtacaactgtgccttcatctggcagaaggacggcgtgaagaagctgaacctgtacctgatcatcaactacttcaagggcggcaagctgcggttcaagaagatcaaacctgaagccttcgaagccaacagattctacaccgtgatcaacaaaaagagcggcgagatcgtgcccatggaggtgaacttcaacttcgacgaccccaacctgatcatcctgcctctggcctttggcaagagacagggcagagaattcatctggaacgacctgctgtccctggaaaccggcagcctgaagctggccaacggaagagtgatcgagaagacactgtacaacagaagaacccggcaggatgagcctgccctgttcgtggccctgaccttcgagcggcgggaggtcctggactcctccaatatcaaaccaatgaacctgatcggcgtggcaagaggcgaaaacatccccgccgtgatcgccctgaccgaccccgagggctgcccactgagccggtttaaggatagcctgggaaacccaacccacatcctgagaatcggcgagagctataaggagaagcagcggaccatccaggccaagaaggaggtggagcagcggagagccggcggctacagccggaagtacgccagcaaagccaagaatctggcagacgatatggtgagaaacaccgctagagatctgctgtactacgccgtgacccaggatgccatgctgatcttcgccaacctgagccggggcttcggccggcagggcaagcggaccttcatggccgagagacagtacacacggatggaggactggctgaccgccaagctggcctacgagggcctgagcaagacctacctgtccaagacactggcccagtacacctccaagacatgcagcaactgtgggtttaccatcaccagcgccgactacgacagggtgctggagaagctgaagaagacagcaacaggctggatgaccacaattaacggcaaggagctgaaggtggagggccagattacctactacaacagatacaagagacagaacgtagtcaaggacctgtccgtcgagctggatagactgagcgaagaatctgtgaacaacgacatctcctcctggacaaagggcagaagcggagaagctctgagcctcctgaagaaaagattctcccatagacccgtgcaggagaagttcgtgtgcctgaactgcggcttcgagacacacgcagccgagcaagccgccctgaacatcgccagatcctggctgttcctgcggagccaggagtacaagaaataccagacaaacaagacaaccggcaacaccgataagagagccttcgtcgagacctggcagtccttttaccggaagaagcttaaggaggtgtggaaacctgccgtgcggtctggcggatctggcggaggctccaccagccccaagaaaaagagaaaagtctaagctgccttctgcggggcttgccttctggccatgcccttcttctctcccttgcacctgtacctcttggtctttgaataaagcctgagtaggaaggctagcaaaaaaaaaaaaaaaaaaaaaaaaaaaaaaaaaaaaaaaaaaaaaaaaaaaaaaaaaaaaaaaaaaaaaaaaaaaaaaaa

SEQ ID NO: 12617 - RNA, 5785 nt, synthetic construct
  source 1..5785: mol_type = other RNA
aggaaataagagagaaaagaagagtaagaagaaatataagagccaccatggcccctaagaagaagcgtaaagtgagccggatggaacgcctcgtctacgaggtgcggcagaagtgcagaaacatcgaggacatctgcatctcctgcggatctctgaacgtgaccctggagcacccactgttcatcggcggcatgtgccagaactgtaaaaactgttttctggagtgtgcctatcaatacgacgatgacggctaccagagctactgcaccatctgttgcggcggaagagaggtgctgatgtgtggaaataacaactgctgccggtgcttctgcgtggaatgcgtggacctgctggtgggccccggcgccgcccaggccgctattaaggaagatccttggaactgctacatgtgcggccacaagggcacatacggcctgctgagacggagagaggactggcctagcagactgcagatgttcttcgccaataaccacgaccaggagttcgacccccctaaggtgtaccctcccgtccccgccgagaagagaaagcccatccgggtcctgagcctgttcgatggcatcgccaccggtctgctggtgctgaaggacctgggcatccaggtggataggtacattgcctccgaggtgtgcgaggactccatcaccgtgggaatggtgcgtcatcagggcaagatcatgtacgtgggcgacgtgcggagcgtgacacagaagcatatccaggagtggggccctttcgacctggtgatcggcggcagcccttgcaatgacctgagcatcgtgaacccagcccggaagggcctgtacgagggaaccggcagactgttcttcgagttttacagactgctgcacgacgcccggcctaaggaaggcgacgaccggcccttcttttggctgttcgagaatgtggtggccatgggagtcagcgacaagcgggatattagccggttcctggagagcaaccccgtgatgatcgatgccaaggaagtgagcgccgcccaccgggccagatacttctggggcaatctgcctggcatgaacagacccctggccagcaccgtgaacgacaagctggagctgcaggagtgcctggagcacggccggatcgccaagttcagcaaggtgagaaccatcaccacccgaagcaacagcatcaaacaaggcaaggaccagcactttcctgtgttcatgaacgagaaggaggacatcctgtggtgtaccgagatggagagagtgttcgggttcccagtccactacacagatgtcagcaacatgtctagactggccagacagagactgctgggaagaagctggtccgtccctgtgatcagacacctgttcgcccctctgaaggagtacttcgcctgcgtgagcagcggcaacagcaacgccaacagccggggccccagcttctctagcggcctggtgccactgtccctgagagggagccacatgggccccatggagatctacaaaaccgtgagcgcctggaagcggcagcctgtgcgcgtgctgagcctgtttcggaatatcgataaagtcctgaaaagcctgggattcctggagagcggctctggctccggcggtggcaccctgaagtacgtggaggatgtgacaaacgtggtcagacgggatgtggagaagtggggccccttcgatctggtgtacggcagcacccaacccctgggcagctcttgtgaccggtgccctggctggtacatgtttcagttccaccggatcctgcagtacgccctgccgagacaggagtcccagcggccattcttttggattttcatggacaacttgctgctgaccgaggatgaccaggaaactaccactcggttcctgcagaccgaagccgtgaccctgcaggacgtgagaggccgggactaccagaacgccatgcgggtgtggtccaacatccctggactgaaaagcaagcacgcacctctgacccctaaagaagaggagtacctgcaggcccaggtgcggagcagaagcaagctggacgcccctaaggtggatctgctggtgaagaattgcctcctgcccctgagagagtacttcaagtatttcagccagaatagtctgcccctgggaggcagcggcggcggcctgcaggtgagcgtgagcttcgaggacgtgaccgtggacttcagcagggaggagtggcagcacctggaccccgcccagaggaggctgtacagggacgtgaccctggagaactacagccacctgcacagcgtgggctaccaggtgcccaagcccgaggtgatcttcaagctggagcagggcgagggcccctggaccctggagggcgagaccccccaccagggctgcagcgacgaggccatcggcggcggcccaagcagcggcgcccctcctcccagcggcggcagcccagccggctccccaacctctaccgaggagggcacctctgagtccgccacccccgagagcggccctggcacctccaccgagcccagcgagggcagcgcacccggcagccctgccggcagccccacctccacagaggagggaaccagcaccgagcccagcgaaggcagcgccccaggcaccagcaccgagcctagtgagcaggagattaaacggatcaacaagatcagaagaagacttgtgaaagacagcaacaccaagaaggccggcaagacaggccccatgaaaaccctgctggttagagtgatgacacccgatctgagagagcggctggaaaacctgagaaagaagcctgaaaatatcccccagcccatcagcaatacatctagagccaacctgaataagctgctgaccgattacaccgaaatgaagaaggcgatcctgcatgtgtactgggaagagttccagaaggaccctgtgggcctgatgagccgggtggcccagcctgccagcaagaagatcgatcagaacaagctgaaacctgagatggacgagaagggcaacctgaccaccgccggctttgcctgctctcagtgtggccagcccctgttcgtgtacaagctggagcaggtgtctgagaagggcaaggcttacaccaactacttcggacggtgcaatgtggccgagcacgaaaagctgatcctgctggcccagctgaagcccgagaaggatagcgacgaagccgtgacatatagcctgggaaagtttgggcagagggccctggatttctacagcattcatgtgaccaaggagtccacccaccccgtgaagcccctggcccagatcgccggaaacagatacgcctccggacctgtgggaaaggccctgagcgacgcatgtatgggcacaatcgcctccttcctgtctaagtaccaggacatcatcatcgaacaccagaaggtggtgaagggcaaccagaagagactggagagcctgcgggagctggccggcaaggaaaacctggaataccctagcgtgaccctgccacctcagcctcacaccaaggagggcgttgatgcctacaacgaagtgatcgcccgggtgcgaatgtgggtgaacctgaacctgtggcagaagctgaagctaagcagagatgatgccaagcctctgctgagactgaagggattcccttcctttcctctggtcgagagacaggccaacgaagtggactggtgggacatggtgtgtaacgtgaagaagctgatcaacgagaaaaaggaggatggcaaggtgttttggcagaatctggctggctacaagagacaggaagccctgagaccatacctgagcagcgaggaagatcggaagaagggaaagaaattcgctcggtaccagctgggcgacctgctgctgcacctggaaaagaagcacggcgaggactggggaaaggtgtacgacgaggcctgggagcggattgacaagaaagtggaaggcctgagcaagcacatcaagctggaagaggaacggagaagcgaggacgcccagagcaaggccgccctgaccgactggctgcgggctaaggccagcttcgtgatcgagggcctgaaggaggccgacaaggacgagttctgcagatgcgagctgaagctgcagaagtggtacggggacctgcggggaaagcccttcgccatcgaagccgagaacagcatcctggacatcagcggcttcagcaagcagtacaactgtgccttcatctggcagaaggacggcgtgaagaagctgaacctgtacctgatcatcaactacttcaagggcggcaagctgcggttcaagaagatcaaacctgaagccttcgaagccaacagattctacaccgtgatcaacaaaaagagcggcgagatcgtgcccatggaggtgaacttcaacttcgacgaccccaacctgatcatcctgcctctggcctttggcaagagacagggcagagaattcatctggaacgacctgctgtccctggaaaccggcagcctgaagctggccaacggaagagtgatcgagaagacactgtacaacagaagaacccggcaggatgagcctgccctgttcgtggccctgaccttcgagcggcgggaggtcctggactcctccaatatcaaaccaatgaacctgatcggcgtggcaagaggcgaaaacatccccgccgtgatcgccctgaccgaccccgagggctgcccactgagccggtttaaggatagcctgggaaacccaacccacatcctgagaatcggcgagagctataaggagaagcagcggaccatccaggccaagaaggaggtggagcagcggagagccggcggctacagccggaagtacgccagcaaagccaagaatctggcagacgatatggtgagaaacaccgctagagatctgctgtactacgccgtgacccaggatgccatgctgatcttcgccaacctgagccggggcttcggccggcagggcaagcggaccttcatggccgagagacagtacacacggatggaggactggctgaccgccaagctggcctacgagggcctgagcaagacctacctgtccaagacactggcccagtacacctccaagacatgcagcaactgtgggtttaccatcaccagcgccgactacgacagggtgctggagaagctgaagaagacagcaacaggctggatgaccacaattaacggcaaggagctgaaggtggagggccagattacctactacaacagatacaagagacagaacgtagtcaaggacctgtccgtcgagctggatagactgagcgaagaatctgtgaacaacgacatctcctcctggacaaagggcagaagcggagaagctctgagcctcctgaagaaaagattctcccatagacccgtgcaggagaagttcgtgtgcctgaactgcggcttcgagacacacgcagccgagcaagccgccctgaacatcgccagatcctggctgttcctgcggagccaggagtacaagaaataccagacaaacaagacaaccggcaacaccgataagagagccttcgtcgagacctggcagtccttttaccggaagaagcttaaggaggtgtggaaacctgccgtgcggtctggcggatctggcggaggctccaccagccccaagaaaaagagaaaagtctaagctgccttctgcggggcttgccttctggccatgcccttcttctctcccttgcacctgtacctcttggtctttgaataaagcctgagtaggaaggctagcaaaaaaaaaaaaaaaaaaaaaaaaaaaaaaaaaaaaaaaaaaaaaaaaaaaaaaaaaaaaaaaaaaaaaaaaaaaaaaaa

SEQ ID NO: 12618 - RNA, 5785 nt, synthetic construct
  source 1..5785: mol_type = other RNA
aggaaataagagagaaaagaagagtaagaagaaatataagagccaccatggcccctaagaagaagcgtaaagtgagccggatggaacgcctcgtctacgaggtgcggcagaagtgcagaaacatcgaggacatctgcatctcctgcggatctctgaacgtgaccctggagcacccactgttcatcggcggcatgtgccagaactgtaaaaactgttttctggagtgtgcctatcaatacgacgatgacggctaccagagctactgcaccatctgttgcggcggaagagaggtgctgatgtgtggaaataacaactgctgccggtgcttctgcgtggaatgcgtggacctgctggtgggccccggcgccgcccaggccgctattaaggaagatccttggaactgctacatgtgcggccacaagggcacatacggcctgctgagacggagagaggactggcctagcagactgcagatgttcttcgccaataaccacgaccaggagttcgacccccctaaggtgtaccctcccgtccccgccgagaagagaaagcccatccgggtcctgagcctgttcgatggcatcgccaccggtctgctggtgctgaaggacctgggcatccaggtggataggtacattgcctccgaggtgtgcgaggactccatcaccgtgggaatggtgcgtcatcagggcaagatcatgtacgtgggcgacgtgcggagcgtgacacagaagcatatccaggagtggggccctttcgacctggtgatcggcggcagcccttgcaatgacctgagcatcgtgaacccagcccggaagggcctgtacgagggaaccggcagactgttcttcgagttttacagactgctgcacgacgcccggcctaaggaaggcgacgaccggcccttcttttggctgttcgagaatgtggtggccatgggagtcagcgacaagcgggatattagccggttcctggagagcaaccccgtgatgatcgatgccaaggaagtgagcgccgcccaccgggccagatacttctggggcaatctgcctggcatgaacagacccctggccagcaccgtgaacgacaagctggagctgcaggagtgcctggagcacggccggatcgccaagttcagcaaggtgagaaccatcaccacccgaagcaacagcatcaaacaaggcaaggaccagcactttcctgtgttcatgaacgagaaggaggacatcctgtggtgtaccgagatggagagagtgttcgggttcccagtccactacacagatgtcagcaacatgtctagactggccagacagagactgctgggaagaagctggtccgtccctgtgatcagacacctgttcgcccctctgaaggagtacttcgcctgcgtgagcagcggcaacagcaacgccaacagccggggccccagcttctctagcggcctggtgccactgtccctgagagggagccacatgggccccatggagatctacaaaaccgtgagcgcctggaagcggcagcctgtgcgcgtgctgagcctgtttcggaatatcgataaagtcctgaaaagcctgggattcctggagagcggctctggctccggcggtggcaccctgaagtacgtggaggatgtgacaaacgtggtcagacgggatgtggagaagtggggccccttcgatctggtgtacggcagcacccaacccctgggcagctcttgtgaccggtgccctggctggtacatgtttcagttccaccggatcctgcagtacgccctgccgagacaggagtcccagcggccattcttttggattttcatggacaacttgctgctgaccgaggatgaccaggaaactaccactcggttcctgcagaccgaagccgtgaccctgcaggacgtgagaggccgggactaccagaacgccatgcgggtgtggtccaacatccctggactgaaaagcaagcacgcacctctgacccctaaagaagaggagtacctgcaggcccaggtgcggagcagaagcaagctggacgcccctaaggtggatctgctggtgaagaattgcctcctgcccctgagagagtacttcaagtatttcagccagaatagtctgcccctgggaggcagcggcggcggcagcctgggcagcgacctgttcagggacgtggccatcgtgttcagccaggaggagtgggagcagctggcccccacccagagggacctgtacagggacgtgatgctggagacctacagcaacctggtgagcctgggcctggccgtgagcaagcccgacgtgatcagcttcctggagcagggcaaggagccctggaccgtggaggaggtggccgccggcggcctgtgccccgtgctgaagagcaggggcggcccaagcagcggcgcccctcctcccagcggcggcagcccagccggctccccaacctctaccgaggagggcacctctgagtccgccacccccgagagcggccctggcacctccaccgagcccagcgagggcagcgcacccggcagccctgccggcagccccacctccacagaggagggaaccagcaccgagcccagcgaaggcagcgccccaggcaccagcaccgagcctagtgagcaggagattaaacggatcaacaagatcagaagaagacttgtgaaagacagcaacaccaagaaggccggcaagacaggccccatgaaaaccctgctggttagagtgatgacacccgatctgagagagcggctggaaaacctgagaaagaagcctgaaaatatcccccagcccatcagcaatacatctagagccaacctgaataagctgctgaccgattacaccgaaatgaagaaggcgatcctgcatgtgtactgggaagagttccagaaggaccctgtgggcctgatgagccgggtggcccagcctgccagcaagaagatcgatcagaacaagctgaaacctgagatggacgagaagggcaacctgaccaccgccggctttgcctgctctcagtgtggccagcccctgttcgtgtacaagctggagcaggtgtctgagaagggcaaggcttacaccaactacttcggacggtgcaatgtggccgagcacgaaaagctgatcctgctggcccagctgaagcccgagaaggatagcgacgaagccgtgacatatagcctgggaaagtttgggcagagggccctggatttctacagcattcatgtgaccaaggagtccacccaccccgtgaagcccctggcccagatcgccggaaacagatacgcctccggacctgtgggaaaggccctgagcgacgcatgtatgggcacaatcgcctccttcctgtctaagtaccaggacatcatcatcgaacaccagaaggtggtgaagggcaaccagaagagactggagagcctgcgggagctggccggcaaggaaaacctggaataccctagcgtgaccctgccacctcagcctcacaccaaggagggcgttgatgcctacaacgaagtgatcgcccgggtgcgaatgtgggtgaacctgaacctgtggcagaagctgaagctaagcagagatgatgccaagcctctgctgagactgaagggattcccttcctttcctctggtcgagagacaggccaacgaagtggactggtgggacatggtgtgtaacgtgaagaagctgatcaacgagaaaaaggaggatggcaaggtgttttggcagaatctggctggctacaagagacaggaagccctgagaccatacctgagcagcgaggaagatcggaagaagggaaagaaattcgctcggtaccagctgggcgacctgctgctgcacctggaaaagaagcacggcgaggactggggaaaggtgtacgacgaggcctgggagcggattgacaagaaagtggaaggcctgagcaagcacatcaagctggaagaggaacggagaagcgaggacgcccagagcaaggccgccctgaccgactggctgcgggctaaggccagcttcgtgatcgagggcctgaaggaggccgacaaggacgagttctgcagatgcgagctgaagctgcagaagtggtacggggacctgcggggaaagcccttcgccatcgaagccgagaacagcatcctggacatcagcggcttcagcaagcagtacaactgtgccttcatctggcagaaggacggcgtgaagaagctgaacctgtacctgatcatcaactacttcaagggcggcaagctgcggttcaagaagatcaaacctgaagccttcgaagccaacagattctacaccgtgatcaacaaaaagagcggcgagatcgtgcccatggaggtgaacttcaacttcgacgaccccaacctgatcatcctgcctctggcctttggcaagagacagggcagagaattcatctggaacgacctgctgtccctggaaaccggcagcctgaagctggccaacggaagagtgatcgagaagacactgtacaacagaagaacccggcaggatgagcctgccctgttcgtggccctgaccttcgagcggcgggaggtcctggactcctccaatatcaaaccaatgaacctgatcggcgtggcaagaggcgaaaacatccccgccgtgatcgccctgaccgaccccgagggctgcccactgagccggtttaaggatagcctgggaaacccaacccacatcctgagaatcggcgagagctataaggagaagcagcggaccatccaggccaagaaggaggtggagcagcggagagccggcggctacagccggaagtacgccagcaaagccaagaatctggcagacgatatggtgagaaacaccgctagagatctgctgtactacgccgtgacccaggatgccatgctgatcttcgccaacctgagccggggcttcggccggcagggcaagcggaccttcatggccgagagacagtacacacggatggaggactggctgaccgccaagctggcctacgagggcctgagcaagacctacctgtccaagacactggcccagtacacctccaagacatgcagcaactgtgggtttaccatcaccagcgccgactacgacagggtgctggagaagctgaagaagacagcaacaggctggatgaccacaattaacggcaaggagctgaaggtggagggccagattacctactacaacagatacaagagacagaacgtagtcaaggacctgtccgtcgagctggatagactgagcgaagaatctgtgaacaacgacatctcctcctggacaaagggcagaagcggagaagctctgagcctcctgaagaaaagattctcccatagacccgtgcaggagaagttcgtgtgcctgaactgcggcttcgagacacacgcagccgagcaagccgccctgaacatcgccagatcctggctgttcctgcggagccaggagtacaagaaataccagacaaacaagacaaccggcaacaccgataagagagccttcgtcgagacctggcagtccttttaccggaagaagcttaaggaggtgtggaaacctgccgtgcggtctggcggatctggcggaggctccaccagccccaagaaaaagagaaaagtctaagctgccttctgcggggcttgccttctggccatgcccttcttctctcccttgcacctgtacctcttggtctttgaataaagcctgagtaggaaggctagcaaaaaaaaaaaaaaaaaaaaaaaaaaaaaaaaaaaaaaaaaaaaaaaaaaaaaaaaaaaaaaaaaaaaaaaaaaaaaaaa

SEQ ID NO: 12619 - RNA, 5785 nt, synthetic construct
  source 1..5785: mol_type = other RNA
aggaaataagagagaaaagaagagtaagaagaaatataagagccaccatggcccctaagaagaagcgtaaagtgagccggatggaacgcctcgtctacgaggtgcggcagaagtgcagaaacatcgaggacatctgcatctcctgcggatctctgaacgtgaccctggagcacccactgttcatcggcggcatgtgccagaactgtaaaaactgttttctggagtgtgcctatcaatacgacgatgacggctaccagagctactgcaccatctgttgcggcggaagagaggtgctgatgtgtggaaataacaactgctgccggtgcttctgcgtggaatgcgtggacctgctggtgggccccggcgccgcccaggccgctattaaggaagatccttggaactgctacatgtgcggccacaagggcacatacggcctgctgagacggagagaggactggcctagcagactgcagatgttcttcgccaataaccacgaccaggagttcgacccccctaaggtgtaccctcccgtccccgccgagaagagaaagcccatccgggtcctgagcctgttcgatggcatcgccaccggtctgctggtgctgaaggacctgggcatccaggtggataggtacattgcctccgaggtgtgcgaggactccatcaccgtgggaatggtgcgtcatcagggcaagatcatgtacgtgggcgacgtgcggagcgtgacacagaagcatatccaggagtggggccctttcgacctggtgatcggcggcagcccttgcaatgacctgagcatcgtgaacccagcccggaagggcctgtacgagggaaccggcagactgttcttcgagttttacagactgctgcacgacgcccggcctaaggaaggcgacgaccggcccttcttttggctgttcgagaatgtggtggccatgggagtcagcgacaagcgggatattagccggttcctggagagcaaccccgtgatgatcgatgccaaggaagtgagcgccgcccaccgggccagatacttctggggcaatctgcctggcatgaacagacccctggccagcaccgtgaacgacaagctggagctgcaggagtgcctggagcacggccggatcgccaagttcagcaaggtgagaaccatcaccacccgaagcaacagcatcaaacaaggcaaggaccagcactttcctgtgttcatgaacgagaaggaggacatcctgtggtgtaccgagatggagagagtgttcgggttcccagtccactacacagatgtcagcaacatgtctagactggccagacagagactgctgggaagaagctggtccgtccctgtgatcagacacctgttcgcccctctgaaggagtacttcgcctgcgtgagcagcggcaacagcaacgccaacagccggggccccagcttctctagcggcctggtgccactgtccctgagagggagccacatgggccccatggagatctacaaaaccgtgagcgcctggaagcggcagcctgtgcgcgtgctgagcctgtttcggaatatcgataaagtcctgaaaagcctgggattcctggagagcggctctggctccggcggtggcaccctgaagtacgtggaggatgtgacaaacgtggtcagacgggatgtggagaagtggggccccttcgatctggtgtacggcagcacccaacccctgggcagctcttgtgaccggtgccctggctggtacatgtttcagttccaccggatcctgcagtacgccctgccgagacaggagtcccagcggccattcttttggattttcatggacaacttgctgctgaccgaggatgaccaggaaactaccactcggttcctgcagaccgaagccgtgaccctgcaggacgtgagaggccgggactaccagaacgccatgcgggtgtggtccaacatccctggactgaaaagcaagcacgcacctctgacccctaaagaagaggagtacctgcaggcccaggtgcggagcagaagcaagctggacgcccctaaggtggatctgctggtgaagaattgcctcctgcccctgagagagtacttcaagtatttcagccagaatagtctgcccctgggaggcagcggcggcggcgccagcgtgaccgtgaccttcgacgacgtggccctgtacttcagcgagcaggagtgggagatcctggagaagtggcagaagcagatgtacaagcaggagatgaagaccaactaccagaccctggacagcctgggctacgccttcagcaagcccgacctgatcacctggatggagcagggcaggatgctgttcatcagcgagcagggctgcctggacaagaccaggaggaccaccagcccccccggcggcccaagcagcggcgcccctcctcccagcggcggcagcccagccggctccccaacctctaccgaggagggcacctctgagtccgccacccccgagagcggccctggcacctccaccgagcccagcgagggcagcgcacccggcagccctgccggcagccccacctccacagaggagggaaccagcaccgagcccagcgaaggcagcgccccaggcaccagcaccgagcctagtgagcaggagattaaacggatcaacaagatcagaagaagacttgtgaaagacagcaacaccaagaaggccggcaagacaggccccatgaaaaccctgctggttagagtgatgacacccgatctgagagagcggctggaaaacctgagaaagaagcctgaaaatatcccccagcccatcagcaatacatctagagccaacctgaataagctgctgaccgattacaccgaaatgaagaaggcgatcctgcatgtgtactgggaagagttccagaaggaccctgtgggcctgatgagccgggtggcccagcctgccagcaagaagatcgatcagaacaagctgaaacctgagatggacgagaagggcaacctgaccaccgccggctttgcctgctctcagtgtggccagcccctgttcgtgtacaagctggagcaggtgtctgagaagggcaaggcttacaccaactacttcggacggtgcaatgtggccgagcacgaaaagctgatcctgctggcccagctgaagcccgagaaggatagcgacgaagccgtgacatatagcctgggaaagtttgggcagagggccctggatttctacagcattcatgtgaccaaggagtccacccaccccgtgaagcccctggcccagatcgccggaaacagatacgcctccggacctgtgggaaaggccctgagcgacgcatgtatgggcacaatcgcctccttcctgtctaagtaccaggacatcatcatcgaacaccagaaggtggtgaagggcaaccagaagagactggagagcctgcgggagctggccggcaaggaaaacctggaataccctagcgtgaccctgccacctcagcctcacaccaaggagggcgttgatgcctacaacgaagtgatcgcccgggtgcgaatgtgggtgaacctgaacctgtggcagaagctgaagctaagcagagatgatgccaagcctctgctgagactgaagggattcccttcctttcctctggtcgagagacaggccaacgaagtggactggtgggacatggtgtgtaacgtgaagaagctgatcaacgagaaaaaggaggatggcaaggtgttttggcagaatctggctggctacaagagacaggaagccctgagaccatacctgagcagcgaggaagatcggaagaagggaaagaaattcgctcggtaccagctgggcgacctgctgctgcacctggaaaagaagcacggcgaggactggggaaaggtgtacgacgaggcctgggagcggattgacaagaaagtggaaggcctgagcaagcacatcaagctggaagaggaacggagaagcgaggacgcccagagcaaggccgccctgaccgactggctgcgggctaaggccagcttcgtgatcgagggcctgaaggaggccgacaaggacgagttctgcagatgcgagctgaagctgcagaagtggtacggggacctgcggggaaagcccttcgccatcgaagccgagaacagcatcctggacatcagcggcttcagcaagcagtacaactgtgccttcatctggcagaaggacggcgtgaagaagctgaacctgtacctgatcatcaactacttcaagggcggcaagctgcggttcaagaagatcaaacctgaagccttcgaagccaacagattctacaccgtgatcaacaaaaagagcggcgagatcgtgcccatggaggtgaacttcaacttcgacgaccccaacctgatcatcctgcctctggcctttggcaagagacagggcagagaattcatctggaacgacctgctgtccctggaaaccggcagcctgaagctggccaacggaagagtgatcgagaagacactgtacaacagaagaacccggcaggatgagcctgccctgttcgtggccctgaccttcgagcggcgggaggtcctggactcctccaatatcaaaccaatgaacctgatcggcgtggcaagaggcgaaaacatccccgccgtgatcgccctgaccgaccccgagggctgcccactgagccggtttaaggatagcctgggaaacccaacccacatcctgagaatcggcgagagctataaggagaagcagcggaccatccaggccaagaaggaggtggagcagcggagagccggcggctacagccggaagtacgccagcaaagccaagaatctggcagacgatatggtgagaaacaccgctagagatctgctgtactacgccgtgacccaggatgccatgctgatcttcgccaacctgagccggggcttcggccggcagggcaagcggaccttcatggccgagagacagtacacacggatggaggactggctgaccgccaagctggcctacgagggcctgagcaagacctacctgtccaagacactggcccagtacacctccaagacatgcagcaactgtgggtttaccatcaccagcgccgactacgacagggtgctggagaagctgaagaagacagcaacaggctggatgaccacaattaacggcaaggagctgaaggtggagggccagattacctactacaacagatacaagagacagaacgtagtcaaggacctgtccgtcgagctggatagactgagcgaagaatctgtgaacaacgacatctcctcctggacaaagggcagaagcggagaagctctgagcctcctgaagaaaagattctcccatagacccgtgcaggagaagttcgtgtgcctgaactgcggcttcgagacacacgcagccgagcaagccgccctgaacatcgccagatcctggctgttcctgcggagccaggagtacaagaaataccagacaaacaagacaaccggcaacaccgataagagagccttcgtcgagacctggcagtccttttaccggaagaagcttaaggaggtgtggaaacctgccgtgcggtctggcggatctggcggaggctccaccagccccaagaaaaagagaaaagtctaagctgccttctgcggggcttgccttctggccatgcccttcttctctcccttgcacctgtacctcttggtctttgaataaagcctgagtaggaaggctagcaaaaaaaaaaaaaaaaaaaaaaaaaaaaaaaaaaaaaaaaaaaaaaaaaaaaaaaaaaaaaaaaaaaaaaaaaaaaaaaa

SEQ ID NO: 12620 - RNA, 5785 nt, synthetic construct
  source 1..5785: mol_type = other RNA
aggaaataagagagaaaagaagagtaagaagaaatataagagccaccatggcccctaagaagaagcgtaaagtgagccggatggaacgcctcgtctacgaggtgcggcagaagtgcagaaacatcgaggacatctgcatctcctgcggatctctgaacgtgaccctggagcacccactgttcatcggcggcatgtgccagaactgtaaaaactgttttctggagtgtgcctatcaatacgacgatgacggctaccagagctactgcaccatctgttgcggcggaagagaggtgctgatgtgtggaaataacaactgctgccggtgcttctgcgtggaatgcgtggacctgctggtgggccccggcgccgcccaggccgctattaaggaagatccttggaactgctacatgtgcggccacaagggcacatacggcctgctgagacggagagaggactggcctagcagactgcagatgttcttcgccaataaccacgaccaggagttcgacccccctaaggtgtaccctcccgtccccgccgagaagagaaagcccatccgggtcctgagcctgttcgatggcatcgccaccggtctgctggtgctgaaggacctgggcatccaggtggataggtacattgcctccgaggtgtgcgaggactccatcaccgtgggaatggtgcgtcatcagggcaagatcatgtacgtgggcgacgtgcggagcgtgacacagaagcatatccaggagtggggccctttcgacctggtgatcggcggcagcccttgcaatgacctgagcatcgtgaacccagcccggaagggcctgtacgagggaaccggcagactgttcttcgagttttacagactgctgcacgacgcccggcctaaggaaggcgacgaccggcccttcttttggctgttcgagaatgtggtggccatgggagtcagcgacaagcgggatattagccggttcctggagagcaaccccgtgatgatcgatgccaaggaagtgagcgccgcccaccgggccagatacttctggggcaatctgcctggcatgaacagacccctggccagcaccgtgaacgacaagctggagctgcaggagtgcctggagcacggccggatcgccaagttcagcaaggtgagaaccatcaccacccgaagcaacagcatcaaacaaggcaaggaccagcactttcctgtgttcatgaacgagaaggaggacatcctgtggtgtaccgagatggagagagtgttcgggttcccagtccactacacagatgtcagcaacatgtctagactggccagacagagactgctgggaagaagctggtccgtccctgtgatcagacacctgttcgcccctctgaaggagtacttcgcctgcgtgagcagcggcaacagcaacgccaacagccggggccccagcttctctagcggcctggtgccactgtccctgagagggagccacatgggccccatggagatctacaaaaccgtgagcgcctggaagcggcagcctgtgcgcgtgctgagcctgtttcggaatatcgataaagtcctgaaaagcctgggattcctggagagcggctctggctccggcggtggcaccctgaagtacgtggaggatgtgacaaacgtggtcagacgggatgtggagaagtggggccccttcgatctggtgtacggcagcacccaacccctgggcagctcttgtgaccggtgccctggctggtacatgtttcagttccaccggatcctgcagtacgccctgccgagacaggagtcccagcggccattcttttggattttcatggacaacttgctgctgaccgaggatgaccaggaaactaccactcggttcctgcagaccgaagccgtgaccctgcaggacgtgagaggccgggactaccagaacgccatgcgggtgtggtccaacatccctggactgaaaagcaagcacgcacctctgacccctaaagaagaggagtacctgcaggcccaggtgcggagcagaagcaagctggacgcccctaaggtggatctgctggtgaagaattgcctcctgcccctgagagagtacttcaagtatttcagccagaatagtctgcccctgggaggcagcggcggcggccagccccaggaggccgtgaccttcaaggacgtggaggtgaccttcagccaggacgagtggggctggctggacgccagccagaggaacctgtacagggacgtgatgctggagaactacggcaacgtgaccagcctggtgggccccttcaccaagcccgccctgatcagctggctggaggccagggagccctggggcctgaacgtgcagggcgcccaccccaagaggagccccagcgccgcccccggcggcccaagcagcggcgcccctcctcccagcggcggcagcccagccggctccccaacctctaccgaggagggcacctctgagtccgccacccccgagagcggccctggcacctccaccgagcccagcgagggcagcgcacccggcagccctgccggcagccccacctccacagaggagggaaccagcaccgagcccagcgaaggcagcgccccaggcaccagcaccgagcctagtgagcaggagattaaacggatcaacaagatcagaagaagacttgtgaaagacagcaacaccaagaaggccggcaagacaggccccatgaaaaccctgctggttagagtgatgacacccgatctgagagagcggctggaaaacctgagaaagaagcctgaaaatatcccccagcccatcagcaatacatctagagccaacctgaataagctgctgaccgattacaccgaaatgaagaaggcgatcctgcatgtgtactgggaagagttccagaaggaccctgtgggcctgatgagccgggtggcccagcctgccagcaagaagatcgatcagaacaagctgaaacctgagatggacgagaagggcaacctgaccaccgccggctttgcctgctctcagtgtggccagcccctgttcgtgtacaagctggagcaggtgtctgagaagggcaaggcttacaccaactacttcggacggtgcaatgtggccgagcacgaaaagctgatcctgctggcccagctgaagcccgagaaggatagcgacgaagccgtgacatatagcctgggaaagtttgggcagagggccctggatttctacagcattcatgtgaccaaggagtccacccaccccgtgaagcccctggcccagatcgccggaaacagatacgcctccggacctgtgggaaaggccctgagcgacgcatgtatgggcacaatcgcctccttcctgtctaagtaccaggacatcatcatcgaacaccagaaggtggtgaagggcaaccagaagagactggagagcctgcgggagctggccggcaaggaaaacctggaataccctagcgtgaccctgccacctcagcctcacaccaaggagggcgttgatgcctacaacgaagtgatcgcccgggtgcgaatgtgggtgaacctgaacctgtggcagaagctgaagctaagcagagatgatgccaagcctctgctgagactgaagggattcccttcctttcctctggtcgagagacaggccaacgaagtggactggtgggacatggtgtgtaacgtgaagaagctgatcaacgagaaaaaggaggatggcaaggtgttttggcagaatctggctggctacaagagacaggaagccctgagaccatacctgagcagcgaggaagatcggaagaagggaaagaaattcgctcggtaccagctgggcgacctgctgctgcacctggaaaagaagcacggcgaggactggggaaaggtgtacgacgaggcctgggagcggattgacaagaaagtggaaggcctgagcaagcacatcaagctggaagaggaacggagaagcgaggacgcccagagcaaggccgccctgaccgactggctgcgggctaaggccagcttcgtgatcgagggcctgaaggaggccgacaaggacgagttctgcagatgcgagctgaagctgcagaagtggtacggggacctgcggggaaagcccttcgccatcgaagccgagaacagcatcctggacatcagcggcttcagcaagcagtacaactgtgccttcatctggcagaaggacggcgtgaagaagctgaacctgtacctgatcatcaactacttcaagggcggcaagctgcggttcaagaagatcaaacctgaagccttcgaagccaacagattctacaccgtgatcaacaaaaagagcggcgagatcgtgcccatggaggtgaacttcaacttcgacgaccccaacctgatcatcctgcctctggcctttggcaagagacagggcagagaattcatctggaacgacctgctgtccctggaaaccggcagcctgaagctggccaacggaagagtgatcgagaagacactgtacaacagaagaacccggcaggatgagcctgccctgttcgtggccctgaccttcgagcggcgggaggtcctggactcctccaatatcaaaccaatgaacctgatcggcgtggcaagaggcgaaaacatccccgccgtgatcgccctgaccgaccccgagggctgcccactgagccggtttaaggatagcctgggaaacccaacccacatcctgagaatcggcgagagctataaggagaagcagcggaccatccaggccaagaaggaggtggagcagcggagagccggcggctacagccggaagtacgccagcaaagccaagaatctggcagacgatatggtgagaaacaccgctagagatctgctgtactacgccgtgacccaggatgccatgctgatcttcgccaacctgagccggggcttcggccggcagggcaagcggaccttcatggccgagagacagtacacacggatggaggactggctgaccgccaagctggcctacgagggcctgagcaagacctacctgtccaagacactggcccagtacacctccaagacatgcagcaactgtgggtttaccatcaccagcgccgactacgacagggtgctggagaagctgaagaagacagcaacaggctggatgaccacaattaacggcaaggagctgaaggtggagggccagattacctactacaacagatacaagagacagaacgtagtcaaggacctgtccgtcgagctggatagactgagcgaagaatctgtgaacaacgacatctcctcctggacaaagggcagaagcggagaagctctgagcctcctgaagaaaagattctcccatagacccgtgcaggagaagttcgtgtgcctgaactgcggcttcgagacacacgcagccgagcaagccgccctgaacatcgccagatcctggctgttcctgcggagccaggagtacaagaaataccagacaaacaagacaaccggcaacaccgataagagagccttcgtcgagacctggcagtccttttaccggaagaagcttaaggaggtgtggaaacctgccgtgcggtctggcggatctggcggaggctccaccagccccaagaaaaagagaaaagtctaagctgccttctgcggggcttgccttctggccatgcccttcttctctcccttgcacctgtacctcttggtctttgaataaagcctgagtaggaaggctagcaaaaaaaaaaaaaaaaaaaaaaaaaaaaaaaaaaaaaaaaaaaaaaaaaaaaaaaaaaaaaaaaaaaaaaaaaaaaaaaa

SEQ ID NO: 12621 - RNA, 5785 nt, synthetic construct
  source 1..5785: mol_type = other RNA
aggaaataagagagaaaagaagagtaagaagaaatataagagccaccatggcccctaagaagaagcgtaaagtgagccggatggaacgcctcgtctacgaggtgcggcagaagtgcagaaacatcgaggacatctgcatctcctgcggatctctgaacgtgaccctggagcacccactgttcatcggcggcatgtgccagaactgtaaaaactgttttctggagtgtgcctatcaatacgacgatgacggctaccagagctactgcaccatctgttgcggcggaagagaggtgctgatgtgtggaaataacaactgctgccggtgcttctgcgtggaatgcgtggacctgctggtgggccccggcgccgcccaggccgctattaaggaagatccttggaactgctacatgtgcggccacaagggcacatacggcctgctgagacggagagaggactggcctagcagactgcagatgttcttcgccaataaccacgaccaggagttcgacccccctaaggtgtaccctcccgtccccgccgagaagagaaagcccatccgggtcctgagcctgttcgatggcatcgccaccggtctgctggtgctgaaggacctgggcatccaggtggataggtacattgcctccgaggtgtgcgaggactccatcaccgtgggaatggtgcgtcatcagggcaagatcatgtacgtgggcgacgtgcggagcgtgacacagaagcatatccaggagtggggccctttcgacctggtgatcggcggcagcccttgcaatgacctgagcatcgtgaacccagcccggaagggcctgtacgagggaaccggcagactgttcttcgagttttacagactgctgcacgacgcccggcctaaggaaggcgacgaccggcccttcttttggctgttcgagaatgtggtggccatgggagtcagcgacaagcgggatattagccggttcctggagagcaaccccgtgatgatcgatgccaaggaagtgagcgccgcccaccgggccagatacttctggggcaatctgcctggcatgaacagacccctggccagcaccgtgaacgacaagctggagctgcaggagtgcctggagcacggccggatcgccaagttcagcaaggtgagaaccatcaccacccgaagcaacagcatcaaacaaggcaaggaccagcactttcctgtgttcatgaacgagaaggaggacatcctgtggtgtaccgagatggagagagtgttcgggttcccagtccactacacagatgtcagcaacatgtctagactggccagacagagactgctgggaagaagctggtccgtccctgtgatcagacacctgttcgcccctctgaaggagtacttcgcctgcgtgagcagcggcaacagcaacgccaacagccggggccccagcttctctagcggcctggtgccactgtccctgagagggagccacatgggccccatggagatctacaaaaccgtgagcgcctggaagcggcagcctgtgcgcgtgctgagcctgtttcggaatatcgataaagtcctgaaaagcctgggattcctggagagcggctctggctccggcggtggcaccctgaagtacgtggaggatgtgacaaacgtggtcagacgggatgtggagaagtggggccccttcgatctggtgtacggcagcacccaacccctgggcagctcttgtgaccggtgccctggctggtacatgtttcagttccaccggatcctgcagtacgccctgccgagacaggagtcccagcggccattcttttggattttcatggacaacttgctgctgaccgaggatgaccaggaaactaccactcggttcctgcagaccgaagccgtgaccctgcaggacgtgagaggccgggactaccagaacgccatgcgggtgtggtccaacatccctggactgaaaagcaagcacgcacctctgacccctaaagaagaggagtacctgcaggcccaggtgcggagcagaagcaagctggacgcccctaaggtggatctgctggtgaagaattgcctcctgcccctgagagagtacttcaagtatttcagccagaatagtctgcccctgggaggcagcggcggcggccaggccgaggtgaccttcgaggacgtggccgtgttcctgagccaggaggagtggggcctgctgggccccgcccagaagggcctgtacagggaggtgatgctggagacctacaggaacctggtgagcctgggcgccggcctggccggccccaagcccgaggtgatcgcccagctggagcagggcgacgagctgtgggtgctggacatgcacggcgccgagcagcccagcgtggacggcagcgccggcggcccaagcagcggcgcccctcctcccagcggcggcagcccagccggctccccaacctctaccgaggagggcacctctgagtccgccacccccgagagcggccctggcacctccaccgagcccagcgagggcagcgcacccggcagccctgccggcagccccacctccacagaggagggaaccagcaccgagcccagcgaaggcagcgccccaggcaccagcaccgagcctagtgagcaggagattaaacggatcaacaagatcagaagaagacttgtgaaagacagcaacaccaagaaggccggcaagacaggccccatgaaaaccctgctggttagagtgatgacacccgatctgagagagcggctggaaaacctgagaaagaagcctgaaaatatcccccagcccatcagcaatacatctagagccaacctgaataagctgctgaccgattacaccgaaatgaagaaggcgatcctgcatgtgtactgggaagagttccagaaggaccctgtgggcctgatgagccgggtggcccagcctgccagcaagaagatcgatcagaacaagctgaaacctgagatggacgagaagggcaacctgaccaccgccggctttgcctgctctcagtgtggccagcccctgttcgtgtacaagctggagcaggtgtctgagaagggcaaggcttacaccaactacttcggacggtgcaatgtggccgagcacgaaaagctgatcctgctggcccagctgaagcccgagaaggatagcgacgaagccgtgacatatagcctgggaaagtttgggcagagggccctggatttctacagcattcatgtgaccaaggagtccacccaccccgtgaagcccctggcccagatcgccggaaacagatacgcctccggacctgtgggaaaggccctgagcgacgcatgtatgggcacaatcgcctccttcctgtctaagtaccaggacatcatcatcgaacaccagaaggtggtgaagggcaaccagaagagactggagagcctgcgggagctggccggcaaggaaaacctggaataccctagcgtgaccctgccacctcagcctcacaccaaggagggcgttgatgcctacaacgaagtgatcgcccgggtgcgaatgtgggtgaacctgaacctgtggcagaagctgaagctaagcagagatgatgccaagcctctgctgagactgaagggattcccttcctttcctctggtcgagagacaggccaacgaagtggactggtgggacatggtgtgtaacgtgaagaagctgatcaacgagaaaaaggaggatggcaaggtgttttggcagaatctggctggctacaagagacaggaagccctgagaccatacctgagcagcgaggaagatcggaagaagggaaagaaattcgctcggtaccagctgggcgacctgctgctgcacctggaaaagaagcacggcgaggactggggaaaggtgtacgacgaggcctgggagcggattgacaagaaagtggaaggcctgagcaagcacatcaagctggaagaggaacggagaagcgaggacgcccagagcaaggccgccctgaccgactggctgcgggctaaggccagcttcgtgatcgagggcctgaaggaggccgacaaggacgagttctgcagatgcgagctgaagctgcagaagtggtacggggacctgcggggaaagcccttcgccatcgaagccgagaacagcatcctggacatcagcggcttcagcaagcagtacaactgtgccttcatctggcagaaggacggcgtgaagaagctgaacctgtacctgatcatcaactacttcaagggcggcaagctgcggttcaagaagatcaaacctgaagccttcgaagccaacagattctacaccgtgatcaacaaaaagagcggcgagatcgtgcccatggaggtgaacttcaacttcgacgaccccaacctgatcatcctgcctctggcctttggcaagagacagggcagagaattcatctggaacgacctgctgtccctggaaaccggcagcctgaagctggccaacggaagagtgatcgagaagacactgtacaacagaagaacccggcaggatgagcctgccctgttcgtggccctgaccttcgagcggcgggaggtcctggactcctccaatatcaaaccaatgaacctgatcggcgtggcaagaggcgaaaacatccccgccgtgatcgccctgaccgaccccgagggctgcccactgagccggtttaaggatagcctgggaaacccaacccacatcctgagaatcggcgagagctataaggagaagcagcggaccatccaggccaagaaggaggtggagcagcggagagccggcggctacagccggaagtacgccagcaaagccaagaatctggcagacgatatggtgagaaacaccgctagagatctgctgtactacgccgtgacccaggatgccatgctgatcttcgccaacctgagccggggcttcggccggcagggcaagcggaccttcatggccgagagacagtacacacggatggaggactggctgaccgccaagctggcctacgagggcctgagcaagacctacctgtccaagacactggcccagtacacctccaagacatgcagcaactgtgggtttaccatcaccagcgccgactacgacagggtgctggagaagctgaagaagacagcaacaggctggatgaccacaattaacggcaaggagctgaaggtggagggccagattacctactacaacagatacaagagacagaacgtagtcaaggacctgtccgtcgagctggatagactgagcgaagaatctgtgaacaacgacatctcctcctggacaaagggcagaagcggagaagctctgagcctcctgaagaaaagattctcccatagacccgtgcaggagaagttcgtgtgcctgaactgcggcttcgagacacacgcagccgagcaagccgccctgaacatcgccagatcctggctgttcctgcggagccaggagtacaagaaataccagacaaacaagacaaccggcaacaccgataagagagccttcgtcgagacctggcagtccttttaccggaagaagcttaaggaggtgtggaaacctgccgtgcggtctggcggatctggcggaggctccaccagccccaagaaaaagagaaaagtctaagctgccttctgcggggcttgccttctggccatgcccttcttctctcccttgcacctgtacctcttggtctttgaataaagcctgagtaggaaggctagcaaaaaaaaaaaaaaaaaaaaaaaaaaaaaaaaaaaaaaaaaaaaaaaaaaaaaaaaaaaaaaaaaaaaaaaaaaaaaaaa

SEQ ID NO: 12622 - RNA, 5782 nt, synthetic construct
  source 1..5782: mol_type = other RNA
aggaaataagagagaaaagaagagtaagaagaaatataagagccaccatggcccctaagaagaagcgtaaagtgagccggatggaacgcctcgtctacgaggtgcggcagaagtgcagaaacatcgaggacatctgcatctcctgcggatctctgaacgtgaccctggagcacccactgttcatcggcggcatgtgccagaactgtaaaaactgttttctggagtgtgcctatcaatacgacgatgacggctaccagagctactgcaccatctgttgcggcggaagagaggtgctgatgtgtggaaataacaactgctgccggtgcttctgcgtggaatgcgtggacctgctggtgggccccggcgccgcccaggccgctattaaggaagatccttggaactgctacatgtgcggccacaagggcacatacggcctgctgagacggagagaggactggcctagcagactgcagatgttcttcgccaataaccacgaccaggagttcgacccccctaaggtgtaccctcccgtccccgccgagaagagaaagcccatccgggtcctgagcctgttcgatggcatcgccaccggtctgctggtgctgaaggacctgggcatccaggtggataggtacattgcctccgaggtgtgcgaggactccatcaccgtgggaatggtgcgtcatcagggcaagatcatgtacgtgggcgacgtgcggagcgtgacacagaagcatatccaggagtggggccctttcgacctggtgatcggcggcagcccttgcaatgacctgagcatcgtgaacccagcccggaagggcctgtacgagggaaccggcagactgttcttcgagttttacagactgctgcacgacgcccggcctaaggaaggcgacgaccggcccttcttttggctgttcgagaatgtggtggccatgggagtcagcgacaagcgggatattagccggttcctggagagcaaccccgtgatgatcgatgccaaggaagtgagcgccgcccaccgggccagatacttctggggcaatctgcctggcatgaacagacccctggccagcaccgtgaacgacaagctggagctgcaggagtgcctggagcacggccggatcgccaagttcagcaaggtgagaaccatcaccacccgaagcaacagcatcaaacaaggcaaggaccagcactttcctgtgttcatgaacgagaaggaggacatcctgtggtgtaccgagatggagagagtgttcgggttcccagtccactacacagatgtcagcaacatgtctagactggccagacagagactgctgggaagaagctggtccgtccctgtgatcagacacctgttcgcccctctgaaggagtacttcgcctgcgtgagcagcggcaacagcaacgccaacagccggggccccagcttctctagcggcctggtgccactgtccctgagagggagccacatgggccccatggagatctacaaaaccgtgagcgcctggaagcggcagcctgtgcgcgtgctgagcctgtttcggaatatcgataaagtcctgaaaagcctgggattcctggagagcggctctggctccggcggtggcaccctgaagtacgtggaggatgtgacaaacgtggtcagacgggatgtggagaagtggggccccttcgatctggtgtacggcagcacccaacccctgggcagctcttgtgaccggtgccctggctggtacatgtttcagttccaccggatcctgcagtacgccctgccgagacaggagtcccagcggccattcttttggattttcatggacaacttgctgctgaccgaggatgaccaggaaactaccactcggttcctgcagaccgaagccgtgaccctgcaggacgtgagaggccgggactaccagaacgccatgcgggtgtggtccaacatccctggactgaaaagcaagcacgcacctctgacccctaaagaagaggagtacctgcaggcccaggtgcggagcagaagcaagctggacgcccctaaggtggatctgctggtgaagaattgcctcctgcccctgagagagtacttcaagtatttcagccagaatagtctgcccctgggaggcagcggcggcggcaacatggagggcctggtgatgttccaggacctgagcatcgacttcagccaggaggagtgggagtgcctggacgccgcccagaaggacctgtacagagacgtgatgatggagaactacagcagcctggtgagcctgggcctgagcatccccaagcccgacgtgatcagcctgctggagcagggcaaggagccctggatggtgagcagagacgtgctgggcggctggtgcagagacagcgagggcggcccaagcagcggcgcccctcctcccagcggcggcagcccagccggctccccaacctctaccgaggagggcacctctgagtccgccacccccgagagcggccctggcacctccaccgagcccagcgagggcagcgcacccggcagccctgccggcagccccacctccacagaggagggaaccagcaccgagcccagcgaaggcagcgccccaggcaccagcaccgagcctagtgagcaggagattaaacggatcaacaagatcagaagaagacttgtgaaagacagcaacaccaagaaggccggcaagacaggccccatgaaaaccctgctggttagagtgatgacacccgatctgagagagcggctggaaaacctgagaaagaagcctgaaaatatcccccagcccatcagcaatacatctagagccaacctgaataagctgctgaccgattacaccgaaatgaagaaggcgatcctgcatgtgtactgggaagagttccagaaggaccctgtgggcctgatgagccgggtggcccagcctgccagcaagaagatcgatcagaacaagctgaaacctgagatggacgagaagggcaacctgaccaccgccggctttgcctgctctcagtgtggccagcccctgttcgtgtacaagctggagcaggtgtctgagaagggcaaggcttacaccaactacttcggacggtgcaatgtggccgagcacgaaaagctgatcctgctggcccagctgaagcccgagaaggatagcgacgaagccgtgacatatagcctgggaaagtttgggcagagggccctggatttctacagcattcatgtgaccaaggagtccacccaccccgtgaagcccctggcccagatcgccggaaacagatacgcctccggacctgtgggaaaggccctgagcgacgcatgtatgggcacaatcgcctccttcctgtctaagtaccaggacatcatcatcgaacaccagaaggtggtgaagggcaaccagaagagactggagagcctgcgggagctggccggcaaggaaaacctggaataccctagcgtgaccctgccacctcagcctcacaccaaggagggcgttgatgcctacaacgaagtgatcgcccgggtgcgaatgtgggtgaacctgaacctgtggcagaagctgaagctaagcagagatgatgccaagcctctgctgagactgaagggattcccttcctttcctctggtcgagagacaggccaacgaagtggactggtgggacatggtgtgtaacgtgaagaagctgatcaacgagaaaaaggaggatggcaaggtgttttggcagaatctggctggctacaagagacaggaagccctgagaccatacctgagcagcgaggaagatcggaagaagggaaagaaattcgctcggtaccagctgggcgacctgctgctgcacctggaaaagaagcacggcgaggactggggaaaggtgtacgacgaggcctgggagcggattgacaagaaagtggaaggcctgagcaagcacatcaagctggaagaggaacggagaagcgaggacgcccagagcaaggccgccctgaccgactggctgcgggctaaggccagcttcgtgatcgagggcctgaaggaggccgacaaggacgagttctgcagatgcgagctgaagctgcagaagtggtacggggacctgcggggaaagcccttcgccatcgaagccgagaacagcatcctggacatcagcggcttcagcaagcagtacaactgtgccttcatctggcagaaggacggcgtgaagaagctgaacctgtacctgatcatcaactacttcaagggcggcaagctgcggttcaagaagatcaaacctgaagccttcgaagccaacagattctacaccgtgatcaacaaaaagagcggcgagatcgtgcccatggaggtgaacttcaacttcgacgaccccaacctgatcatcctgcctctggcctttggcaagagacagggcagagaattcatctggaacgacctgctgtccctggaaaccggcagcctgaagctggccaacggaagagtgatcgagaagacactgtacaacagaagaacccggcaggatgagcctgccctgttcgtggccctgaccttcgagcggcgggaggtcctggactcctccaatatcaaaccaatgaacctgatcggcgtggcaagaggcgaaaacatccccgccgtgatcgccctgaccgaccccgagggctgcccactgagccggtttaaggatagcctgggaaacccaacccacatcctgagaatcggcgagagctataaggagaagcagcggaccatccaggccaagaaggaggtggagcagcggagagccggcggctacagccggaagtacgccagcaaagccaagaatctggcagacgatatggtgagaaacaccgctagagatctgctgtactacgccgtgacccaggatgccatgctgatcttcgccaacctgagccggggcttcggccggcagggcaagcggaccttcatggccgagagacagtacacacggatggaggactggctgaccgccaagctggcctacgagggcctgagcaagacctacctgtccaagacactggcccagtacacctccaagacatgcagcaactgtgggtttaccatcaccagcgccgactacgacagggtgctggagaagctgaagaagacagcaacaggctggatgaccacaattaacggcaaggagctgaaggtggagggccagattacctactacaacagatacaagagacagaacgtagtcaaggacctgtccgtcgagctggatagactgagcgaagaatctgtgaacaacgacatctcctcctggacaaagggcagaagcggagaagctctgagcctcctgaagaaaagattctcccatagacccgtgcaggagaagttcgtgtgcctgaactgcggcttcgagacacacgcagccgagcaagccgccctgaacatcgccagatcctggctgttcctgcggagccaggagtacaagaaataccagacaaacaagacaaccggcaacaccgataagagagccttcgtcgagacctggcagtccttttaccggaagaagcttaaggaggtgtggaaacctgccgtgcggtctggcggatctggcggaggctccaccagccccaagaaaaagagaaaagtctaagctgccttctgcggggcttgccttctggccatgcccttcttctctcccttgcacctgtacctcttggtctttgaataaagcctgagtaggaaggctagcaaaaaaaaaaaaaaaaaaaaaaaaaaaaaaaaaaaaaaaaaaaaaaaaaaaaaaaaaaaaaaaaaaaaaaaaaaaaaaaa

SEQ ID NO: 12623 - RNA, 5785 nt, synthetic construct
  source 1..5785: mol_type = other RNA
aggaaataagagagaaaagaagagtaagaagaaatataagagccaccatggcccctaagaagaagcgtaaagtgagccggatggaacgcctcgtctacgaggtgcggcagaagtgcagaaacatcgaggacatctgcatctcctgcggatctctgaacgtgaccctggagcacccactgttcatcggcggcatgtgccagaactgtaaaaactgttttctggagtgtgcctatcaatacgacgatgacggctaccagagctactgcaccatctgttgcggcggaagagaggtgctgatgtgtggaaataacaactgctgccggtgcttctgcgtggaatgcgtggacctgctggtgggccccggcgccgcccaggccgctattaaggaagatccttggaactgctacatgtgcggccacaagggcacatacggcctgctgagacggagagaggactggcctagcagactgcagatgttcttcgccaataaccacgaccaggagttcgacccccctaaggtgtaccctcccgtccccgccgagaagagaaagcccatccgggtcctgagcctgttcgatggcatcgccaccggtctgctggtgctgaaggacctgggcatccaggtggataggtacattgcctccgaggtgtgcgaggactccatcaccgtgggaatggtgcgtcatcagggcaagatcatgtacgtgggcgacgtgcggagcgtgacacagaagcatatccaggagtggggccctttcgacctggtgatcggcggcagcccttgcaatgacctgagcatcgtgaacccagcccggaagggcctgtacgagggaaccggcagactgttcttcgagttttacagactgctgcacgacgcccggcctaaggaaggcgacgaccggcccttcttttggctgttcgagaatgtggtggccatgggagtcagcgacaagcgggatattagccggttcctggagagcaaccccgtgatgatcgatgccaaggaagtgagcgccgcccaccgggccagatacttctggggcaatctgcctggcatgaacagacccctggccagcaccgtgaacgacaagctggagctgcaggagtgcctggagcacggccggatcgccaagttcagcaaggtgagaaccatcaccacccgaagcaacagcatcaaacaaggcaaggaccagcactttcctgtgttcatgaacgagaaggaggacatcctgtggtgtaccgagatggagagagtgttcgggttcccagtccactacacagatgtcagcaacatgtctagactggccagacagagactgctgggaagaagctggtccgtccctgtgatcagacacctgttcgcccctctgaaggagtacttcgcctgcgtgagcagcggcaacagcaacgccaacagccggggccccagcttctctagcggcctggtgccactgtccctgagagggagccacatgggccccatggagatctacaaaaccgtgagcgcctggaagcggcagcctgtgcgcgtgctgagcctgtttcggaatatcgataaagtcctgaaaagcctgggattcctggagagcggctctggctccggcggtggcaccctgaagtacgtggaggatgtgacaaacgtggtcagacgggatgtggagaagtggggccccttcgatctggtgtacggcagcacccaacccctgggcagctcttgtgaccggtgccctggctggtacatgtttcagttccaccggatcctgcagtacgccctgccgagacaggagtcccagcggccattcttttggattttcatggacaacttgctgctgaccgaggatgaccaggaaactaccactcggttcctgcagaccgaagccgtgaccctgcaggacgtgagaggccgggactaccagaacgccatgcgggtgtggtccaacatccctggactgaaaagcaagcacgcacctctgacccctaaagaagaggagtacctgcaggcccaggtgcggagcagaagcaagctggacgcccctaaggtggatctgctggtgaagaattgcctcctgcccctgagagagtacttcaagtatttcagccagaatagtctgcccctgggaggcagcggcggcggcgcccccctgctggcccccaggcccggcgagaccaggcccggctgcaggaagcccggcgccgtgagcttcgccgacgtggccgtgtacttcagccccgaggagtggggctgcctgaggcccgcccagagggccctgtacagggacgtgatgagggagacctacggccacctgggcgccctgggcttccccggccccaagcccgccctgatcagctggatggagcaggagagcgaggcctggagcggcggcccaagcagcggcgcccctcctcccagcggcggcagcccagccggctccccaacctctaccgaggagggcacctctgagtccgccacccccgagagcggccctggcacctccaccgagcccagcgagggcagcgcacccggcagccctgccggcagccccacctccacagaggagggaaccagcaccgagcccagcgaaggcagcgccccaggcaccagcaccgagcctagtgagcaggagattaaacggatcaacaagatcagaagaagacttgtgaaagacagcaacaccaagaaggccggcaagacaggccccatgaaaaccctgctggttagagtgatgacacccgatctgagagagcggctggaaaacctgagaaagaagcctgaaaatatcccccagcccatcagcaatacatctagagccaacctgaataagctgctgaccgattacaccgaaatgaagaaggcgatcctgcatgtgtactgggaagagttccagaaggaccctgtgggcctgatgagccgggtggcccagcctgccagcaagaagatcgatcagaacaagctgaaacctgagatggacgagaagggcaacctgaccaccgccggctttgcctgctctcagtgtggccagcccctgttcgtgtacaagctggagcaggtgtctgagaagggcaaggcttacaccaactacttcggacggtgcaatgtggccgagcacgaaaagctgatcctgctggcccagctgaagcccgagaaggatagcgacgaagccgtgacatatagcctgggaaagtttgggcagagggccctggatttctacagcattcatgtgaccaaggagtccacccaccccgtgaagcccctggcccagatcgccggaaacagatacgcctccggacctgtgggaaaggccctgagcgacgcatgtatgggcacaatcgcctccttcctgtctaagtaccaggacatcatcatcgaacaccagaaggtggtgaagggcaaccagaagagactggagagcctgcgggagctggccggcaaggaaaacctggaataccctagcgtgaccctgccacctcagcctcacaccaaggagggcgttgatgcctacaacgaagtgatcgcccgggtgcgaatgtgggtgaacctgaacctgtggcagaagctgaagctaagcagagatgatgccaagcctctgctgagactgaagggattcccttcctttcctctggtcgagagacaggccaacgaagtggactggtgggacatggtgtgtaacgtgaagaagctgatcaacgagaaaaaggaggatggcaaggtgttttggcagaatctggctggctacaagagacaggaagccctgagaccatacctgagcagcgaggaagatcggaagaagggaaagaaattcgctcggtaccagctgggcgacctgctgctgcacctggaaaagaagcacggcgaggactggggaaaggtgtacgacgaggcctgggagcggattgacaagaaagtggaaggcctgagcaagcacatcaagctggaagaggaacggagaagcgaggacgcccagagcaaggccgccctgaccgactggctgcgggctaaggccagcttcgtgatcgagggcctgaaggaggccgacaaggacgagttctgcagatgcgagctgaagctgcagaagtggtacggggacctgcggggaaagcccttcgccatcgaagccgagaacagcatcctggacatcagcggcttcagcaagcagtacaactgtgccttcatctggcagaaggacggcgtgaagaagctgaacctgtacctgatcatcaactacttcaagggcggcaagctgcggttcaagaagatcaaacctgaagccttcgaagccaacagattctacaccgtgatcaacaaaaagagcggcgagatcgtgcccatggaggtgaacttcaacttcgacgaccccaacctgatcatcctgcctctggcctttggcaagagacagggcagagaattcatctggaacgacctgctgtccctggaaaccggcagcctgaagctggccaacggaagagtgatcgagaagacactgtacaacagaagaacccggcaggatgagcctgccctgttcgtggccctgaccttcgagcggcgggaggtcctggactcctccaatatcaaaccaatgaacctgatcggcgtggcaagaggcgaaaacatccccgccgtgatcgccctgaccgaccccgagggctgcccactgagccggtttaaggatagcctgggaaacccaacccacatcctgagaatcggcgagagctataaggagaagcagcggaccatccaggccaagaaggaggtggagcagcggagagccggcggctacagccggaagtacgccagcaaagccaagaatctggcagacgatatggtgagaaacaccgctagagatctgctgtactacgccgtgacccaggatgccatgctgatcttcgccaacctgagccggggcttcggccggcagggcaagcggaccttcatggccgagagacagtacacacggatggaggactggctgaccgccaagctggcctacgagggcctgagcaagacctacctgtccaagacactggcccagtacacctccaagacatgcagcaactgtgggtttaccatcaccagcgccgactacgacagggtgctggagaagctgaagaagacagcaacaggctggatgaccacaattaacggcaaggagctgaaggtggagggccagattacctactacaacagatacaagagacagaacgtagtcaaggacctgtccgtcgagctggatagactgagcgaagaatctgtgaacaacgacatctcctcctggacaaagggcagaagcggagaagctctgagcctcctgaagaaaagattctcccatagacccgtgcaggagaagttcgtgtgcctgaactgcggcttcgagacacacgcagccgagcaagccgccctgaacatcgccagatcctggctgttcctgcggagccaggagtacaagaaataccagacaaacaagacaaccggcaacaccgataagagagccttcgtcgagacctggcagtccttttaccggaagaagcttaaggaggtgtggaaacctgccgtgcggtctggcggatctggcggaggctccaccagccccaagaaaaagagaaaagtctaagctgccttctgcggggcttgccttctggccatgcccttcttctctcccttgcacctgtacctcttggtctttgaataaagcctgagtaggaaggctagcaaaaaaaaaaaaaaaaaaaaaaaaaaaaaaaaaaaaaaaaaaaaaaaaaaaaaaaaaaaaaaaaaaaaaaaaaaaaaaaa

SEQ ID NO: 12624 - RNA, 5785 nt, synthetic construct
  source 1..5785: mol_type = other RNA
aggaaataagagagaaaagaagagtaagaagaaatataagagccaccatggcccctaagaagaagcgtaaagtgagccggatggaacgcctcgtctacgaggtgcggcagaagtgcagaaacatcgaggacatctgcatctcctgcggatctctgaacgtgaccctggagcacccactgttcatcggcggcatgtgccagaactgtaaaaactgttttctggagtgtgcctatcaatacgacgatgacggctaccagagctactgcaccatctgttgcggcggaagagaggtgctgatgtgtggaaataacaactgctgccggtgcttctgcgtggaatgcgtggacctgctggtgggccccggcgccgcccaggccgctattaaggaagatccttggaactgctacatgtgcggccacaagggcacatacggcctgctgagacggagagaggactggcctagcagactgcagatgttcttcgccaataaccacgaccaggagttcgacccccctaaggtgtaccctcccgtccccgccgagaagagaaagcccatccgggtcctgagcctgttcgatggcatcgccaccggtctgctggtgctgaaggacctgggcatccaggtggataggtacattgcctccgaggtgtgcgaggactccatcaccgtgggaatggtgcgtcatcagggcaagatcatgtacgtgggcgacgtgcggagcgtgacacagaagcatatccaggagtggggccctttcgacctggtgatcggcggcagcccttgcaatgacctgagcatcgtgaacccagcccggaagggcctgtacgagggaaccggcagactgttcttcgagttttacagactgctgcacgacgcccggcctaaggaaggcgacgaccggcccttcttttggctgttcgagaatgtggtggccatgggagtcagcgacaagcgggatattagccggttcctggagagcaaccccgtgatgatcgatgccaaggaagtgagcgccgcccaccgggccagatacttctggggcaatctgcctggcatgaacagacccctggccagcaccgtgaacgacaagctggagctgcaggagtgcctggagcacggccggatcgccaagttcagcaaggtgagaaccatcaccacccgaagcaacagcatcaaacaaggcaaggaccagcactttcctgtgttcatgaacgagaaggaggacatcctgtggtgtaccgagatggagagagtgttcgggttcccagtccactacacagatgtcagcaacatgtctagactggccagacagagactgctgggaagaagctggtccgtccctgtgatcagacacctgttcgcccctctgaaggagtacttcgcctgcgtgagcagcggcaacagcaacgccaacagccggggccccagcttctctagcggcctggtgccactgtccctgagagggagccacatgggccccatggagatctacaaaaccgtgagcgcctggaagcggcagcctgtgcgcgtgctgagcctgtttcggaatatcgataaagtcctgaaaagcctgggattcctggagagcggctctggctccggcggtggcaccctgaagtacgtggaggatgtgacaaacgtggtcagacgggatgtggagaagtggggccccttcgatctggtgtacggcagcacccaacccctgggcagctcttgtgaccggtgccctggctggtacatgtttcagttccaccggatcctgcagtacgccctgccgagacaggagtcccagcggccattcttttggattttcatggacaacttgctgctgaccgaggatgaccaggaaactaccactcggttcctgcagaccgaagccgtgaccctgcaggacgtgagaggccgggactaccagaacgccatgcgggtgtggtccaacatccctggactgaaaagcaagcacgcacctctgacccctaaagaagaggagtacctgcaggcccaggtgcggagcagaagcaagctggacgcccctaaggtggatctgctggtgaagaattgcctcctgcccctgagagagtacttcaagtatttcagccagaatagtctgcccctgggaggcagcggcggcggcttccagggcctggtgaccttcgaggaggtggccgtgtacttcaccagggaggagggcgccctgctggaccccacccagagggccctgtacagggacgtgatgcaggagaactacgagaccgtggtgctgctgggcaaggagagcttcagcaagcccgacgtgatcagccagctggagaggggcgaggagccctgggtgcccgacctgcagggcagcgagaaggagaggcccgaggagaacttcggcggcccaagcagcggcgcccctcctcccagcggcggcagcccagccggctccccaacctctaccgaggagggcacctctgagtccgccacccccgagagcggccctggcacctccaccgagcccagcgagggcagcgcacccggcagccctgccggcagccccacctccacagaggagggaaccagcaccgagcccagcgaaggcagcgccccaggcaccagcaccgagcctagtgagcaggagattaaacggatcaacaagatcagaagaagacttgtgaaagacagcaacaccaagaaggccggcaagacaggccccatgaaaaccctgctggttagagtgatgacacccgatctgagagagcggctggaaaacctgagaaagaagcctgaaaatatcccccagcccatcagcaatacatctagagccaacctgaataagctgctgaccgattacaccgaaatgaagaaggcgatcctgcatgtgtactgggaagagttccagaaggaccctgtgggcctgatgagccgggtggcccagcctgccagcaagaagatcgatcagaacaagctgaaacctgagatggacgagaagggcaacctgaccaccgccggctttgcctgctctcagtgtggccagcccctgttcgtgtacaagctggagcaggtgtctgagaagggcaaggcttacaccaactacttcggacggtgcaatgtggccgagcacgaaaagctgatcctgctggcccagctgaagcccgagaaggatagcgacgaagccgtgacatatagcctgggaaagtttgggcagagggccctggatttctacagcattcatgtgaccaaggagtccacccaccccgtgaagcccctggcccagatcgccggaaacagatacgcctccggacctgtgggaaaggccctgagcgacgcatgtatgggcacaatcgcctccttcctgtctaagtaccaggacatcatcatcgaacaccagaaggtggtgaagggcaaccagaagagactggagagcctgcgggagctggccggcaaggaaaacctggaataccctagcgtgaccctgccacctcagcctcacaccaaggagggcgttgatgcctacaacgaagtgatcgcccgggtgcgaatgtgggtgaacctgaacctgtggcagaagctgaagctaagcagagatgatgccaagcctctgctgagactgaagggattcccttcctttcctctggtcgagagacaggccaacgaagtggactggtgggacatggtgtgtaacgtgaagaagctgatcaacgagaaaaaggaggatggcaaggtgttttggcagaatctggctggctacaagagacaggaagccctgagaccatacctgagcagcgaggaagatcggaagaagggaaagaaattcgctcggtaccagctgggcgacctgctgctgcacctggaaaagaagcacggcgaggactggggaaaggtgtacgacgaggcctgggagcggattgacaagaaagtggaaggcctgagcaagcacatcaagctggaagaggaacggagaagcgaggacgcccagagcaaggccgccctgaccgactggctgcgggctaaggccagcttcgtgatcgagggcctgaaggaggccgacaaggacgagttctgcagatgcgagctgaagctgcagaagtggtacggggacctgcggggaaagcccttcgccatcgaagccgagaacagcatcctggacatcagcggcttcagcaagcagtacaactgtgccttcatctggcagaaggacggcgtgaagaagctgaacctgtacctgatcatcaactacttcaagggcggcaagctgcggttcaagaagatcaaacctgaagccttcgaagccaacagattctacaccgtgatcaacaaaaagagcggcgagatcgtgcccatggaggtgaacttcaacttcgacgaccccaacctgatcatcctgcctctggcctttggcaagagacagggcagagaattcatctggaacgacctgctgtccctggaaaccggcagcctgaagctggccaacggaagagtgatcgagaagacactgtacaacagaagaacccggcaggatgagcctgccctgttcgtggccctgaccttcgagcggcgggaggtcctggactcctccaatatcaaaccaatgaacctgatcggcgtggcaagaggcgaaaacatccccgccgtgatcgccctgaccgaccccgagggctgcccactgagccggtttaaggatagcctgggaaacccaacccacatcctgagaatcggcgagagctataaggagaagcagcggaccatccaggccaagaaggaggtggagcagcggagagccggcggctacagccggaagtacgccagcaaagccaagaatctggcagacgatatggtgagaaacaccgctagagatctgctgtactacgccgtgacccaggatgccatgctgatcttcgccaacctgagccggggcttcggccggcagggcaagcggaccttcatggccgagagacagtacacacggatggaggactggctgaccgccaagctggcctacgagggcctgagcaagacctacctgtccaagacactggcccagtacacctccaagacatgcagcaactgtgggtttaccatcaccagcgccgactacgacagggtgctggagaagctgaagaagacagcaacaggctggatgaccacaattaacggcaaggagctgaaggtggagggccagattacctactacaacagatacaagagacagaacgtagtcaaggacctgtccgtcgagctggatagactgagcgaagaatctgtgaacaacgacatctcctcctggacaaagggcagaagcggagaagctctgagcctcctgaagaaaagattctcccatagacccgtgcaggagaagttcgtgtgcctgaactgcggcttcgagacacacgcagccgagcaagccgccctgaacatcgccagatcctggctgttcctgcggagccaggagtacaagaaataccagacaaacaagacaaccggcaacaccgataagagagccttcgtcgagacctggcagtccttttaccggaagaagcttaaggaggtgtggaaacctgccgtgcggtctggcggatctggcggaggctccaccagccccaagaaaaagagaaaagtctaagctgccttctgcggggcttgccttctggccatgcccttcttctctcccttgcacctgtacctcttggtctttgaataaagcctgagtaggaaggctagcaaaaaaaaaaaaaaaaaaaaaaaaaaaaaaaaaaaaaaaaaaaaaaaaaaaaaaaaaaaaaaaaaaaaaaaaaaaaaaaa

SEQ ID NO: 12625 - RNA, 5785 nt, synthetic construct
  source 1..5785: mol_type = other RNA
aggaaataagagagaaaagaagagtaagaagaaatataagagccaccatggcccctaagaagaagcgtaaagtgagccggatggaacgcctcgtctacgaggtgcggcagaagtgcagaaacatcgaggacatctgcatctcctgcggatctctgaacgtgaccctggagcacccactgttcatcggcggcatgtgccagaactgtaaaaactgttttctggagtgtgcctatcaatacgacgatgacggctaccagagctactgcaccatctgttgcggcggaagagaggtgctgatgtgtggaaataacaactgctgccggtgcttctgcgtggaatgcgtggacctgctggtgggccccggcgccgcccaggccgctattaaggaagatccttggaactgctacatgtgcggccacaagggcacatacggcctgctgagacggagagaggactggcctagcagactgcagatgttcttcgccaataaccacgaccaggagttcgacccccctaaggtgtaccctcccgtccccgccgagaagagaaagcccatccgggtcctgagcctgttcgatggcatcgccaccggtctgctggtgctgaaggacctgggcatccaggtggataggtacattgcctccgaggtgtgcgaggactccatcaccgtgggaatggtgcgtcatcagggcaagatcatgtacgtgggcgacgtgcggagcgtgacacagaagcatatccaggagtggggccctttcgacctggtgatcggcggcagcccttgcaatgacctgagcatcgtgaacccagcccggaagggcctgtacgagggaaccggcagactgttcttcgagttttacagactgctgcacgacgcccggcctaaggaaggcgacgaccggcccttcttttggctgttcgagaatgtggtggccatgggagtcagcgacaagcgggatattagccggttcctggagagcaaccccgtgatgatcgatgccaaggaagtgagcgccgcccaccgggccagatacttctggggcaatctgcctggcatgaacagacccctggccagcaccgtgaacgacaagctggagctgcaggagtgcctggagcacggccggatcgccaagttcagcaaggtgagaaccatcaccacccgaagcaacagcatcaaacaaggcaaggaccagcactttcctgtgttcatgaacgagaaggaggacatcctgtggtgtaccgagatggagagagtgttcgggttcccagtccactacacagatgtcagcaacatgtctagactggccagacagagactgctgggaagaagctggtccgtccctgtgatcagacacctgttcgcccctctgaaggagtacttcgcctgcgtgagcagcggcaacagcaacgccaacagccggggccccagcttctctagcggcctggtgccactgtccctgagagggagccacatgggccccatggagatctacaaaaccgtgagcgcctggaagcggcagcctgtgcgcgtgctgagcctgtttcggaatatcgataaagtcctgaaaagcctgggattcctggagagcggctctggctccggcggtggcaccctgaagtacgtggaggatgtgacaaacgtggtcagacgggatgtggagaagtggggccccttcgatctggtgtacggcagcacccaacccctgggcagctcttgtgaccggtgccctggctggtacatgtttcagttccaccggatcctgcagtacgccctgccgagacaggagtcccagcggccattcttttggattttcatggacaacttgctgctgaccgaggatgaccaggaaactaccactcggttcctgcagaccgaagccgtgaccctgcaggacgtgagaggccgggactaccagaacgccatgcgggtgtggtccaacatccctggactgaaaagcaagcacgcacctctgacccctaaagaagaggagtacctgcaggcccaggtgcggagcagaagcaagctggacgcccctaaggtggatctgctggtgaagaattgcctcctgcccctgagagagtacttcaagtatttcagccagaatagtctgcccctgggaggcagcggcggcggccaggccgaggtgaccttcgaggacgtggccgtgctgctgagcagggaggagtggggcaggctgggccccgtgcagaagggcctgtacagggacgtgatgctggagacctacaggaacctggtgagcctgggcggcggccccgccggccccaagcccgaggtgatcacccagctggagaggggcgacgagccctgggtgcccgacgtgcagggcagggagaggctgaccatcgacggcagcgccggcggcccaagcagcggcgcccctcctcccagcggcggcagcccagccggctccccaacctctaccgaggagggcacctctgagtccgccacccccgagagcggccctggcacctccaccgagcccagcgagggcagcgcacccggcagccctgccggcagccccacctccacagaggagggaaccagcaccgagcccagcgaaggcagcgccccaggcaccagcaccgagcctagtgagcaggagattaaacggatcaacaagatcagaagaagacttgtgaaagacagcaacaccaagaaggccggcaagacaggccccatgaaaaccctgctggttagagtgatgacacccgatctgagagagcggctggaaaacctgagaaagaagcctgaaaatatcccccagcccatcagcaatacatctagagccaacctgaataagctgctgaccgattacaccgaaatgaagaaggcgatcctgcatgtgtactgggaagagttccagaaggaccctgtgggcctgatgagccgggtggcccagcctgccagcaagaagatcgatcagaacaagctgaaacctgagatggacgagaagggcaacctgaccaccgccggctttgcctgctctcagtgtggccagcccctgttcgtgtacaagctggagcaggtgtctgagaagggcaaggcttacaccaactacttcggacggtgcaatgtggccgagcacgaaaagctgatcctgctggcccagctgaagcccgagaaggatagcgacgaagccgtgacatatagcctgggaaagtttgggcagagggccctggatttctacagcattcatgtgaccaaggagtccacccaccccgtgaagcccctggcccagatcgccggaaacagatacgcctccggacctgtgggaaaggccctgagcgacgcatgtatgggcacaatcgcctccttcctgtctaagtaccaggacatcatcatcgaacaccagaaggtggtgaagggcaaccagaagagactggagagcctgcgggagctggccggcaaggaaaacctggaataccctagcgtgaccctgccacctcagcctcacaccaaggagggcgttgatgcctacaacgaagtgatcgcccgggtgcgaatgtgggtgaacctgaacctgtggcagaagctgaagctaagcagagatgatgccaagcctctgctgagactgaagggattcccttcctttcctctggtcgagagacaggccaacgaagtggactggtgggacatggtgtgtaacgtgaagaagctgatcaacgagaaaaaggaggatggcaaggtgttttggcagaatctggctggctacaagagacaggaagccctgagaccatacctgagcagcgaggaagatcggaagaagggaaagaaattcgctcggtaccagctgggcgacctgctgctgcacctggaaaagaagcacggcgaggactggggaaaggtgtacgacgaggcctgggagcggattgacaagaaagtggaaggcctgagcaagcacatcaagctggaagaggaacggagaagcgaggacgcccagagcaaggccgccctgaccgactggctgcgggctaaggccagcttcgtgatcgagggcctgaaggaggccgacaaggacgagttctgcagatgcgagctgaagctgcagaagtggtacggggacctgcggggaaagcccttcgccatcgaagccgagaacagcatcctggacatcagcggcttcagcaagcagtacaactgtgccttcatctggcagaaggacggcgtgaagaagctgaacctgtacctgatcatcaactacttcaagggcggcaagctgcggttcaagaagatcaaacctgaagccttcgaagccaacagattctacaccgtgatcaacaaaaagagcggcgagatcgtgcccatggaggtgaacttcaacttcgacgaccccaacctgatcatcctgcctctggcctttggcaagagacagggcagagaattcatctggaacgacctgctgtccctggaaaccggcagcctgaagctggccaacggaagagtgatcgagaagacactgtacaacagaagaacccggcaggatgagcctgccctgttcgtggccctgaccttcgagcggcgggaggtcctggactcctccaatatcaaaccaatgaacctgatcggcgtggcaagaggcgaaaacatccccgccgtgatcgccctgaccgaccccgagggctgcccactgagccggtttaaggatagcctgggaaacccaacccacatcctgagaatcggcgagagctataaggagaagcagcggaccatccaggccaagaaggaggtggagcagcggagagccggcggctacagccggaagtacgccagcaaagccaagaatctggcagacgatatggtgagaaacaccgctagagatctgctgtactacgccgtgacccaggatgccatgctgatcttcgccaacctgagccggggcttcggccggcagggcaagcggaccttcatggccgagagacagtacacacggatggaggactggctgaccgccaagctggcctacgagggcctgagcaagacctacctgtccaagacactggcccagtacacctccaagacatgcagcaactgtgggtttaccatcaccagcgccgactacgacagggtgctggagaagctgaagaagacagcaacaggctggatgaccacaattaacggcaaggagctgaaggtggagggccagattacctactacaacagatacaagagacagaacgtagtcaaggacctgtccgtcgagctggatagactgagcgaagaatctgtgaacaacgacatctcctcctggacaaagggcagaagcggagaagctctgagcctcctgaagaaaagattctcccatagacccgtgcaggagaagttcgtgtgcctgaactgcggcttcgagacacacgcagccgagcaagccgccctgaacatcgccagatcctggctgttcctgcggagccaggagtacaagaaataccagacaaacaagacaaccggcaacaccgataagagagccttcgtcgagacctggcagtccttttaccggaagaagcttaaggaggtgtggaaacctgccgtgcggtctggcggatctggcggaggctccaccagccccaagaaaaagagaaaagtctaagctgccttctgcggggcttgccttctggccatgcccttcttctctcccttgcacctgtacctcttggtctttgaataaagcctgagtaggaaggctagcaaaaaaaaaaaaaaaaaaaaaaaaaaaaaaaaaaaaaaaaaaaaaaaaaaaaaaaaaaaaaaaaaaaaaaaaaaaaaaaa

SEQ ID NO: 12626 - RNA, 5785 nt, synthetic construct
  source 1..5785: mol_type = other RNA
aggaaataagagagaaaagaagagtaagaagaaatataagagccaccatggcccctaagaagaagcgtaaagtgagccggatggaacgcctcgtctacgaggtgcggcagaagtgcagaaacatcgaggacatctgcatctcctgcggatctctgaacgtgaccctggagcacccactgttcatcggcggcatgtgccagaactgtaaaaactgttttctggagtgtgcctatcaatacgacgatgacggctaccagagctactgcaccatctgttgcggcggaagagaggtgctgatgtgtggaaataacaactgctgccggtgcttctgcgtggaatgcgtggacctgctggtgggccccggcgccgcccaggccgctattaaggaagatccttggaactgctacatgtgcggccacaagggcacatacggcctgctgagacggagagaggactggcctagcagactgcagatgttcttcgccaataaccacgaccaggagttcgacccccctaaggtgtaccctcccgtccccgccgagaagagaaagcccatccgggtcctgagcctgttcgatggcatcgccaccggtctgctggtgctgaaggacctgggcatccaggtggataggtacattgcctccgaggtgtgcgaggactccatcaccgtgggaatggtgcgtcatcagggcaagatcatgtacgtgggcgacgtgcggagcgtgacacagaagcatatccaggagtggggccctttcgacctggtgatcggcggcagcccttgcaatgacctgagcatcgtgaacccagcccggaagggcctgtacgagggaaccggcagactgttcttcgagttttacagactgctgcacgacgcccggcctaaggaaggcgacgaccggcccttcttttggctgttcgagaatgtggtggccatgggagtcagcgacaagcgggatattagccggttcctggagagcaaccccgtgatgatcgatgccaaggaagtgagcgccgcccaccgggccagatacttctggggcaatctgcctggcatgaacagacccctggccagcaccgtgaacgacaagctggagctgcaggagtgcctggagcacggccggatcgccaagttcagcaaggtgagaaccatcaccacccgaagcaacagcatcaaacaaggcaaggaccagcactttcctgtgttcatgaacgagaaggaggacatcctgtggtgtaccgagatggagagagtgttcgggttcccagtccactacacagatgtcagcaacatgtctagactggccagacagagactgctgggaagaagctggtccgtccctgtgatcagacacctgttcgcccctctgaaggagtacttcgcctgcgtgagcagcggcaacagcaacgccaacagccggggccccagcttctctagcggcctggtgccactgtccctgagagggagccacatgggccccatggagatctacaaaaccgtgagcgcctggaagcggcagcctgtgcgcgtgctgagcctgtttcggaatatcgataaagtcctgaaaagcctgggattcctggagagcggctctggctccggcggtggcaccctgaagtacgtggaggatgtgacaaacgtggtcagacgggatgtggagaagtggggccccttcgatctggtgtacggcagcacccaacccctgggcagctcttgtgaccggtgccctggctggtacatgtttcagttccaccggatcctgcagtacgccctgccgagacaggagtcccagcggccattcttttggattttcatggacaacttgctgctgaccgaggatgaccaggaaactaccactcggttcctgcagaccgaagccgtgaccctgcaggacgtgagaggccgggactaccagaacgccatgcgggtgtggtccaacatccctggactgaaaagcaagcacgcacctctgacccctaaagaagaggagtacctgcaggcccaggtgcggagcagaagcaagctggacgcccctaaggtggatctgctggtgaagaattgcctcctgcccctgagagagtacttcaagtatttcagccagaatagtctgcccctgggaggcagcggcggcggcaaggagctgcccagcgtgttcgaggacgtggccgtgtacttcaccagggaggagtggggcatgctggacaagaggcagaaggagctgtacagggacgtgatgaggatgaactacgagctgctggccagcctgggccccgccgccgccaagcccgacctgatcagcaagctggagaggagggccgccccctggatcaaggaccccaacggccccaagtggggcgagggccacccccccggcaagggcggcccaagcagcggcgcccctcctcccagcggcggcagcccagccggctccccaacctctaccgaggagggcacctctgagtccgccacccccgagagcggccctggcacctccaccgagcccagcgagggcagcgcacccggcagccctgccggcagccccacctccacagaggagggaaccagcaccgagcccagcgaaggcagcgccccaggcaccagcaccgagcctagtgagcaggagattaaacggatcaacaagatcagaagaagacttgtgaaagacagcaacaccaagaaggccggcaagacaggccccatgaaaaccctgctggttagagtgatgacacccgatctgagagagcggctggaaaacctgagaaagaagcctgaaaatatcccccagcccatcagcaatacatctagagccaacctgaataagctgctgaccgattacaccgaaatgaagaaggcgatcctgcatgtgtactgggaagagttccagaaggaccctgtgggcctgatgagccgggtggcccagcctgccagcaagaagatcgatcagaacaagctgaaacctgagatggacgagaagggcaacctgaccaccgccggctttgcctgctctcagtgtggccagcccctgttcgtgtacaagctggagcaggtgtctgagaagggcaaggcttacaccaactacttcggacggtgcaatgtggccgagcacgaaaagctgatcctgctggcccagctgaagcccgagaaggatagcgacgaagccgtgacatatagcctgggaaagtttgggcagagggccctggatttctacagcattcatgtgaccaaggagtccacccaccccgtgaagcccctggcccagatcgccggaaacagatacgcctccggacctgtgggaaaggccctgagcgacgcatgtatgggcacaatcgcctccttcctgtctaagtaccaggacatcatcatcgaacaccagaaggtggtgaagggcaaccagaagagactggagagcctgcgggagctggccggcaaggaaaacctggaataccctagcgtgaccctgccacctcagcctcacaccaaggagggcgttgatgcctacaacgaagtgatcgcccgggtgcgaatgtgggtgaacctgaacctgtggcagaagctgaagctaagcagagatgatgccaagcctctgctgagactgaagggattcccttcctttcctctggtcgagagacaggccaacgaagtggactggtgggacatggtgtgtaacgtgaagaagctgatcaacgagaaaaaggaggatggcaaggtgttttggcagaatctggctggctacaagagacaggaagccctgagaccatacctgagcagcgaggaagatcggaagaagggaaagaaattcgctcggtaccagctgggcgacctgctgctgcacctggaaaagaagcacggcgaggactggggaaaggtgtacgacgaggcctgggagcggattgacaagaaagtggaaggcctgagcaagcacatcaagctggaagaggaacggagaagcgaggacgcccagagcaaggccgccctgaccgactggctgcgggctaaggccagcttcgtgatcgagggcctgaaggaggccgacaaggacgagttctgcagatgcgagctgaagctgcagaagtggtacggggacctgcggggaaagcccttcgccatcgaagccgagaacagcatcctggacatcagcggcttcagcaagcagtacaactgtgccttcatctggcagaaggacggcgtgaagaagctgaacctgtacctgatcatcaactacttcaagggcggcaagctgcggttcaagaagatcaaacctgaagccttcgaagccaacagattctacaccgtgatcaacaaaaagagcggcgagatcgtgcccatggaggtgaacttcaacttcgacgaccccaacctgatcatcctgcctctggcctttggcaagagacagggcagagaattcatctggaacgacctgctgtccctggaaaccggcagcctgaagctggccaacggaagagtgatcgagaagacactgtacaacagaagaacccggcaggatgagcctgccctgttcgtggccctgaccttcgagcggcgggaggtcctggactcctccaatatcaaaccaatgaacctgatcggcgtggcaagaggcgaaaacatccccgccgtgatcgccctgaccgaccccgagggctgcccactgagccggtttaaggatagcctgggaaacccaacccacatcctgagaatcggcgagagctataaggagaagcagcggaccatccaggccaagaaggaggtggagcagcggagagccggcggctacagccggaagtacgccagcaaagccaagaatctggcagacgatatggtgagaaacaccgctagagatctgctgtactacgccgtgacccaggatgccatgctgatcttcgccaacctgagccggggcttcggccggcagggcaagcggaccttcatggccgagagacagtacacacggatggaggactggctgaccgccaagctggcctacgagggcctgagcaagacctacctgtccaagacactggcccagtacacctccaagacatgcagcaactgtgggtttaccatcaccagcgccgactacgacagggtgctggagaagctgaagaagacagcaacaggctggatgaccacaattaacggcaaggagctgaaggtggagggccagattacctactacaacagatacaagagacagaacgtagtcaaggacctgtccgtcgagctggatagactgagcgaagaatctgtgaacaacgacatctcctcctggacaaagggcagaagcggagaagctctgagcctcctgaagaaaagattctcccatagacccgtgcaggagaagttcgtgtgcctgaactgcggcttcgagacacacgcagccgagcaagccgccctgaacatcgccagatcctggctgttcctgcggagccaggagtacaagaaataccagacaaacaagacaaccggcaacaccgataagagagccttcgtcgagacctggcagtccttttaccggaagaagcttaaggaggtgtggaaacctgccgtgcggtctggcggatctggcggaggctccaccagccccaagaaaaagagaaaagtctaagctgccttctgcggggcttgccttctggccatgcccttcttctctcccttgcacctgtacctcttggtctttgaataaagcctgagtaggaaggctagcaaaaaaaaaaaaaaaaaaaaaaaaaaaaaaaaaaaaaaaaaaaaaaaaaaaaaaaaaaaaaaaaaaaaaaaaaaaaaaaa

SEQ ID NO: 12627 - RNA, 5785 nt, synthetic construct
  source 1..5785: mol_type = other RNA
aggaaataagagagaaaagaagagtaagaagaaatataagagccaccatggcccctaagaagaagcgtaaagtgagccggatggaacgcctcgtctacgaggtgcggcagaagtgcagaaacatcgaggacatctgcatctcctgcggatctctgaacgtgaccctggagcacccactgttcatcggcggcatgtgccagaactgtaaaaactgttttctggagtgtgcctatcaatacgacgatgacggctaccagagctactgcaccatctgttgcggcggaagagaggtgctgatgtgtggaaataacaactgctgccggtgcttctgcgtggaatgcgtggacctgctggtgggccccggcgccgcccaggccgctattaaggaagatccttggaactgctacatgtgcggccacaagggcacatacggcctgctgagacggagagaggactggcctagcagactgcagatgttcttcgccaataaccacgaccaggagttcgacccccctaaggtgtaccctcccgtccccgccgagaagagaaagcccatccgggtcctgagcctgttcgatggcatcgccaccggtctgctggtgctgaaggacctgggcatccaggtggataggtacattgcctccgaggtgtgcgaggactccatcaccgtgggaatggtgcgtcatcagggcaagatcatgtacgtgggcgacgtgcggagcgtgacacagaagcatatccaggagtggggccctttcgacctggtgatcggcggcagcccttgcaatgacctgagcatcgtgaacccagcccggaagggcctgtacgagggaaccggcagactgttcttcgagttttacagactgctgcacgacgcccggcctaaggaaggcgacgaccggcccttcttttggctgttcgagaatgtggtggccatgggagtcagcgacaagcgggatattagccggttcctggagagcaaccccgtgatgatcgatgccaaggaagtgagcgccgcccaccgggccagatacttctggggcaatctgcctggcatgaacagacccctggccagcaccgtgaacgacaagctggagctgcaggagtgcctggagcacggccggatcgccaagttcagcaaggtgagaaccatcaccacccgaagcaacagcatcaaacaaggcaaggaccagcactttcctgtgttcatgaacgagaaggaggacatcctgtggtgtaccgagatggagagagtgttcgggttcccagtccactacacagatgtcagcaacatgtctagactggccagacagagactgctgggaagaagctggtccgtccctgtgatcagacacctgttcgcccctctgaaggagtacttcgcctgcgtgagcagcggcaacagcaacgccaacagccggggccccagcttctctagcggcctggtgccactgtccctgagagggagccacatgggccccatggagatctacaaaaccgtgagcgcctggaagcggcagcctgtgcgcgtgctgagcctgtttcggaatatcgataaagtcctgaaaagcctgggattcctggagagcggctctggctccggcggtggcaccctgaagtacgtggaggatgtgacaaacgtggtcagacgggatgtggagaagtggggccccttcgatctggtgtacggcagcacccaacccctgggcagctcttgtgaccggtgccctggctggtacatgtttcagttccaccggatcctgcagtacgccctgccgagacaggagtcccagcggccattcttttggattttcatggacaacttgctgctgaccgaggatgaccaggaaactaccactcggttcctgcagaccgaagccgtgaccctgcaggacgtgagaggccgggactaccagaacgccatgcgggtgtggtccaacatccctggactgaaaagcaagcacgcacctctgacccctaaagaagaggagtacctgcaggcccaggtgcggagcagaagcaagctggacgcccctaaggtggatctgctggtgaagaattgcctcctgcccctgagagagtacttcaagtatttcagccagaatagtctgcccctgggaggcagcggcggcggcggcaaggagctgctgagcttcgaggacgtggccatgtacttcaccagggaggagtggggcaggctggactggggccagaaggacctgtacagggacgtgatgctggagaactacaggaacatggtgctgctgggcttccagttccccaagcccgaggtgatctgccagctggagaactgggacgagcagtggatcctggacctgcccagggccggcagcaggaaggccagcggcagcgcctgcggcggcccaagcagcggcgcccctcctcccagcggcggcagcccagccggctccccaacctctaccgaggagggcacctctgagtccgccacccccgagagcggccctggcacctccaccgagcccagcgagggcagcgcacccggcagccctgccggcagccccacctccacagaggagggaaccagcaccgagcccagcgaaggcagcgccccaggcaccagcaccgagcctagtgagcaggagattaaacggatcaacaagatcagaagaagacttgtgaaagacagcaacaccaagaaggccggcaagacaggccccatgaaaaccctgctggttagagtgatgacacccgatctgagagagcggctggaaaacctgagaaagaagcctgaaaatatcccccagcccatcagcaatacatctagagccaacctgaataagctgctgaccgattacaccgaaatgaagaaggcgatcctgcatgtgtactgggaagagttccagaaggaccctgtgggcctgatgagccgggtggcccagcctgccagcaagaagatcgatcagaacaagctgaaacctgagatggacgagaagggcaacctgaccaccgccggctttgcctgctctcagtgtggccagcccctgttcgtgtacaagctggagcaggtgtctgagaagggcaaggcttacaccaactacttcggacggtgcaatgtggccgagcacgaaaagctgatcctgctggcccagctgaagcccgagaaggatagcgacgaagccgtgacatatagcctgggaaagtttgggcagagggccctggatttctacagcattcatgtgaccaaggagtccacccaccccgtgaagcccctggcccagatcgccggaaacagatacgcctccggacctgtgggaaaggccctgagcgacgcatgtatgggcacaatcgcctccttcctgtctaagtaccaggacatcatcatcgaacaccagaaggtggtgaagggcaaccagaagagactggagagcctgcgggagctggccggcaaggaaaacctggaataccctagcgtgaccctgccacctcagcctcacaccaaggagggcgttgatgcctacaacgaagtgatcgcccgggtgcgaatgtgggtgaacctgaacctgtggcagaagctgaagctaagcagagatgatgccaagcctctgctgagactgaagggattcccttcctttcctctggtcgagagacaggccaacgaagtggactggtgggacatggtgtgtaacgtgaagaagctgatcaacgagaaaaaggaggatggcaaggtgttttggcagaatctggctggctacaagagacaggaagccctgagaccatacctgagcagcgaggaagatcggaagaagggaaagaaattcgctcggtaccagctgggcgacctgctgctgcacctggaaaagaagcacggcgaggactggggaaaggtgtacgacgaggcctgggagcggattgacaagaaagtggaaggcctgagcaagcacatcaagctggaagaggaacggagaagcgaggacgcccagagcaaggccgccctgaccgactggctgcgggctaaggccagcttcgtgatcgagggcctgaaggaggccgacaaggacgagttctgcagatgcgagctgaagctgcagaagtggtacggggacctgcggggaaagcccttcgccatcgaagccgagaacagcatcctggacatcagcggcttcagcaagcagtacaactgtgccttcatctggcagaaggacggcgtgaagaagctgaacctgtacctgatcatcaactacttcaagggcggcaagctgcggttcaagaagatcaaacctgaagccttcgaagccaacagattctacaccgtgatcaacaaaaagagcggcgagatcgtgcccatggaggtgaacttcaacttcgacgaccccaacctgatcatcctgcctctggcctttggcaagagacagggcagagaattcatctggaacgacctgctgtccctggaaaccggcagcctgaagctggccaacggaagagtgatcgagaagacactgtacaacagaagaacccggcaggatgagcctgccctgttcgtggccctgaccttcgagcggcgggaggtcctggactcctccaatatcaaaccaatgaacctgatcggcgtggcaagaggcgaaaacatccccgccgtgatcgccctgaccgaccccgagggctgcccactgagccggtttaaggatagcctgggaaacccaacccacatcctgagaatcggcgagagctataaggagaagcagcggaccatccaggccaagaaggaggtggagcagcggagagccggcggctacagccggaagtacgccagcaaagccaagaatctggcagacgatatggtgagaaacaccgctagagatctgctgtactacgccgtgacccaggatgccatgctgatcttcgccaacctgagccggggcttcggccggcagggcaagcggaccttcatggccgagagacagtacacacggatggaggactggctgaccgccaagctggcctacgagggcctgagcaagacctacctgtccaagacactggcccagtacacctccaagacatgcagcaactgtgggtttaccatcaccagcgccgactacgacagggtgctggagaagctgaagaagacagcaacaggctggatgaccacaattaacggcaaggagctgaaggtggagggccagattacctactacaacagatacaagagacagaacgtagtcaaggacctgtccgtcgagctggatagactgagcgaagaatctgtgaacaacgacatctcctcctggacaaagggcagaagcggagaagctctgagcctcctgaagaaaagattctcccatagacccgtgcaggagaagttcgtgtgcctgaactgcggcttcgagacacacgcagccgagcaagccgccctgaacatcgccagatcctggctgttcctgcggagccaggagtacaagaaataccagacaaacaagacaaccggcaacaccgataagagagccttcgtcgagacctggcagtccttttaccggaagaagcttaaggaggtgtggaaacctgccgtgcggtctggcggatctggcggaggctccaccagccccaagaaaaagagaaaagtctaagctgccttctgcggggcttgccttctggccatgcccttcttctctcccttgcacctgtacctcttggtctttgaataaagcctgagtaggaaggctagcaaaaaaaaaaaaaaaaaaaaaaaaaaaaaaaaaaaaaaaaaaaaaaaaaaaaaaaaaaaaaaaaaaaaaaaaaaaaaaaa

SEQ ID NO: 12628 - RNA, 5785 nt, synthetic construct
  source 1..5785: mol_type = other RNA
aggaaataagagagaaaagaagagtaagaagaaatataagagccaccatggcccctaagaagaagcgtaaagtgagccggatggaacgcctcgtctacgaggtgcggcagaagtgcagaaacatcgaggacatctgcatctcctgcggatctctgaacgtgaccctggagcacccactgttcatcggcggcatgtgccagaactgtaaaaactgttttctggagtgtgcctatcaatacgacgatgacggctaccagagctactgcaccatctgttgcggcggaagagaggtgctgatgtgtggaaataacaactgctgccggtgcttctgcgtggaatgcgtggacctgctggtgggccccggcgccgcccaggccgctattaaggaagatccttggaactgctacatgtgcggccacaagggcacatacggcctgctgagacggagagaggactggcctagcagactgcagatgttcttcgccaataaccacgaccaggagttcgacccccctaaggtgtaccctcccgtccccgccgagaagagaaagcccatccgggtcctgagcctgttcgatggcatcgccaccggtctgctggtgctgaaggacctgggcatccaggtggataggtacattgcctccgaggtgtgcgaggactccatcaccgtgggaatggtgcgtcatcagggcaagatcatgtacgtgggcgacgtgcggagcgtgacacagaagcatatccaggagtggggccctttcgacctggtgatcggcggcagcccttgcaatgacctgagcatcgtgaacccagcccggaagggcctgtacgagggaaccggcagactgttcttcgagttttacagactgctgcacgacgcccggcctaaggaaggcgacgaccggcccttcttttggctgttcgagaatgtggtggccatgggagtcagcgacaagcgggatattagccggttcctggagagcaaccccgtgatgatcgatgccaaggaagtgagcgccgcccaccgggccagatacttctggggcaatctgcctggcatgaacagacccctggccagcaccgtgaacgacaagctggagctgcaggagtgcctggagcacggccggatcgccaagttcagcaaggtgagaaccatcaccacccgaagcaacagcatcaaacaaggcaaggaccagcactttcctgtgttcatgaacgagaaggaggacatcctgtggtgtaccgagatggagagagtgttcgggttcccagtccactacacagatgtcagcaacatgtctagactggccagacagagactgctgggaagaagctggtccgtccctgtgatcagacacctgttcgcccctctgaaggagtacttcgcctgcgtgagcagcggcaacagcaacgccaacagccggggccccagcttctctagcggcctggtgccactgtccctgagagggagccacatgggccccatggagatctacaaaaccgtgagcgcctggaagcggcagcctgtgcgcgtgctgagcctgtttcggaatatcgataaagtcctgaaaagcctgggattcctggagagcggctctggctccggcggtggcaccctgaagtacgtggaggatgtgacaaacgtggtcagacgggatgtggagaagtggggccccttcgatctggtgtacggcagcacccaacccctgggcagctcttgtgaccggtgccctggctggtacatgtttcagttccaccggatcctgcagtacgccctgccgagacaggagtcccagcggccattcttttggattttcatggacaacttgctgctgaccgaggatgaccaggaaactaccactcggttcctgcagaccgaagccgtgaccctgcaggacgtgagaggccgggactaccagaacgccatgcgggtgtggtccaacatccctggactgaaaagcaagcacgcacctctgacccctaaagaagaggagtacctgcaggcccaggtgcggagcagaagcaagctggacgcccctaaggtggatctgctggtgaagaattgcctcctgcccctgagagagtacttcaagtatttcagccagaatagtctgcccctgggaggcagcggcggcggcgtgtggggccccctgagcttcatggacgtgttcgtggacttcacctgggaggagtggcagctgctggaccccgcccagaagtgcctgtacaggagcgtgatgctggagaactacagcaacctggtgagcctgggctaccagcacaccaagcccgacatcatcttcaagctggagcagggcgaggagctgtgcatggtgcaggcccccatccccaaccagtgctgccccaacaaggtgtggaagggcggcccaagcagcggcgcccctcctcccagcggcggcagcccagccggctccccaacctctaccgaggagggcacctctgagtccgccacccccgagagcggccctggcacctccaccgagcccagcgagggcagcgcacccggcagccctgccggcagccccacctccacagaggagggaaccagcaccgagcccagcgaaggcagcgccccaggcaccagcaccgagcctagtgagcaggagattaaacggatcaacaagatcagaagaagacttgtgaaagacagcaacaccaagaaggccggcaagacaggccccatgaaaaccctgctggttagagtgatgacacccgatctgagagagcggctggaaaacctgagaaagaagcctgaaaatatcccccagcccatcagcaatacatctagagccaacctgaataagctgctgaccgattacaccgaaatgaagaaggcgatcctgcatgtgtactgggaagagttccagaaggaccctgtgggcctgatgagccgggtggcccagcctgccagcaagaagatcgatcagaacaagctgaaacctgagatggacgagaagggcaacctgaccaccgccggctttgcctgctctcagtgtggccagcccctgttcgtgtacaagctggagcaggtgtctgagaagggcaaggcttacaccaactacttcggacggtgcaatgtggccgagcacgaaaagctgatcctgctggcccagctgaagcccgagaaggatagcgacgaagccgtgacatatagcctgggaaagtttgggcagagggccctggatttctacagcattcatgtgaccaaggagtccacccaccccgtgaagcccctggcccagatcgccggaaacagatacgcctccggacctgtgggaaaggccctgagcgacgcatgtatgggcacaatcgcctccttcctgtctaagtaccaggacatcatcatcgaacaccagaaggtggtgaagggcaaccagaagagactggagagcctgcgggagctggccggcaaggaaaacctggaataccctagcgtgaccctgccacctcagcctcacaccaaggagggcgttgatgcctacaacgaagtgatcgcccgggtgcgaatgtgggtgaacctgaacctgtggcagaagctgaagctaagcagagatgatgccaagcctctgctgagactgaagggattcccttcctttcctctggtcgagagacaggccaacgaagtggactggtgggacatggtgtgtaacgtgaagaagctgatcaacgagaaaaaggaggatggcaaggtgttttggcagaatctggctggctacaagagacaggaagccctgagaccatacctgagcagcgaggaagatcggaagaagggaaagaaattcgctcggtaccagctgggcgacctgctgctgcacctggaaaagaagcacggcgaggactggggaaaggtgtacgacgaggcctgggagcggattgacaagaaagtggaaggcctgagcaagcacatcaagctggaagaggaacggagaagcgaggacgcccagagcaaggccgccctgaccgactggctgcgggctaaggccagcttcgtgatcgagggcctgaaggaggccgacaaggacgagttctgcagatgcgagctgaagctgcagaagtggtacggggacctgcggggaaagcccttcgccatcgaagccgagaacagcatcctggacatcagcggcttcagcaagcagtacaactgtgccttcatctggcagaaggacggcgtgaagaagctgaacctgtacctgatcatcaactacttcaagggcggcaagctgcggttcaagaagatcaaacctgaagccttcgaagccaacagattctacaccgtgatcaacaaaaagagcggcgagatcgtgcccatggaggtgaacttcaacttcgacgaccccaacctgatcatcctgcctctggcctttggcaagagacagggcagagaattcatctggaacgacctgctgtccctggaaaccggcagcctgaagctggccaacggaagagtgatcgagaagacactgtacaacagaagaacccggcaggatgagcctgccctgttcgtggccctgaccttcgagcggcgggaggtcctggactcctccaatatcaaaccaatgaacctgatcggcgtggcaagaggcgaaaacatccccgccgtgatcgccctgaccgaccccgagggctgcccactgagccggtttaaggatagcctgggaaacccaacccacatcctgagaatcggcgagagctataaggagaagcagcggaccatccaggccaagaaggaggtggagcagcggagagccggcggctacagccggaagtacgccagcaaagccaagaatctggcagacgatatggtgagaaacaccgctagagatctgctgtactacgccgtgacccaggatgccatgctgatcttcgccaacctgagccggggcttcggccggcagggcaagcggaccttcatggccgagagacagtacacacggatggaggactggctgaccgccaagctggcctacgagggcctgagcaagacctacctgtccaagacactggcccagtacacctccaagacatgcagcaactgtgggtttaccatcaccagcgccgactacgacagggtgctggagaagctgaagaagacagcaacaggctggatgaccacaattaacggcaaggagctgaaggtggagggccagattacctactacaacagatacaagagacagaacgtagtcaaggacctgtccgtcgagctggatagactgagcgaagaatctgtgaacaacgacatctcctcctggacaaagggcagaagcggagaagctctgagcctcctgaagaaaagattctcccatagacccgtgcaggagaagttcgtgtgcctgaactgcggcttcgagacacacgcagccgagcaagccgccctgaacatcgccagatcctggctgttcctgcggagccaggagtacaagaaataccagacaaacaagacaaccggcaacaccgataagagagccttcgtcgagacctggcagtccttttaccggaagaagcttaaggaggtgtggaaacctgccgtgcggtctggcggatctggcggaggctccaccagccccaagaaaaagagaaaagtctaagctgccttctgcggggcttgccttctggccatgcccttcttctctcccttgcacctgtacctcttggtctttgaataaagcctgagtaggaaggctagcaaaaaaaaaaaaaaaaaaaaaaaaaaaaaaaaaaaaaaaaaaaaaaaaaaaaaaaaaaaaaaaaaaaaaaaaaaaaaaaa

SEQ ID NO: 12629 - RNA, 5785 nt, synthetic construct
  source 1..5785: mol_type = other RNA
aggaaataagagagaaaagaagagtaagaagaaatataagagccaccatggcccctaagaagaagcgtaaagtgagccggatggaacgcctcgtctacgaggtgcggcagaagtgcagaaacatcgaggacatctgcatctcctgcggatctctgaacgtgaccctggagcacccactgttcatcggcggcatgtgccagaactgtaaaaactgttttctggagtgtgcctatcaatacgacgatgacggctaccagagctactgcaccatctgttgcggcggaagagaggtgctgatgtgtggaaataacaactgctgccggtgcttctgcgtggaatgcgtggacctgctggtgggccccggcgccgcccaggccgctattaaggaagatccttggaactgctacatgtgcggccacaagggcacatacggcctgctgagacggagagaggactggcctagcagactgcagatgttcttcgccaataaccacgaccaggagttcgacccccctaaggtgtaccctcccgtccccgccgagaagagaaagcccatccgggtcctgagcctgttcgatggcatcgccaccggtctgctggtgctgaaggacctgggcatccaggtggataggtacattgcctccgaggtgtgcgaggactccatcaccgtgggaatggtgcgtcatcagggcaagatcatgtacgtgggcgacgtgcggagcgtgacacagaagcatatccaggagtggggccctttcgacctggtgatcggcggcagcccttgcaatgacctgagcatcgtgaacccagcccggaagggcctgtacgagggaaccggcagactgttcttcgagttttacagactgctgcacgacgcccggcctaaggaaggcgacgaccggcccttcttttggctgttcgagaatgtggtggccatgggagtcagcgacaagcgggatattagccggttcctggagagcaaccccgtgatgatcgatgccaaggaagtgagcgccgcccaccgggccagatacttctggggcaatctgcctggcatgaacagacccctggccagcaccgtgaacgacaagctggagctgcaggagtgcctggagcacggccggatcgccaagttcagcaaggtgagaaccatcaccacccgaagcaacagcatcaaacaaggcaaggaccagcactttcctgtgttcatgaacgagaaggaggacatcctgtggtgtaccgagatggagagagtgttcgggttcccagtccactacacagatgtcagcaacatgtctagactggccagacagagactgctgggaagaagctggtccgtccctgtgatcagacacctgttcgcccctctgaaggagtacttcgcctgcgtgagcagcggcaacagcaacgccaacagccggggccccagcttctctagcggcctggtgccactgtccctgagagggagccacatgggccccatggagatctacaaaaccgtgagcgcctggaagcggcagcctgtgcgcgtgctgagcctgtttcggaatatcgataaagtcctgaaaagcctgggattcctggagagcggctctggctccggcggtggcaccctgaagtacgtggaggatgtgacaaacgtggtcagacgggatgtggagaagtggggccccttcgatctggtgtacggcagcacccaacccctgggcagctcttgtgaccggtgccctggctggtacatgtttcagttccaccggatcctgcagtacgccctgccgagacaggagtcccagcggccattcttttggattttcatggacaacttgctgctgaccgaggatgaccaggaaactaccactcggttcctgcagaccgaagccgtgaccctgcaggacgtgagaggccgggactaccagaacgccatgcgggtgtggtccaacatccctggactgaaaagcaagcacgcacctctgacccctaaagaagaggagtacctgcaggcccaggtgcggagcagaagcaagctggacgcccctaaggtggatctgctggtgaagaattgcctcctgcccctgagagagtacttcaagtatttcagccagaatagtctgcccctgggaggcagcggcggcggcagctgcgagggcagcgtgagcttcagggacgtggccatcaacttcagcagggaggagtggcagcacctggaccccagccagaggaacctgtacagggacgtgatgctggagacctacagccacctgctgagcgtgggctaccaggtgcccgaggccgaggtggtgatgctggagcagggcaaggagccctgggccctgcagggcgagaggcccaggcagagctgccccggcgagaagctgtggggcggcccaagcagcggcgcccctcctcccagcggcggcagcccagccggctccccaacctctaccgaggagggcacctctgagtccgccacccccgagagcggccctggcacctccaccgagcccagcgagggcagcgcacccggcagccctgccggcagccccacctccacagaggagggaaccagcaccgagcccagcgaaggcagcgccccaggcaccagcaccgagcctagtgagcaggagattaaacggatcaacaagatcagaagaagacttgtgaaagacagcaacaccaagaaggccggcaagacaggccccatgaaaaccctgctggttagagtgatgacacccgatctgagagagcggctggaaaacctgagaaagaagcctgaaaatatcccccagcccatcagcaatacatctagagccaacctgaataagctgctgaccgattacaccgaaatgaagaaggcgatcctgcatgtgtactgggaagagttccagaaggaccctgtgggcctgatgagccgggtggcccagcctgccagcaagaagatcgatcagaacaagctgaaacctgagatggacgagaagggcaacctgaccaccgccggctttgcctgctctcagtgtggccagcccctgttcgtgtacaagctggagcaggtgtctgagaagggcaaggcttacaccaactacttcggacggtgcaatgtggccgagcacgaaaagctgatcctgctggcccagctgaagcccgagaaggatagcgacgaagccgtgacatatagcctgggaaagtttgggcagagggccctggatttctacagcattcatgtgaccaaggagtccacccaccccgtgaagcccctggcccagatcgccggaaacagatacgcctccggacctgtgggaaaggccctgagcgacgcatgtatgggcacaatcgcctccttcctgtctaagtaccaggacatcatcatcgaacaccagaaggtggtgaagggcaaccagaagagactggagagcctgcgggagctggccggcaaggaaaacctggaataccctagcgtgaccctgccacctcagcctcacaccaaggagggcgttgatgcctacaacgaagtgatcgcccgggtgcgaatgtgggtgaacctgaacctgtggcagaagctgaagctaagcagagatgatgccaagcctctgctgagactgaagggattcccttcctttcctctggtcgagagacaggccaacgaagtggactggtgggacatggtgtgtaacgtgaagaagctgatcaacgagaaaaaggaggatggcaaggtgttttggcagaatctggctggctacaagagacaggaagccctgagaccatacctgagcagcgaggaagatcggaagaagggaaagaaattcgctcggtaccagctgggcgacctgctgctgcacctggaaaagaagcacggcgaggactggggaaaggtgtacgacgaggcctgggagcggattgacaagaaagtggaaggcctgagcaagcacatcaagctggaagaggaacggagaagcgaggacgcccagagcaaggccgccctgaccgactggctgcgggctaaggccagcttcgtgatcgagggcctgaaggaggccgacaaggacgagttctgcagatgcgagctgaagctgcagaagtggtacggggacctgcggggaaagcccttcgccatcgaagccgagaacagcatcctggacatcagcggcttcagcaagcagtacaactgtgccttcatctggcagaaggacggcgtgaagaagctgaacctgtacctgatcatcaactacttcaagggcggcaagctgcggttcaagaagatcaaacctgaagccttcgaagccaacagattctacaccgtgatcaacaaaaagagcggcgagatcgtgcccatggaggtgaacttcaacttcgacgaccccaacctgatcatcctgcctctggcctttggcaagagacagggcagagaattcatctggaacgacctgctgtccctggaaaccggcagcctgaagctggccaacggaagagtgatcgagaagacactgtacaacagaagaacccggcaggatgagcctgccctgttcgtggccctgaccttcgagcggcgggaggtcctggactcctccaatatcaaaccaatgaacctgatcggcgtggcaagaggcgaaaacatccccgccgtgatcgccctgaccgaccccgagggctgcccactgagccggtttaaggatagcctgggaaacccaacccacatcctgagaatcggcgagagctataaggagaagcagcggaccatccaggccaagaaggaggtggagcagcggagagccggcggctacagccggaagtacgccagcaaagccaagaatctggcagacgatatggtgagaaacaccgctagagatctgctgtactacgccgtgacccaggatgccatgctgatcttcgccaacctgagccggggcttcggccggcagggcaagcggaccttcatggccgagagacagtacacacggatggaggactggctgaccgccaagctggcctacgagggcctgagcaagacctacctgtccaagacactggcccagtacacctccaagacatgcagcaactgtgggtttaccatcaccagcgccgactacgacagggtgctggagaagctgaagaagacagcaacaggctggatgaccacaattaacggcaaggagctgaaggtggagggccagattacctactacaacagatacaagagacagaacgtagtcaaggacctgtccgtcgagctggatagactgagcgaagaatctgtgaacaacgacatctcctcctggacaaagggcagaagcggagaagctctgagcctcctgaagaaaagattctcccatagacccgtgcaggagaagttcgtgtgcctgaactgcggcttcgagacacacgcagccgagcaagccgccctgaacatcgccagatcctggctgttcctgcggagccaggagtacaagaaataccagacaaacaagacaaccggcaacaccgataagagagccttcgtcgagacctggcagtccttttaccggaagaagcttaaggaggtgtggaaacctgccgtgcggtctggcggatctggcggaggctccaccagccccaagaaaaagagaaaagtctaagctgccttctgcggggcttgccttctggccatgcccttcttctctcccttgcacctgtacctcttggtctttgaataaagcctgagtaggaaggctagcaaaaaaaaaaaaaaaaaaaaaaaaaaaaaaaaaaaaaaaaaaaaaaaaaaaaaaaaaaaaaaaaaaaaaaaaaaaaaaaa

SEQ ID NO: 12630 - RNA, 5785 nt, synthetic construct
  source 1..5785: mol_type = other RNA
aggaaataagagagaaaagaagagtaagaagaaatataagagccaccatggcccctaagaagaagcgtaaagtgagccggatggaacgcctcgtctacgaggtgcggcagaagtgcagaaacatcgaggacatctgcatctcctgcggatctctgaacgtgaccctggagcacccactgttcatcggcggcatgtgccagaactgtaaaaactgttttctggagtgtgcctatcaatacgacgatgacggctaccagagctactgcaccatctgttgcggcggaagagaggtgctgatgtgtggaaataacaactgctgccggtgcttctgcgtggaatgcgtggacctgctggtgggccccggcgccgcccaggccgctattaaggaagatccttggaactgctacatgtgcggccacaagggcacatacggcctgctgagacggagagaggactggcctagcagactgcagatgttcttcgccaataaccacgaccaggagttcgacccccctaaggtgtaccctcccgtccccgccgagaagagaaagcccatccgggtcctgagcctgttcgatggcatcgccaccggtctgctggtgctgaaggacctgggcatccaggtggataggtacattgcctccgaggtgtgcgaggactccatcaccgtgggaatggtgcgtcatcagggcaagatcatgtacgtgggcgacgtgcggagcgtgacacagaagcatatccaggagtggggccctttcgacctggtgatcggcggcagcccttgcaatgacctgagcatcgtgaacccagcccggaagggcctgtacgagggaaccggcagactgttcttcgagttttacagactgctgcacgacgcccggcctaaggaaggcgacgaccggcccttcttttggctgttcgagaatgtggtggccatgggagtcagcgacaagcgggatattagccggttcctggagagcaaccccgtgatgatcgatgccaaggaagtgagcgccgcccaccgggccagatacttctggggcaatctgcctggcatgaacagacccctggccagcaccgtgaacgacaagctggagctgcaggagtgcctggagcacggccggatcgccaagttcagcaaggtgagaaccatcaccacccgaagcaacagcatcaaacaaggcaaggaccagcactttcctgtgttcatgaacgagaaggaggacatcctgtggtgtaccgagatggagagagtgttcgggttcccagtccactacacagatgtcagcaacatgtctagactggccagacagagactgctgggaagaagctggtccgtccctgtgatcagacacctgttcgcccctctgaaggagtacttcgcctgcgtgagcagcggcaacagcaacgccaacagccggggccccagcttctctagcggcctggtgccactgtccctgagagggagccacatgggccccatggagatctacaaaaccgtgagcgcctggaagcggcagcctgtgcgcgtgctgagcctgtttcggaatatcgataaagtcctgaaaagcctgggattcctggagagcggctctggctccggcggtggcaccctgaagtacgtggaggatgtgacaaacgtggtcagacgggatgtggagaagtggggccccttcgatctggtgtacggcagcacccaacccctgggcagctcttgtgaccggtgccctggctggtacatgtttcagttccaccggatcctgcagtacgccctgccgagacaggagtcccagcggccattcttttggattttcatggacaacttgctgctgaccgaggatgaccaggaaactaccactcggttcctgcagaccgaagccgtgaccctgcaggacgtgagaggccgggactaccagaacgccatgcgggtgtggtccaacatccctggactgaaaagcaagcacgcacctctgacccctaaagaagaggagtacctgcaggcccaggtgcggagcagaagcaagctggacgcccctaaggtggatctgctggtgaagaattgcctcctgcccctgagagagtacttcaagtatttcagccagaatagtctgcccctgggaggcagcggcggcggctacaccctggagagcctgaccctggaggacgtggccgtggacttcacccaggaggagtggaggctgctggcccccgcccagaaggacctgtactgggacgtgatgctggagaacttcaggaacctggtgagcgtgggctacgtggccagcatgcccgccgccctgagcaggctggagaggggcggccagtggatgaccgaggacgagaccaggcactggatctgccccgagatcaagaaggacggcggcccaagcagcggcgcccctcctcccagcggcggcagcccagccggctccccaacctctaccgaggagggcacctctgagtccgccacccccgagagcggccctggcacctccaccgagcccagcgagggcagcgcacccggcagccctgccggcagccccacctccacagaggagggaaccagcaccgagcccagcgaaggcagcgccccaggcaccagcaccgagcctagtgagcaggagattaaacggatcaacaagatcagaagaagacttgtgaaagacagcaacaccaagaaggccggcaagacaggccccatgaaaaccctgctggttagagtgatgacacccgatctgagagagcggctggaaaacctgagaaagaagcctgaaaatatcccccagcccatcagcaatacatctagagccaacctgaataagctgctgaccgattacaccgaaatgaagaaggcgatcctgcatgtgtactgggaagagttccagaaggaccctgtgggcctgatgagccgggtggcccagcctgccagcaagaagatcgatcagaacaagctgaaacctgagatggacgagaagggcaacctgaccaccgccggctttgcctgctctcagtgtggccagcccctgttcgtgtacaagctggagcaggtgtctgagaagggcaaggcttacaccaactacttcggacggtgcaatgtggccgagcacgaaaagctgatcctgctggcccagctgaagcccgagaaggatagcgacgaagccgtgacatatagcctgggaaagtttgggcagagggccctggatttctacagcattcatgtgaccaaggagtccacccaccccgtgaagcccctggcccagatcgccggaaacagatacgcctccggacctgtgggaaaggccctgagcgacgcatgtatgggcacaatcgcctccttcctgtctaagtaccaggacatcatcatcgaacaccagaaggtggtgaagggcaaccagaagagactggagagcctgcgggagctggccggcaaggaaaacctggaataccctagcgtgaccctgccacctcagcctcacaccaaggagggcgttgatgcctacaacgaagtgatcgcccgggtgcgaatgtgggtgaacctgaacctgtggcagaagctgaagctaagcagagatgatgccaagcctctgctgagactgaagggattcccttcctttcctctggtcgagagacaggccaacgaagtggactggtgggacatggtgtgtaacgtgaagaagctgatcaacgagaaaaaggaggatggcaaggtgttttggcagaatctggctggctacaagagacaggaagccctgagaccatacctgagcagcgaggaagatcggaagaagggaaagaaattcgctcggtaccagctgggcgacctgctgctgcacctggaaaagaagcacggcgaggactggggaaaggtgtacgacgaggcctgggagcggattgacaagaaagtggaaggcctgagcaagcacatcaagctggaagaggaacggagaagcgaggacgcccagagcaaggccgccctgaccgactggctgcgggctaaggccagcttcgtgatcgagggcctgaaggaggccgacaaggacgagttctgcagatgcgagctgaagctgcagaagtggtacggggacctgcggggaaagcccttcgccatcgaagccgagaacagcatcctggacatcagcggcttcagcaagcagtacaactgtgccttcatctggcagaaggacggcgtgaagaagctgaacctgtacctgatcatcaactacttcaagggcggcaagctgcggttcaagaagatcaaacctgaagccttcgaagccaacagattctacaccgtgatcaacaaaaagagcggcgagatcgtgcccatggaggtgaacttcaacttcgacgaccccaacctgatcatcctgcctctggcctttggcaagagacagggcagagaattcatctggaacgacctgctgtccctggaaaccggcagcctgaagctggccaacggaagagtgatcgagaagacactgtacaacagaagaacccggcaggatgagcctgccctgttcgtggccctgaccttcgagcggcgggaggtcctggactcctccaatatcaaaccaatgaacctgatcggcgtggcaagaggcgaaaacatccccgccgtgatcgccctgaccgaccccgagggctgcccactgagccggtttaaggatagcctgggaaacccaacccacatcctgagaatcggcgagagctataaggagaagcagcggaccatccaggccaagaaggaggtggagcagcggagagccggcggctacagccggaagtacgccagcaaagccaagaatctggcagacgatatggtgagaaacaccgctagagatctgctgtactacgccgtgacccaggatgccatgctgatcttcgccaacctgagccggggcttcggccggcagggcaagcggaccttcatggccgagagacagtacacacggatggaggactggctgaccgccaagctggcctacgagggcctgagcaagacctacctgtccaagacactggcccagtacacctccaagacatgcagcaactgtgggtttaccatcaccagcgccgactacgacagggtgctggagaagctgaagaagacagcaacaggctggatgaccacaattaacggcaaggagctgaaggtggagggccagattacctactacaacagatacaagagacagaacgtagtcaaggacctgtccgtcgagctggatagactgagcgaagaatctgtgaacaacgacatctcctcctggacaaagggcagaagcggagaagctctgagcctcctgaagaaaagattctcccatagacccgtgcaggagaagttcgtgtgcctgaactgcggcttcgagacacacgcagccgagcaagccgccctgaacatcgccagatcctggctgttcctgcggagccaggagtacaagaaataccagacaaacaagacaaccggcaacaccgataagagagccttcgtcgagacctggcagtccttttaccggaagaagcttaaggaggtgtggaaacctgccgtgcggtctggcggatctggcggaggctccaccagccccaagaaaaagagaaaagtctaagctgccttctgcggggcttgccttctggccatgcccttcttctctcccttgcacctgtacctcttggtctttgaataaagcctgagtaggaaggctagcaaaaaaaaaaaaaaaaaaaaaaaaaaaaaaaaaaaaaaaaaaaaaaaaaaaaaaaaaaaaaaaaaaaaaaaaaaaaaaaa

SEQ ID NO: 12631 - RNA, 5785 nt, synthetic construct
  source 1..5785: mol_type = other RNA
aggaaataagagagaaaagaagagtaagaagaaatataagagccaccatggcccctaagaagaagcgtaaagtgagccggatggaacgcctcgtctacgaggtgcggcagaagtgcagaaacatcgaggacatctgcatctcctgcggatctctgaacgtgaccctggagcacccactgttcatcggcggcatgtgccagaactgtaaaaactgttttctggagtgtgcctatcaatacgacgatgacggctaccagagctactgcaccatctgttgcggcggaagagaggtgctgatgtgtggaaataacaactgctgccggtgcttctgcgtggaatgcgtggacctgctggtgggccccggcgccgcccaggccgctattaaggaagatccttggaactgctacatgtgcggccacaagggcacatacggcctgctgagacggagagaggactggcctagcagactgcagatgttcttcgccaataaccacgaccaggagttcgacccccctaaggtgtaccctcccgtccccgccgagaagagaaagcccatccgggtcctgagcctgttcgatggcatcgccaccggtctgctggtgctgaaggacctgggcatccaggtggataggtacattgcctccgaggtgtgcgaggactccatcaccgtgggaatggtgcgtcatcagggcaagatcatgtacgtgggcgacgtgcggagcgtgacacagaagcatatccaggagtggggccctttcgacctggtgatcggcggcagcccttgcaatgacctgagcatcgtgaacccagcccggaagggcctgtacgagggaaccggcagactgttcttcgagttttacagactgctgcacgacgcccggcctaaggaaggcgacgaccggcccttcttttggctgttcgagaatgtggtggccatgggagtcagcgacaagcgggatattagccggttcctggagagcaaccccgtgatgatcgatgccaaggaagtgagcgccgcccaccgggccagatacttctggggcaatctgcctggcatgaacagacccctggccagcaccgtgaacgacaagctggagctgcaggagtgcctggagcacggccggatcgccaagttcagcaaggtgagaaccatcaccacccgaagcaacagcatcaaacaaggcaaggaccagcactttcctgtgttcatgaacgagaaggaggacatcctgtggtgtaccgagatggagagagtgttcgggttcccagtccactacacagatgtcagcaacatgtctagactggccagacagagactgctgggaagaagctggtccgtccctgtgatcagacacctgttcgcccctctgaaggagtacttcgcctgcgtgagcagcggcaacagcaacgccaacagccggggccccagcttctctagcggcctggtgccactgtccctgagagggagccacatgggccccatggagatctacaaaaccgtgagcgcctggaagcggcagcctgtgcgcgtgctgagcctgtttcggaatatcgataaagtcctgaaaagcctgggattcctggagagcggctctggctccggcggtggcaccctgaagtacgtggaggatgtgacaaacgtggtcagacgggatgtggagaagtggggccccttcgatctggtgtacggcagcacccaacccctgggcagctcttgtgaccggtgccctggctggtacatgtttcagttccaccggatcctgcagtacgccctgccgagacaggagtcccagcggccattcttttggattttcatggacaacttgctgctgaccgaggatgaccaggaaactaccactcggttcctgcagaccgaagccgtgaccctgcaggacgtgagaggccgggactaccagaacgccatgcgggtgtggtccaacatccctggactgaaaagcaagcacgcacctctgacccctaaagaagaggagtacctgcaggcccaggtgcggagcagaagcaagctggacgcccctaaggtggatctgctggtgaagaattgcctcctgcccctgagagagtacttcaagtatttcagccagaatagtctgcccctgggaggcagcggcggcggcctgcaggtgagcgtgagcttcgaggacgtgaccgtggacttcagcagggaggagtggcagcacctggaccccgcccagaggaggctgtacagggacgtgaccctggagaactacagccacctgtgcagcgtgggctaccaggtgcccaagcccgaggtgatcttcaagctggagcagggcgagggcccctggatgctggagggcgaggccccccaccagagctgcagcgacgacgacatcggcggcggcccaagcagcggcgcccctcctcccagcggcggcagcccagccggctccccaacctctaccgaggagggcacctctgagtccgccacccccgagagcggccctggcacctccaccgagcccagcgagggcagcgcacccggcagccctgccggcagccccacctccacagaggagggaaccagcaccgagcccagcgaaggcagcgccccaggcaccagcaccgagcctagtgagcaggagattaaacggatcaacaagatcagaagaagacttgtgaaagacagcaacaccaagaaggccggcaagacaggccccatgaaaaccctgctggttagagtgatgacacccgatctgagagagcggctggaaaacctgagaaagaagcctgaaaatatcccccagcccatcagcaatacatctagagccaacctgaataagctgctgaccgattacaccgaaatgaagaaggcgatcctgcatgtgtactgggaagagttccagaaggaccctgtgggcctgatgagccgggtggcccagcctgccagcaagaagatcgatcagaacaagctgaaacctgagatggacgagaagggcaacctgaccaccgccggctttgcctgctctcagtgtggccagcccctgttcgtgtacaagctggagcaggtgtctgagaagggcaaggcttacaccaactacttcggacggtgcaatgtggccgagcacgaaaagctgatcctgctggcccagctgaagcccgagaaggatagcgacgaagccgtgacatatagcctgggaaagtttgggcagagggccctggatttctacagcattcatgtgaccaaggagtccacccaccccgtgaagcccctggcccagatcgccggaaacagatacgcctccggacctgtgggaaaggccctgagcgacgcatgtatgggcacaatcgcctccttcctgtctaagtaccaggacatcatcatcgaacaccagaaggtggtgaagggcaaccagaagagactggagagcctgcgggagctggccggcaaggaaaacctggaataccctagcgtgaccctgccacctcagcctcacaccaaggagggcgttgatgcctacaacgaagtgatcgcccgggtgcgaatgtgggtgaacctgaacctgtggcagaagctgaagctaagcagagatgatgccaagcctctgctgagactgaagggattcccttcctttcctctggtcgagagacaggccaacgaagtggactggtgggacatggtgtgtaacgtgaagaagctgatcaacgagaaaaaggaggatggcaaggtgttttggcagaatctggctggctacaagagacaggaagccctgagaccatacctgagcagcgaggaagatcggaagaagggaaagaaattcgctcggtaccagctgggcgacctgctgctgcacctggaaaagaagcacggcgaggactggggaaaggtgtacgacgaggcctgggagcggattgacaagaaagtggaaggcctgagcaagcacatcaagctggaagaggaacggagaagcgaggacgcccagagcaaggccgccctgaccgactggctgcgggctaaggccagcttcgtgatcgagggcctgaaggaggccgacaaggacgagttctgcagatgcgagctgaagctgcagaagtggtacggggacctgcggggaaagcccttcgccatcgaagccgagaacagcatcctggacatcagcggcttcagcaagcagtacaactgtgccttcatctggcagaaggacggcgtgaagaagctgaacctgtacctgatcatcaactacttcaagggcggcaagctgcggttcaagaagatcaaacctgaagccttcgaagccaacagattctacaccgtgatcaacaaaaagagcggcgagatcgtgcccatggaggtgaacttcaacttcgacgaccccaacctgatcatcctgcctctggcctttggcaagagacagggcagagaattcatctggaacgacctgctgtccctggaaaccggcagcctgaagctggccaacggaagagtgatcgagaagacactgtacaacagaagaacccggcaggatgagcctgccctgttcgtggccctgaccttcgagcggcgggaggtcctggactcctccaatatcaaaccaatgaacctgatcggcgtggcaagaggcgaaaacatccccgccgtgatcgccctgaccgaccccgagggctgcccactgagccggtttaaggatagcctgggaaacccaacccacatcctgagaatcggcgagagctataaggagaagcagcggaccatccaggccaagaaggaggtggagcagcggagagccggcggctacagccggaagtacgccagcaaagccaagaatctggcagacgatatggtgagaaacaccgctagagatctgctgtactacgccgtgacccaggatgccatgctgatcttcgccaacctgagccggggcttcggccggcagggcaagcggaccttcatggccgagagacagtacacacggatggaggactggctgaccgccaagctggcctacgagggcctgagcaagacctacctgtccaagacactggcccagtacacctccaagacatgcagcaactgtgggtttaccatcaccagcgccgactacgacagggtgctggagaagctgaagaagacagcaacaggctggatgaccacaattaacggcaaggagctgaaggtggagggccagattacctactacaacagatacaagagacagaacgtagtcaaggacctgtccgtcgagctggatagactgagcgaagaatctgtgaacaacgacatctcctcctggacaaagggcagaagcggagaagctctgagcctcctgaagaaaagattctcccatagacccgtgcaggagaagttcgtgtgcctgaactgcggcttcgagacacacgcagccgagcaagccgccctgaacatcgccagatcctggctgttcctgcggagccaggagtacaagaaataccagacaaacaagacaaccggcaacaccgataagagagccttcgtcgagacctggcagtccttttaccggaagaagcttaaggaggtgtggaaacctgccgtgcggtctggcggatctggcggaggctccaccagccccaagaaaaagagaaaagtctaagctgccttctgcggggcttgccttctggccatgcccttcttctctcccttgcacctgtacctcttggtctttgaataaagcctgagtaggaaggctagcaaaaaaaaaaaaaaaaaaaaaaaaaaaaaaaaaaaaaaaaaaaaaaaaaaaaaaaaaaaaaaaaaaaaaaaaaaaaaaaa

SEQ ID NO: 12632 - RNA, 5785 nt, synthetic construct
  source 1..5785: mol_type = other RNA
aggaaataagagagaaaagaagagtaagaagaaatataagagccaccatggcccctaagaagaagcgtaaagtgagccggatggaacgcctcgtctacgaggtgcggcagaagtgcagaaacatcgaggacatctgcatctcctgcggatctctgaacgtgaccctggagcacccactgttcatcggcggcatgtgccagaactgtaaaaactgttttctggagtgtgcctatcaatacgacgatgacggctaccagagctactgcaccatctgttgcggcggaagagaggtgctgatgtgtggaaataacaactgctgccggtgcttctgcgtggaatgcgtggacctgctggtgggccccggcgccgcccaggccgctattaaggaagatccttggaactgctacatgtgcggccacaagggcacatacggcctgctgagacggagagaggactggcctagcagactgcagatgttcttcgccaataaccacgaccaggagttcgacccccctaaggtgtaccctcccgtccccgccgagaagagaaagcccatccgggtcctgagcctgttcgatggcatcgccaccggtctgctggtgctgaaggacctgggcatccaggtggataggtacattgcctccgaggtgtgcgaggactccatcaccgtgggaatggtgcgtcatcagggcaagatcatgtacgtgggcgacgtgcggagcgtgacacagaagcatatccaggagtggggccctttcgacctggtgatcggcggcagcccttgcaatgacctgagcatcgtgaacccagcccggaagggcctgtacgagggaaccggcagactgttcttcgagttttacagactgctgcacgacgcccggcctaaggaaggcgacgaccggcccttcttttggctgttcgagaatgtggtggccatgggagtcagcgacaagcgggatattagccggttcctggagagcaaccccgtgatgatcgatgccaaggaagtgagcgccgcccaccgggccagatacttctggggcaatctgcctggcatgaacagacccctggccagcaccgtgaacgacaagctggagctgcaggagtgcctggagcacggccggatcgccaagttcagcaaggtgagaaccatcaccacccgaagcaacagcatcaaacaaggcaaggaccagcactttcctgtgttcatgaacgagaaggaggacatcctgtggtgtaccgagatggagagagtgttcgggttcccagtccactacacagatgtcagcaacatgtctagactggccagacagagactgctgggaagaagctggtccgtccctgtgatcagacacctgttcgcccctctgaaggagtacttcgcctgcgtgagcagcggcaacagcaacgccaacagccggggccccagcttctctagcggcctggtgccactgtccctgagagggagccacatgggccccatggagatctacaaaaccgtgagcgcctggaagcggcagcctgtgcgcgtgctgagcctgtttcggaatatcgataaagtcctgaaaagcctgggattcctggagagcggctctggctccggcggtggcaccctgaagtacgtggaggatgtgacaaacgtggtcagacgggatgtggagaagtggggccccttcgatctggtgtacggcagcacccaacccctgggcagctcttgtgaccggtgccctggctggtacatgtttcagttccaccggatcctgcagtacgccctgccgagacaggagtcccagcggccattcttttggattttcatggacaacttgctgctgaccgaggatgaccaggaaactaccactcggttcctgcagaccgaagccgtgaccctgcaggacgtgagaggccgggactaccagaacgccatgcgggtgtggtccaacatccctggactgaaaagcaagcacgcacctctgacccctaaagaagaggagtacctgcaggcccaggtgcggagcagaagcaagctggacgcccctaaggtggatctgctggtgaagaattgcctcctgcccctgagagagtacttcaagtatttcagccagaatagtctgcccctgggaggcagcggcggcggcggcagcctgaccttcagggacgtggccatcgagttcagcctggaggagtggcagtgcctggacaccgcccagcagaacctgtacaggaacgtgatgctggagaactacaggaacctggtgttcctgggcatcgccgcccccaagcccgacctgatcatcttcctggagcagggcaaggagccctggaacgtgaagaggcacgagatggtggaggagccccccgtgatctgcagccacttcgccggcggcccaagcagcggcgcccctcctcccagcggcggcagcccagccggctccccaacctctaccgaggagggcacctctgagtccgccacccccgagagcggccctggcacctccaccgagcccagcgagggcagcgcacccggcagccctgccggcagccccacctccacagaggagggaaccagcaccgagcccagcgaaggcagcgccccaggcaccagcaccgagcctagtgagcaggagattaaacggatcaacaagatcagaagaagacttgtgaaagacagcaacaccaagaaggccggcaagacaggccccatgaaaaccctgctggttagagtgatgacacccgatctgagagagcggctggaaaacctgagaaagaagcctgaaaatatcccccagcccatcagcaatacatctagagccaacctgaataagctgctgaccgattacaccgaaatgaagaaggcgatcctgcatgtgtactgggaagagttccagaaggaccctgtgggcctgatgagccgggtggcccagcctgccagcaagaagatcgatcagaacaagctgaaacctgagatggacgagaagggcaacctgaccaccgccggctttgcctgctctcagtgtggccagcccctgttcgtgtacaagctggagcaggtgtctgagaagggcaaggcttacaccaactacttcggacggtgcaatgtggccgagcacgaaaagctgatcctgctggcccagctgaagcccgagaaggatagcgacgaagccgtgacatatagcctgggaaagtttgggcagagggccctggatttctacagcattcatgtgaccaaggagtccacccaccccgtgaagcccctggcccagatcgccggaaacagatacgcctccggacctgtgggaaaggccctgagcgacgcatgtatgggcacaatcgcctccttcctgtctaagtaccaggacatcatcatcgaacaccagaaggtggtgaagggcaaccagaagagactggagagcctgcgggagctggccggcaaggaaaacctggaataccctagcgtgaccctgccacctcagcctcacaccaaggagggcgttgatgcctacaacgaagtgatcgcccgggtgcgaatgtgggtgaacctgaacctgtggcagaagctgaagctaagcagagatgatgccaagcctctgctgagactgaagggattcccttcctttcctctggtcgagagacaggccaacgaagtggactggtgggacatggtgtgtaacgtgaagaagctgatcaacgagaaaaaggaggatggcaaggtgttttggcagaatctggctggctacaagagacaggaagccctgagaccatacctgagcagcgaggaagatcggaagaagggaaagaaattcgctcggtaccagctgggcgacctgctgctgcacctggaaaagaagcacggcgaggactggggaaaggtgtacgacgaggcctgggagcggattgacaagaaagtggaaggcctgagcaagcacatcaagctggaagaggaacggagaagcgaggacgcccagagcaaggccgccctgaccgactggctgcgggctaaggccagcttcgtgatcgagggcctgaaggaggccgacaaggacgagttctgcagatgcgagctgaagctgcagaagtggtacggggacctgcggggaaagcccttcgccatcgaagccgagaacagcatcctggacatcagcggcttcagcaagcagtacaactgtgccttcatctggcagaaggacggcgtgaagaagctgaacctgtacctgatcatcaactacttcaagggcggcaagctgcggttcaagaagatcaaacctgaagccttcgaagccaacagattctacaccgtgatcaacaaaaagagcggcgagatcgtgcccatggaggtgaacttcaacttcgacgaccccaacctgatcatcctgcctctggcctttggcaagagacagggcagagaattcatctggaacgacctgctgtccctggaaaccggcagcctgaagctggccaacggaagagtgatcgagaagacactgtacaacagaagaacccggcaggatgagcctgccctgttcgtggccctgaccttcgagcggcgggaggtcctggactcctccaatatcaaaccaatgaacctgatcggcgtggcaagaggcgaaaacatccccgccgtgatcgccctgaccgaccccgagggctgcccactgagccggtttaaggatagcctgggaaacccaacccacatcctgagaatcggcgagagctataaggagaagcagcggaccatccaggccaagaaggaggtggagcagcggagagccggcggctacagccggaagtacgccagcaaagccaagaatctggcagacgatatggtgagaaacaccgctagagatctgctgtactacgccgtgacccaggatgccatgctgatcttcgccaacctgagccggggcttcggccggcagggcaagcggaccttcatggccgagagacagtacacacggatggaggactggctgaccgccaagctggcctacgagggcctgagcaagacctacctgtccaagacactggcccagtacacctccaagacatgcagcaactgtgggtttaccatcaccagcgccgactacgacagggtgctggagaagctgaagaagacagcaacaggctggatgaccacaattaacggcaaggagctgaaggtggagggccagattacctactacaacagatacaagagacagaacgtagtcaaggacctgtccgtcgagctggatagactgagcgaagaatctgtgaacaacgacatctcctcctggacaaagggcagaagcggagaagctctgagcctcctgaagaaaagattctcccatagacccgtgcaggagaagttcgtgtgcctgaactgcggcttcgagacacacgcagccgagcaagccgccctgaacatcgccagatcctggctgttcctgcggagccaggagtacaagaaataccagacaaacaagacaaccggcaacaccgataagagagccttcgtcgagacctggcagtccttttaccggaagaagcttaaggaggtgtggaaacctgccgtgcggtctggcggatctggcggaggctccaccagccccaagaaaaagagaaaagtctaagctgccttctgcggggcttgccttctggccatgcccttcttctctcccttgcacctgtacctcttggtctttgaataaagcctgagtaggaaggctagcaaaaaaaaaaaaaaaaaaaaaaaaaaaaaaaaaaaaaaaaaaaaaaaaaaaaaaaaaaaaaaaaaaaaaaaaaaaaaaaa

SEQ ID NO: 12633 - RNA, 5785 nt, synthetic construct
  source 1..5785: mol_type = other RNA
aggaaataagagagaaaagaagagtaagaagaaatataagagccaccatggcccctaagaagaagcgtaaagtgagccggatggaacgcctcgtctacgaggtgcggcagaagtgcagaaacatcgaggacatctgcatctcctgcggatctctgaacgtgaccctggagcacccactgttcatcggcggcatgtgccagaactgtaaaaactgttttctggagtgtgcctatcaatacgacgatgacggctaccagagctactgcaccatctgttgcggcggaagagaggtgctgatgtgtggaaataacaactgctgccggtgcttctgcgtggaatgcgtggacctgctggtgggccccggcgccgcccaggccgctattaaggaagatccttggaactgctacatgtgcggccacaagggcacatacggcctgctgagacggagagaggactggcctagcagactgcagatgttcttcgccaataaccacgaccaggagttcgacccccctaaggtgtaccctcccgtccccgccgagaagagaaagcccatccgggtcctgagcctgttcgatggcatcgccaccggtctgctggtgctgaaggacctgggcatccaggtggataggtacattgcctccgaggtgtgcgaggactccatcaccgtgggaatggtgcgtcatcagggcaagatcatgtacgtgggcgacgtgcggagcgtgacacagaagcatatccaggagtggggccctttcgacctggtgatcggcggcagcccttgcaatgacctgagcatcgtgaacccagcccggaagggcctgtacgagggaaccggcagactgttcttcgagttttacagactgctgcacgacgcccggcctaaggaaggcgacgaccggcccttcttttggctgttcgagaatgtggtggccatgggagtcagcgacaagcgggatattagccggttcctggagagcaaccccgtgatgatcgatgccaaggaagtgagcgccgcccaccgggccagatacttctggggcaatctgcctggcatgaacagacccctggccagcaccgtgaacgacaagctggagctgcaggagtgcctggagcacggccggatcgccaagttcagcaaggtgagaaccatcaccacccgaagcaacagcatcaaacaaggcaaggaccagcactttcctgtgttcatgaacgagaaggaggacatcctgtggtgtaccgagatggagagagtgttcgggttcccagtccactacacagatgtcagcaacatgtctagactggccagacagagactgctgggaagaagctggtccgtccctgtgatcagacacctgttcgcccctctgaaggagtacttcgcctgcgtgagcagcggcaacagcaacgccaacagccggggccccagcttctctagcggcctggtgccactgtccctgagagggagccacatgggccccatggagatctacaaaaccgtgagcgcctggaagcggcagcctgtgcgcgtgctgagcctgtttcggaatatcgataaagtcctgaaaagcctgggattcctggagagcggctctggctccggcggtggcaccctgaagtacgtggaggatgtgacaaacgtggtcagacgggatgtggagaagtggggccccttcgatctggtgtacggcagcacccaacccctgggcagctcttgtgaccggtgccctggctggtacatgtttcagttccaccggatcctgcagtacgccctgccgagacaggagtcccagcggccattcttttggattttcatggacaacttgctgctgaccgaggatgaccaggaaactaccactcggttcctgcagaccgaagccgtgaccctgcaggacgtgagaggccgggactaccagaacgccatgcgggtgtggtccaacatccctggactgaaaagcaagcacgcacctctgacccctaaagaagaggagtacctgcaggcccaggtgcggagcagaagcaagctggacgcccctaaggtggatctgctggtgaagaattgcctcctgcccctgagagagtacttcaagtatttcagccagaatagtctgcccctgggaggcagcggcggcggcatggccgccgccgccctgagggaccccgcccagcagggctacgtgaccttcgaggacgtggccgtgtacttcagccaggaggagtggaggctgctggacgaggcccagaagctgctgtacaggaacgtgatgctggagaacttcagcctgctggccagcctgggcctggccagcagcaagacccacgagatcacccagctggagagctgggaggagcccttcatgcccgcctgggaggccgtgggcggcccaagcagcggcgcccctcctcccagcggcggcagcccagccggctccccaacctctaccgaggagggcacctctgagtccgccacccccgagagcggccctggcacctccaccgagcccagcgagggcagcgcacccggcagccctgccggcagccccacctccacagaggagggaaccagcaccgagcccagcgaaggcagcgccccaggcaccagcaccgagcctagtgagcaggagattaaacggatcaacaagatcagaagaagacttgtgaaagacagcaacaccaagaaggccggcaagacaggccccatgaaaaccctgctggttagagtgatgacacccgatctgagagagcggctggaaaacctgagaaagaagcctgaaaatatcccccagcccatcagcaatacatctagagccaacctgaataagctgctgaccgattacaccgaaatgaagaaggcgatcctgcatgtgtactgggaagagttccagaaggaccctgtgggcctgatgagccgggtggcccagcctgccagcaagaagatcgatcagaacaagctgaaacctgagatggacgagaagggcaacctgaccaccgccggctttgcctgctctcagtgtggccagcccctgttcgtgtacaagctggagcaggtgtctgagaagggcaaggcttacaccaactacttcggacggtgcaatgtggccgagcacgaaaagctgatcctgctggcccagctgaagcccgagaaggatagcgacgaagccgtgacatatagcctgggaaagtttgggcagagggccctggatttctacagcattcatgtgaccaaggagtccacccaccccgtgaagcccctggcccagatcgccggaaacagatacgcctccggacctgtgggaaaggccctgagcgacgcatgtatgggcacaatcgcctccttcctgtctaagtaccaggacatcatcatcgaacaccagaaggtggtgaagggcaaccagaagagactggagagcctgcgggagctggccggcaaggaaaacctggaataccctagcgtgaccctgccacctcagcctcacaccaaggagggcgttgatgcctacaacgaagtgatcgcccgggtgcgaatgtgggtgaacctgaacctgtggcagaagctgaagctaagcagagatgatgccaagcctctgctgagactgaagggattcccttcctttcctctggtcgagagacaggccaacgaagtggactggtgggacatggtgtgtaacgtgaagaagctgatcaacgagaaaaaggaggatggcaaggtgttttggcagaatctggctggctacaagagacaggaagccctgagaccatacctgagcagcgaggaagatcggaagaagggaaagaaattcgctcggtaccagctgggcgacctgctgctgcacctggaaaagaagcacggcgaggactggggaaaggtgtacgacgaggcctgggagcggattgacaagaaagtggaaggcctgagcaagcacatcaagctggaagaggaacggagaagcgaggacgcccagagcaaggccgccctgaccgactggctgcgggctaaggccagcttcgtgatcgagggcctgaaggaggccgacaaggacgagttctgcagatgcgagctgaagctgcagaagtggtacggggacctgcggggaaagcccttcgccatcgaagccgagaacagcatcctggacatcagcggcttcagcaagcagtacaactgtgccttcatctggcagaaggacggcgtgaagaagctgaacctgtacctgatcatcaactacttcaagggcggcaagctgcggttcaagaagatcaaacctgaagccttcgaagccaacagattctacaccgtgatcaacaaaaagagcggcgagatcgtgcccatggaggtgaacttcaacttcgacgaccccaacctgatcatcctgcctctggcctttggcaagagacagggcagagaattcatctggaacgacctgctgtccctggaaaccggcagcctgaagctggccaacggaagagtgatcgagaagacactgtacaacagaagaacccggcaggatgagcctgccctgttcgtggccctgaccttcgagcggcgggaggtcctggactcctccaatatcaaaccaatgaacctgatcggcgtggcaagaggcgaaaacatccccgccgtgatcgccctgaccgaccccgagggctgcccactgagccggtttaaggatagcctgggaaacccaacccacatcctgagaatcggcgagagctataaggagaagcagcggaccatccaggccaagaaggaggtggagcagcggagagccggcggctacagccggaagtacgccagcaaagccaagaatctggcagacgatatggtgagaaacaccgctagagatctgctgtactacgccgtgacccaggatgccatgctgatcttcgccaacctgagccggggcttcggccggcagggcaagcggaccttcatggccgagagacagtacacacggatggaggactggctgaccgccaagctggcctacgagggcctgagcaagacctacctgtccaagacactggcccagtacacctccaagacatgcagcaactgtgggtttaccatcaccagcgccgactacgacagggtgctggagaagctgaagaagacagcaacaggctggatgaccacaattaacggcaaggagctgaaggtggagggccagattacctactacaacagatacaagagacagaacgtagtcaaggacctgtccgtcgagctggatagactgagcgaagaatctgtgaacaacgacatctcctcctggacaaagggcagaagcggagaagctctgagcctcctgaagaaaagattctcccatagacccgtgcaggagaagttcgtgtgcctgaactgcggcttcgagacacacgcagccgagcaagccgccctgaacatcgccagatcctggctgttcctgcggagccaggagtacaagaaataccagacaaacaagacaaccggcaacaccgataagagagccttcgtcgagacctggcagtccttttaccggaagaagcttaaggaggtgtggaaacctgccgtgcggtctggcggatctggcggaggctccaccagccccaagaaaaagagaaaagtctaagctgccttctgcggggcttgccttctggccatgcccttcttctctcccttgcacctgtacctcttggtctttgaataaagcctgagtaggaaggctagcaaaaaaaaaaaaaaaaaaaaaaaaaaaaaaaaaaaaaaaaaaaaaaaaaaaaaaaaaaaaaaaaaaaaaaaaaaaaaaaa

SEQ ID NO: 12634 - RNA, 5785 nt, synthetic construct
  source 1..5785: mol_type = other RNA
aggaaataagagagaaaagaagagtaagaagaaatataagagccaccatggcccctaagaagaagcgtaaagtgagccggatggaacgcctcgtctacgaggtgcggcagaagtgcagaaacatcgaggacatctgcatctcctgcggatctctgaacgtgaccctggagcacccactgttcatcggcggcatgtgccagaactgtaaaaactgttttctggagtgtgcctatcaatacgacgatgacggctaccagagctactgcaccatctgttgcggcggaagagaggtgctgatgtgtggaaataacaactgctgccggtgcttctgcgtggaatgcgtggacctgctggtgggccccggcgccgcccaggccgctattaaggaagatccttggaactgctacatgtgcggccacaagggcacatacggcctgctgagacggagagaggactggcctagcagactgcagatgttcttcgccaataaccacgaccaggagttcgacccccctaaggtgtaccctcccgtccccgccgagaagagaaagcccatccgggtcctgagcctgttcgatggcatcgccaccggtctgctggtgctgaaggacctgggcatccaggtggataggtacattgcctccgaggtgtgcgaggactccatcaccgtgggaatggtgcgtcatcagggcaagatcatgtacgtgggcgacgtgcggagcgtgacacagaagcatatccaggagtggggccctttcgacctggtgatcggcggcagcccttgcaatgacctgagcatcgtgaacccagcccggaagggcctgtacgagggaaccggcagactgttcttcgagttttacagactgctgcacgacgcccggcctaaggaaggcgacgaccggcccttcttttggctgttcgagaatgtggtggccatgggagtcagcgacaagcgggatattagccggttcctggagagcaaccccgtgatgatcgatgccaaggaagtgagcgccgcccaccgggccagatacttctggggcaatctgcctggcatgaacagacccctggccagcaccgtgaacgacaagctggagctgcaggagtgcctggagcacggccggatcgccaagttcagcaaggtgagaaccatcaccacccgaagcaacagcatcaaacaaggcaaggaccagcactttcctgtgttcatgaacgagaaggaggacatcctgtggtgtaccgagatggagagagtgttcgggttcccagtccactacacagatgtcagcaacatgtctagactggccagacagagactgctgggaagaagctggtccgtccctgtgatcagacacctgttcgcccctctgaaggagtacttcgcctgcgtgagcagcggcaacagcaacgccaacagccggggccccagcttctctagcggcctggtgccactgtccctgagagggagccacatgggccccatggagatctacaaaaccgtgagcgcctggaagcggcagcctgtgcgcgtgctgagcctgtttcggaatatcgataaagtcctgaaaagcctgggattcctggagagcggctctggctccggcggtggcaccctgaagtacgtggaggatgtgacaaacgtggtcagacgggatgtggagaagtggggccccttcgatctggtgtacggcagcacccaacccctgggcagctcttgtgaccggtgccctggctggtacatgtttcagttccaccggatcctgcagtacgccctgccgagacaggagtcccagcggccattcttttggattttcatggacaacttgctgctgaccgaggatgaccaggaaactaccactcggttcctgcagaccgaagccgtgaccctgcaggacgtgagaggccgggactaccagaacgccatgcgggtgtggtccaacatccctggactgaaaagcaagcacgcacctctgacccctaaagaagaggagtacctgcaggcccaggtgcggagcagaagcaagctggacgcccctaaggtggatctgctggtgaagaattgcctcctgcccctgagagagtacttcaagtatttcagccagaatagtctgcccctgggaggcagcggcggcggcttccaggagagcgtgaccttcgaggacgtggccgtgtacttcagcgagaacgagtggaccggcctggcccccgcccagagggtgctgtacagggacgtgatgctggagaactacggcgccgtggccagcctggccgccttccccttccccaagcccgccctgatcagccagctggagaggggcgaggccccctggtgcaaggccccccagggcgccctggacggcgagggccccaggggcgtgggcggcccaagcagcggcgcccctcctcccagcggcggcagcccagccggctccccaacctctaccgaggagggcacctctgagtccgccacccccgagagcggccctggcacctccaccgagcccagcgagggcagcgcacccggcagccctgccggcagccccacctccacagaggagggaaccagcaccgagcccagcgaaggcagcgccccaggcaccagcaccgagcctagtgagcaggagattaaacggatcaacaagatcagaagaagacttgtgaaagacagcaacaccaagaaggccggcaagacaggccccatgaaaaccctgctggttagagtgatgacacccgatctgagagagcggctggaaaacctgagaaagaagcctgaaaatatcccccagcccatcagcaatacatctagagccaacctgaataagctgctgaccgattacaccgaaatgaagaaggcgatcctgcatgtgtactgggaagagttccagaaggaccctgtgggcctgatgagccgggtggcccagcctgccagcaagaagatcgatcagaacaagctgaaacctgagatggacgagaagggcaacctgaccaccgccggctttgcctgctctcagtgtggccagcccctgttcgtgtacaagctggagcaggtgtctgagaagggcaaggcttacaccaactacttcggacggtgcaatgtggccgagcacgaaaagctgatcctgctggcccagctgaagcccgagaaggatagcgacgaagccgtgacatatagcctgggaaagtttgggcagagggccctggatttctacagcattcatgtgaccaaggagtccacccaccccgtgaagcccctggcccagatcgccggaaacagatacgcctccggacctgtgggaaaggccctgagcgacgcatgtatgggcacaatcgcctccttcctgtctaagtaccaggacatcatcatcgaacaccagaaggtggtgaagggcaaccagaagagactggagagcctgcgggagctggccggcaaggaaaacctggaataccctagcgtgaccctgccacctcagcctcacaccaaggagggcgttgatgcctacaacgaagtgatcgcccgggtgcgaatgtgggtgaacctgaacctgtggcagaagctgaagctaagcagagatgatgccaagcctctgctgagactgaagggattcccttcctttcctctggtcgagagacaggccaacgaagtggactggtgggacatggtgtgtaacgtgaagaagctgatcaacgagaaaaaggaggatggcaaggtgttttggcagaatctggctggctacaagagacaggaagccctgagaccatacctgagcagcgaggaagatcggaagaagggaaagaaattcgctcggtaccagctgggcgacctgctgctgcacctggaaaagaagcacggcgaggactggggaaaggtgtacgacgaggcctgggagcggattgacaagaaagtggaaggcctgagcaagcacatcaagctggaagaggaacggagaagcgaggacgcccagagcaaggccgccctgaccgactggctgcgggctaaggccagcttcgtgatcgagggcctgaaggaggccgacaaggacgagttctgcagatgcgagctgaagctgcagaagtggtacggggacctgcggggaaagcccttcgccatcgaagccgagaacagcatcctggacatcagcggcttcagcaagcagtacaactgtgccttcatctggcagaaggacggcgtgaagaagctgaacctgtacctgatcatcaactacttcaagggcggcaagctgcggttcaagaagatcaaacctgaagccttcgaagccaacagattctacaccgtgatcaacaaaaagagcggcgagatcgtgcccatggaggtgaacttcaacttcgacgaccccaacctgatcatcctgcctctggcctttggcaagagacagggcagagaattcatctggaacgacctgctgtccctggaaaccggcagcctgaagctggccaacggaagagtgatcgagaagacactgtacaacagaagaacccggcaggatgagcctgccctgttcgtggccctgaccttcgagcggcgggaggtcctggactcctccaatatcaaaccaatgaacctgatcggcgtggcaagaggcgaaaacatccccgccgtgatcgccctgaccgaccccgagggctgcccactgagccggtttaaggatagcctgggaaacccaacccacatcctgagaatcggcgagagctataaggagaagcagcggaccatccaggccaagaaggaggtggagcagcggagagccggcggctacagccggaagtacgccagcaaagccaagaatctggcagacgatatggtgagaaacaccgctagagatctgctgtactacgccgtgacccaggatgccatgctgatcttcgccaacctgagccggggcttcggccggcagggcaagcggaccttcatggccgagagacagtacacacggatggaggactggctgaccgccaagctggcctacgagggcctgagcaagacctacctgtccaagacactggcccagtacacctccaagacatgcagcaactgtgggtttaccatcaccagcgccgactacgacagggtgctggagaagctgaagaagacagcaacaggctggatgaccacaattaacggcaaggagctgaaggtggagggccagattacctactacaacagatacaagagacagaacgtagtcaaggacctgtccgtcgagctggatagactgagcgaagaatctgtgaacaacgacatctcctcctggacaaagggcagaagcggagaagctctgagcctcctgaagaaaagattctcccatagacccgtgcaggagaagttcgtgtgcctgaactgcggcttcgagacacacgcagccgagcaagccgccctgaacatcgccagatcctggctgttcctgcggagccaggagtacaagaaataccagacaaacaagacaaccggcaacaccgataagagagccttcgtcgagacctggcagtccttttaccggaagaagcttaaggaggtgtggaaacctgccgtgcggtctggcggatctggcggaggctccaccagccccaagaaaaagagaaaagtctaagctgccttctgcggggcttgccttctggccatgcccttcttctctcccttgcacctgtacctcttggtctttgaataaagcctgagtaggaaggctagcaaaaaaaaaaaaaaaaaaaaaaaaaaaaaaaaaaaaaaaaaaaaaaaaaaaaaaaaaaaaaaaaaaaaaaaaaaaaaaaa

SEQ ID NO: 12635 - RNA, 5785 nt, synthetic construct
  source 1..5785: mol_type = other RNA
aggaaataagagagaaaagaagagtaagaagaaatataagagccaccatggcccctaagaagaagcgtaaagtgagccggatggaacgcctcgtctacgaggtgcggcagaagtgcagaaacatcgaggacatctgcatctcctgcggatctctgaacgtgaccctggagcacccactgttcatcggcggcatgtgccagaactgtaaaaactgttttctggagtgtgcctatcaatacgacgatgacggctaccagagctactgcaccatctgttgcggcggaagagaggtgctgatgtgtggaaataacaactgctgccggtgcttctgcgtggaatgcgtggacctgctggtgggccccggcgccgcccaggccgctattaaggaagatccttggaactgctacatgtgcggccacaagggcacatacggcctgctgagacggagagaggactggcctagcagactgcagatgttcttcgccaataaccacgaccaggagttcgacccccctaaggtgtaccctcccgtccccgccgagaagagaaagcccatccgggtcctgagcctgttcgatggcatcgccaccggtctgctggtgctgaaggacctgggcatccaggtggataggtacattgcctccgaggtgtgcgaggactccatcaccgtgggaatggtgcgtcatcagggcaagatcatgtacgtgggcgacgtgcggagcgtgacacagaagcatatccaggagtggggccctttcgacctggtgatcggcggcagcccttgcaatgacctgagcatcgtgaacccagcccggaagggcctgtacgagggaaccggcagactgttcttcgagttttacagactgctgcacgacgcccggcctaaggaaggcgacgaccggcccttcttttggctgttcgagaatgtggtggccatgggagtcagcgacaagcgggatattagccggttcctggagagcaaccccgtgatgatcgatgccaaggaagtgagcgccgcccaccgggccagatacttctggggcaatctgcctggcatgaacagacccctggccagcaccgtgaacgacaagctggagctgcaggagtgcctggagcacggccggatcgccaagttcagcaaggtgagaaccatcaccacccgaagcaacagcatcaaacaaggcaaggaccagcactttcctgtgttcatgaacgagaaggaggacatcctgtggtgtaccgagatggagagagtgttcgggttcccagtccactacacagatgtcagcaacatgtctagactggccagacagagactgctgggaagaagctggtccgtccctgtgatcagacacctgttcgcccctctgaaggagtacttcgcctgcgtgagcagcggcaacagcaacgccaacagccggggccccagcttctctagcggcctggtgccactgtccctgagagggagccacatgggccccatggagatctacaaaaccgtgagcgcctggaagcggcagcctgtgcgcgtgctgagcctgtttcggaatatcgataaagtcctgaaaagcctgggattcctggagagcggctctggctccggcggtggcaccctgaagtacgtggaggatgtgacaaacgtggtcagacgggatgtggagaagtggggccccttcgatctggtgtacggcagcacccaacccctgggcagctcttgtgaccggtgccctggctggtacatgtttcagttccaccggatcctgcagtacgccctgccgagacaggagtcccagcggccattcttttggattttcatggacaacttgctgctgaccgaggatgaccaggaaactaccactcggttcctgcagaccgaagccgtgaccctgcaggacgtgagaggccgggactaccagaacgccatgcgggtgtggtccaacatccctggactgaaaagcaagcacgcacctctgacccctaaagaagaggagtacctgcaggcccaggtgcggagcagaagcaagctggacgcccctaaggtggatctgctggtgaagaattgcctcctgcccctgagagagtacttcaagtatttcagccagaatagtctgcccctgggaggcagcggcggcggcagcaaggcccccgtgaccttcggcgacctggccatctacttcagccaggaggagtgggagtggctgagccccatccagaaggacctgtacgaggacgtgatgctggagaactaccagaacctggtgctgctgggcctggcctgcaggaggcccaacatcatcaccctgctggagaagggcaaggccccctgggtggtggagcccagcaggaggaggaggggccccgagagcggcagcaagtgcggcggcccaagcagcggcgcccctcctcccagcggcggcagcccagccggctccccaacctctaccgaggagggcacctctgagtccgccacccccgagagcggccctggcacctccaccgagcccagcgagggcagcgcacccggcagccctgccggcagccccacctccacagaggagggaaccagcaccgagcccagcgaaggcagcgccccaggcaccagcaccgagcctagtgagcaggagattaaacggatcaacaagatcagaagaagacttgtgaaagacagcaacaccaagaaggccggcaagacaggccccatgaaaaccctgctggttagagtgatgacacccgatctgagagagcggctggaaaacctgagaaagaagcctgaaaatatcccccagcccatcagcaatacatctagagccaacctgaataagctgctgaccgattacaccgaaatgaagaaggcgatcctgcatgtgtactgggaagagttccagaaggaccctgtgggcctgatgagccgggtggcccagcctgccagcaagaagatcgatcagaacaagctgaaacctgagatggacgagaagggcaacctgaccaccgccggctttgcctgctctcagtgtggccagcccctgttcgtgtacaagctggagcaggtgtctgagaagggcaaggcttacaccaactacttcggacggtgcaatgtggccgagcacgaaaagctgatcctgctggcccagctgaagcccgagaaggatagcgacgaagccgtgacatatagcctgggaaagtttgggcagagggccctggatttctacagcattcatgtgaccaaggagtccacccaccccgtgaagcccctggcccagatcgccggaaacagatacgcctccggacctgtgggaaaggccctgagcgacgcatgtatgggcacaatcgcctccttcctgtctaagtaccaggacatcatcatcgaacaccagaaggtggtgaagggcaaccagaagagactggagagcctgcgggagctggccggcaaggaaaacctggaataccctagcgtgaccctgccacctcagcctcacaccaaggagggcgttgatgcctacaacgaagtgatcgcccgggtgcgaatgtgggtgaacctgaacctgtggcagaagctgaagctaagcagagatgatgccaagcctctgctgagactgaagggattcccttcctttcctctggtcgagagacaggccaacgaagtggactggtgggacatggtgtgtaacgtgaagaagctgatcaacgagaaaaaggaggatggcaaggtgttttggcagaatctggctggctacaagagacaggaagccctgagaccatacctgagcagcgaggaagatcggaagaagggaaagaaattcgctcggtaccagctgggcgacctgctgctgcacctggaaaagaagcacggcgaggactggggaaaggtgtacgacgaggcctgggagcggattgacaagaaagtggaaggcctgagcaagcacatcaagctggaagaggaacggagaagcgaggacgcccagagcaaggccgccctgaccgactggctgcgggctaaggccagcttcgtgatcgagggcctgaaggaggccgacaaggacgagttctgcagatgcgagctgaagctgcagaagtggtacggggacctgcggggaaagcccttcgccatcgaagccgagaacagcatcctggacatcagcggcttcagcaagcagtacaactgtgccttcatctggcagaaggacggcgtgaagaagctgaacctgtacctgatcatcaactacttcaagggcggcaagctgcggttcaagaagatcaaacctgaagccttcgaagccaacagattctacaccgtgatcaacaaaaagagcggcgagatcgtgcccatggaggtgaacttcaacttcgacgaccccaacctgatcatcctgcctctggcctttggcaagagacagggcagagaattcatctggaacgacctgctgtccctggaaaccggcagcctgaagctggccaacggaagagtgatcgagaagacactgtacaacagaagaacccggcaggatgagcctgccctgttcgtggccctgaccttcgagcggcgggaggtcctggactcctccaatatcaaaccaatgaacctgatcggcgtggcaagaggcgaaaacatccccgccgtgatcgccctgaccgaccccgagggctgcccactgagccggtttaaggatagcctgggaaacccaacccacatcctgagaatcggcgagagctataaggagaagcagcggaccatccaggccaagaaggaggtggagcagcggagagccggcggctacagccggaagtacgccagcaaagccaagaatctggcagacgatatggtgagaaacaccgctagagatctgctgtactacgccgtgacccaggatgccatgctgatcttcgccaacctgagccggggcttcggccggcagggcaagcggaccttcatggccgagagacagtacacacggatggaggactggctgaccgccaagctggcctacgagggcctgagcaagacctacctgtccaagacactggcccagtacacctccaagacatgcagcaactgtgggtttaccatcaccagcgccgactacgacagggtgctggagaagctgaagaagacagcaacaggctggatgaccacaattaacggcaaggagctgaaggtggagggccagattacctactacaacagatacaagagacagaacgtagtcaaggacctgtccgtcgagctggatagactgagcgaagaatctgtgaacaacgacatctcctcctggacaaagggcagaagcggagaagctctgagcctcctgaagaaaagattctcccatagacccgtgcaggagaagttcgtgtgcctgaactgcggcttcgagacacacgcagccgagcaagccgccctgaacatcgccagatcctggctgttcctgcggagccaggagtacaagaaataccagacaaacaagacaaccggcaacaccgataagagagccttcgtcgagacctggcagtccttttaccggaagaagcttaaggaggtgtggaaacctgccgtgcggtctggcggatctggcggaggctccaccagccccaagaaaaagagaaaagtctaagctgccttctgcggggcttgccttctggccatgcccttcttctctcccttgcacctgtacctcttggtctttgaataaagcctgagtaggaaggctagcaaaaaaaaaaaaaaaaaaaaaaaaaaaaaaaaaaaaaaaaaaaaaaaaaaaaaaaaaaaaaaaaaaaaaaaaaaaaaaaa

SEQ ID NO: 12636 - RNA, 5785 nt, synthetic construct
  source 1..5785: mol_type = other RNA
aggaaataagagagaaaagaagagtaagaagaaatataagagccaccatggcccctaagaagaagcgtaaagtgagccggatggaacgcctcgtctacgaggtgcggcagaagtgcagaaacatcgaggacatctgcatctcctgcggatctctgaacgtgaccctggagcacccactgttcatcggcggcatgtgccagaactgtaaaaactgttttctggagtgtgcctatcaatacgacgatgacggctaccagagctactgcaccatctgttgcggcggaagagaggtgctgatgtgtggaaataacaactgctgccggtgcttctgcgtggaatgcgtggacctgctggtgggccccggcgccgcccaggccgctattaaggaagatccttggaactgctacatgtgcggccacaagggcacatacggcctgctgagacggagagaggactggcctagcagactgcagatgttcttcgccaataaccacgaccaggagttcgacccccctaaggtgtaccctcccgtccccgccgagaagagaaagcccatccgggtcctgagcctgttcgatggcatcgccaccggtctgctggtgctgaaggacctgggcatccaggtggataggtacattgcctccgaggtgtgcgaggactccatcaccgtgggaatggtgcgtcatcagggcaagatcatgtacgtgggcgacgtgcggagcgtgacacagaagcatatccaggagtggggccctttcgacctggtgatcggcggcagcccttgcaatgacctgagcatcgtgaacccagcccggaagggcctgtacgagggaaccggcagactgttcttcgagttttacagactgctgcacgacgcccggcctaaggaaggcgacgaccggcccttcttttggctgttcgagaatgtggtggccatgggagtcagcgacaagcgggatattagccggttcctggagagcaaccccgtgatgatcgatgccaaggaagtgagcgccgcccaccgggccagatacttctggggcaatctgcctggcatgaacagacccctggccagcaccgtgaacgacaagctggagctgcaggagtgcctggagcacggccggatcgccaagttcagcaaggtgagaaccatcaccacccgaagcaacagcatcaaacaaggcaaggaccagcactttcctgtgttcatgaacgagaaggaggacatcctgtggtgtaccgagatggagagagtgttcgggttcccagtccactacacagatgtcagcaacatgtctagactggccagacagagactgctgggaagaagctggtccgtccctgtgatcagacacctgttcgcccctctgaaggagtacttcgcctgcgtgagcagcggcaacagcaacgccaacagccggggccccagcttctctagcggcctggtgccactgtccctgagagggagccacatgggccccatggagatctacaaaaccgtgagcgcctggaagcggcagcctgtgcgcgtgctgagcctgtttcggaatatcgataaagtcctgaaaagcctgggattcctggagagcggctctggctccggcggtggcaccctgaagtacgtggaggatgtgacaaacgtggtcagacgggatgtggagaagtggggccccttcgatctggtgtacggcagcacccaacccctgggcagctcttgtgaccggtgccctggctggtacatgtttcagttccaccggatcctgcagtacgccctgccgagacaggagtcccagcggccattcttttggattttcatggacaacttgctgctgaccgaggatgaccaggaaactaccactcggttcctgcagaccgaagccgtgaccctgcaggacgtgagaggccgggactaccagaacgccatgcgggtgtggtccaacatccctggactgaaaagcaagcacgcacctctgacccctaaagaagaggagtacctgcaggcccaggtgcggagcagaagcaagctggacgcccctaaggtggatctgctggtgaagaattgcctcctgcccctgagagagtacttcaagtatttcagccagaatagtctgcccctgggaggcagcggcggcggcagcaacaagctggtgagcttcgacgacgtggccgtggagttcagctgggaggagtggcaggagctggacatcagccagaggaccctgtacagggacgtgatgctggagacctacagcatgctggtgagcctgggccacaccggccccaagccccagctgatcgtgaagctggagcaggacgaggagagctacatgagggaggccagcgacaagaacttcagcgacgtgcagaagatgaagcacggcggcccaagcagcggcgcccctcctcccagcggcggcagcccagccggctccccaacctctaccgaggagggcacctctgagtccgccacccccgagagcggccctggcacctccaccgagcccagcgagggcagcgcacccggcagccctgccggcagccccacctccacagaggagggaaccagcaccgagcccagcgaaggcagcgccccaggcaccagcaccgagcctagtgagcaggagattaaacggatcaacaagatcagaagaagacttgtgaaagacagcaacaccaagaaggccggcaagacaggccccatgaaaaccctgctggttagagtgatgacacccgatctgagagagcggctggaaaacctgagaaagaagcctgaaaatatcccccagcccatcagcaatacatctagagccaacctgaataagctgctgaccgattacaccgaaatgaagaaggcgatcctgcatgtgtactgggaagagttccagaaggaccctgtgggcctgatgagccgggtggcccagcctgccagcaagaagatcgatcagaacaagctgaaacctgagatggacgagaagggcaacctgaccaccgccggctttgcctgctctcagtgtggccagcccctgttcgtgtacaagctggagcaggtgtctgagaagggcaaggcttacaccaactacttcggacggtgcaatgtggccgagcacgaaaagctgatcctgctggcccagctgaagcccgagaaggatagcgacgaagccgtgacatatagcctgggaaagtttgggcagagggccctggatttctacagcattcatgtgaccaaggagtccacccaccccgtgaagcccctggcccagatcgccggaaacagatacgcctccggacctgtgggaaaggccctgagcgacgcatgtatgggcacaatcgcctccttcctgtctaagtaccaggacatcatcatcgaacaccagaaggtggtgaagggcaaccagaagagactggagagcctgcgggagctggccggcaaggaaaacctggaataccctagcgtgaccctgccacctcagcctcacaccaaggagggcgttgatgcctacaacgaagtgatcgcccgggtgcgaatgtgggtgaacctgaacctgtggcagaagctgaagctaagcagagatgatgccaagcctctgctgagactgaagggattcccttcctttcctctggtcgagagacaggccaacgaagtggactggtgggacatggtgtgtaacgtgaagaagctgatcaacgagaaaaaggaggatggcaaggtgttttggcagaatctggctggctacaagagacaggaagccctgagaccatacctgagcagcgaggaagatcggaagaagggaaagaaattcgctcggtaccagctgggcgacctgctgctgcacctggaaaagaagcacggcgaggactggggaaaggtgtacgacgaggcctgggagcggattgacaagaaagtggaaggcctgagcaagcacatcaagctggaagaggaacggagaagcgaggacgcccagagcaaggccgccctgaccgactggctgcgggctaaggccagcttcgtgatcgagggcctgaaggaggccgacaaggacgagttctgcagatgcgagctgaagctgcagaagtggtacggggacctgcggggaaagcccttcgccatcgaagccgagaacagcatcctggacatcagcggcttcagcaagcagtacaactgtgccttcatctggcagaaggacggcgtgaagaagctgaacctgtacctgatcatcaactacttcaagggcggcaagctgcggttcaagaagatcaaacctgaagccttcgaagccaacagattctacaccgtgatcaacaaaaagagcggcgagatcgtgcccatggaggtgaacttcaacttcgacgaccccaacctgatcatcctgcctctggcctttggcaagagacagggcagagaattcatctggaacgacctgctgtccctggaaaccggcagcctgaagctggccaacggaagagtgatcgagaagacactgtacaacagaagaacccggcaggatgagcctgccctgttcgtggccctgaccttcgagcggcgggaggtcctggactcctccaatatcaaaccaatgaacctgatcggcgtggcaagaggcgaaaacatccccgccgtgatcgccctgaccgaccccgagggctgcccactgagccggtttaaggatagcctgggaaacccaacccacatcctgagaatcggcgagagctataaggagaagcagcggaccatccaggccaagaaggaggtggagcagcggagagccggcggctacagccggaagtacgccagcaaagccaagaatctggcagacgatatggtgagaaacaccgctagagatctgctgtactacgccgtgacccaggatgccatgctgatcttcgccaacctgagccggggcttcggccggcagggcaagcggaccttcatggccgagagacagtacacacggatggaggactggctgaccgccaagctggcctacgagggcctgagcaagacctacctgtccaagacactggcccagtacacctccaagacatgcagcaactgtgggtttaccatcaccagcgccgactacgacagggtgctggagaagctgaagaagacagcaacaggctggatgaccacaattaacggcaaggagctgaaggtggagggccagattacctactacaacagatacaagagacagaacgtagtcaaggacctgtccgtcgagctggatagactgagcgaagaatctgtgaacaacgacatctcctcctggacaaagggcagaagcggagaagctctgagcctcctgaagaaaagattctcccatagacccgtgcaggagaagttcgtgtgcctgaactgcggcttcgagacacacgcagccgagcaagccgccctgaacatcgccagatcctggctgttcctgcggagccaggagtacaagaaataccagacaaacaagacaaccggcaacaccgataagagagccttcgtcgagacctggcagtccttttaccggaagaagcttaaggaggtgtggaaacctgccgtgcggtctggcggatctggcggaggctccaccagccccaagaaaaagagaaaagtctaagctgccttctgcggggcttgccttctggccatgcccttcttctctcccttgcacctgtacctcttggtctttgaataaagcctgagtaggaaggctagcaaaaaaaaaaaaaaaaaaaaaaaaaaaaaaaaaaaaaaaaaaaaaaaaaaaaaaaaaaaaaaaaaaaaaaaaaaaaaaaa

SEQ ID NO: 12637 - RNA, 5785 nt, synthetic construct
  source 1..5785: mol_type = other RNA
aggaaataagagagaaaagaagagtaagaagaaatataagagccaccatggcccctaagaagaagcgtaaagtgagccggatggaacgcctcgtctacgaggtgcggcagaagtgcagaaacatcgaggacatctgcatctcctgcggatctctgaacgtgaccctggagcacccactgttcatcggcggcatgtgccagaactgtaaaaactgttttctggagtgtgcctatcaatacgacgatgacggctaccagagctactgcaccatctgttgcggcggaagagaggtgctgatgtgtggaaataacaactgctgccggtgcttctgcgtggaatgcgtggacctgctggtgggccccggcgccgcccaggccgctattaaggaagatccttggaactgctacatgtgcggccacaagggcacatacggcctgctgagacggagagaggactggcctagcagactgcagatgttcttcgccaataaccacgaccaggagttcgacccccctaaggtgtaccctcccgtccccgccgagaagagaaagcccatccgggtcctgagcctgttcgatggcatcgccaccggtctgctggtgctgaaggacctgggcatccaggtggataggtacattgcctccgaggtgtgcgaggactccatcaccgtgggaatggtgcgtcatcagggcaagatcatgtacgtgggcgacgtgcggagcgtgacacagaagcatatccaggagtggggccctttcgacctggtgatcggcggcagcccttgcaatgacctgagcatcgtgaacccagcccggaagggcctgtacgagggaaccggcagactgttcttcgagttttacagactgctgcacgacgcccggcctaaggaaggcgacgaccggcccttcttttggctgttcgagaatgtggtggccatgggagtcagcgacaagcgggatattagccggttcctggagagcaaccccgtgatgatcgatgccaaggaagtgagcgccgcccaccgggccagatacttctggggcaatctgcctggcatgaacagacccctggccagcaccgtgaacgacaagctggagctgcaggagtgcctggagcacggccggatcgccaagttcagcaaggtgagaaccatcaccacccgaagcaacagcatcaaacaaggcaaggaccagcactttcctgtgttcatgaacgagaaggaggacatcctgtggtgtaccgagatggagagagtgttcgggttcccagtccactacacagatgtcagcaacatgtctagactggccagacagagactgctgggaagaagctggtccgtccctgtgatcagacacctgttcgcccctctgaaggagtacttcgcctgcgtgagcagcggcaacagcaacgccaacagccggggccccagcttctctagcggcctggtgccactgtccctgagagggagccacatgggccccatggagatctacaaaaccgtgagcgcctggaagcggcagcctgtgcgcgtgctgagcctgtttcggaatatcgataaagtcctgaaaagcctgggattcctggagagcggctctggctccggcggtggcaccctgaagtacgtggaggatgtgacaaacgtggtcagacgggatgtggagaagtggggccccttcgatctggtgtacggcagcacccaacccctgggcagctcttgtgaccggtgccctggctggtacatgtttcagttccaccggatcctgcagtacgccctgccgagacaggagtcccagcggccattcttttggattttcatggacaacttgctgctgaccgaggatgaccaggaaactaccactcggttcctgcagaccgaagccgtgaccctgcaggacgtgagaggccgggactaccagaacgccatgcgggtgtggtccaacatccctggactgaaaagcaagcacgcacctctgacccctaaagaagaggagtacctgcaggcccaggtgcggagcagaagcaagctggacgcccctaaggtggatctgctggtgaagaattgcctcctgcccctgagagagtacttcaagtatttcagccagaatagtctgcccctgggaggcagcggcggcggcatgaccaagttccaggaggccgtgaccttcaaggacgtggccgtggccttcaccgaggaggagctgggcctgctggacagcgcccagaggaagctgtacagggacgtgatgctggagaacttcaggaacctggtgagcgtgggccaccagagcttcaagcccgacatgatcagccagctggagagggaggagaagctgtggatgaaggagctgcagacccagaggggcaagcacagcggcttcggcggcccaagcagcggcgcccctcctcccagcggcggcagcccagccggctccccaacctctaccgaggagggcacctctgagtccgccacccccgagagcggccctggcacctccaccgagcccagcgagggcagcgcacccggcagccctgccggcagccccacctccacagaggagggaaccagcaccgagcccagcgaaggcagcgccccaggcaccagcaccgagcctagtgagcaggagattaaacggatcaacaagatcagaagaagacttgtgaaagacagcaacaccaagaaggccggcaagacaggccccatgaaaaccctgctggttagagtgatgacacccgatctgagagagcggctggaaaacctgagaaagaagcctgaaaatatcccccagcccatcagcaatacatctagagccaacctgaataagctgctgaccgattacaccgaaatgaagaaggcgatcctgcatgtgtactgggaagagttccagaaggaccctgtgggcctgatgagccgggtggcccagcctgccagcaagaagatcgatcagaacaagctgaaacctgagatggacgagaagggcaacctgaccaccgccggctttgcctgctctcagtgtggccagcccctgttcgtgtacaagctggagcaggtgtctgagaagggcaaggcttacaccaactacttcggacggtgcaatgtggccgagcacgaaaagctgatcctgctggcccagctgaagcccgagaaggatagcgacgaagccgtgacatatagcctgggaaagtttgggcagagggccctggatttctacagcattcatgtgaccaaggagtccacccaccccgtgaagcccctggcccagatcgccggaaacagatacgcctccggacctgtgggaaaggccctgagcgacgcatgtatgggcacaatcgcctccttcctgtctaagtaccaggacatcatcatcgaacaccagaaggtggtgaagggcaaccagaagagactggagagcctgcgggagctggccggcaaggaaaacctggaataccctagcgtgaccctgccacctcagcctcacaccaaggagggcgttgatgcctacaacgaagtgatcgcccgggtgcgaatgtgggtgaacctgaacctgtggcagaagctgaagctaagcagagatgatgccaagcctctgctgagactgaagggattcccttcctttcctctggtcgagagacaggccaacgaagtggactggtgggacatggtgtgtaacgtgaagaagctgatcaacgagaaaaaggaggatggcaaggtgttttggcagaatctggctggctacaagagacaggaagccctgagaccatacctgagcagcgaggaagatcggaagaagggaaagaaattcgctcggtaccagctgggcgacctgctgctgcacctggaaaagaagcacggcgaggactggggaaaggtgtacgacgaggcctgggagcggattgacaagaaagtggaaggcctgagcaagcacatcaagctggaagaggaacggagaagcgaggacgcccagagcaaggccgccctgaccgactggctgcgggctaaggccagcttcgtgatcgagggcctgaaggaggccgacaaggacgagttctgcagatgcgagctgaagctgcagaagtggtacggggacctgcggggaaagcccttcgccatcgaagccgagaacagcatcctggacatcagcggcttcagcaagcagtacaactgtgccttcatctggcagaaggacggcgtgaagaagctgaacctgtacctgatcatcaactacttcaagggcggcaagctgcggttcaagaagatcaaacctgaagccttcgaagccaacagattctacaccgtgatcaacaaaaagagcggcgagatcgtgcccatggaggtgaacttcaacttcgacgaccccaacctgatcatcctgcctctggcctttggcaagagacagggcagagaattcatctggaacgacctgctgtccctggaaaccggcagcctgaagctggccaacggaagagtgatcgagaagacactgtacaacagaagaacccggcaggatgagcctgccctgttcgtggccctgaccttcgagcggcgggaggtcctggactcctccaatatcaaaccaatgaacctgatcggcgtggcaagaggcgaaaacatccccgccgtgatcgccctgaccgaccccgagggctgcccactgagccggtttaaggatagcctgggaaacccaacccacatcctgagaatcggcgagagctataaggagaagcagcggaccatccaggccaagaaggaggtggagcagcggagagccggcggctacagccggaagtacgccagcaaagccaagaatctggcagacgatatggtgagaaacaccgctagagatctgctgtactacgccgtgacccaggatgccatgctgatcttcgccaacctgagccggggcttcggccggcagggcaagcggaccttcatggccgagagacagtacacacggatggaggactggctgaccgccaagctggcctacgagggcctgagcaagacctacctgtccaagacactggcccagtacacctccaagacatgcagcaactgtgggtttaccatcaccagcgccgactacgacagggtgctggagaagctgaagaagacagcaacaggctggatgaccacaattaacggcaaggagctgaaggtggagggccagattacctactacaacagatacaagagacagaacgtagtcaaggacctgtccgtcgagctggatagactgagcgaagaatctgtgaacaacgacatctcctcctggacaaagggcagaagcggagaagctctgagcctcctgaagaaaagattctcccatagacccgtgcaggagaagttcgtgtgcctgaactgcggcttcgagacacacgcagccgagcaagccgccctgaacatcgccagatcctggctgttcctgcggagccaggagtacaagaaataccagacaaacaagacaaccggcaacaccgataagagagccttcgtcgagacctggcagtccttttaccggaagaagcttaaggaggtgtggaaacctgccgtgcggtctggcggatctggcggaggctccaccagccccaagaaaaagagaaaagtctaagctgccttctgcggggcttgccttctggccatgcccttcttctctcccttgcacctgtacctcttggtctttgaataaagcctgagtaggaaggctagcaaaaaaaaaaaaaaaaaaaaaaaaaaaaaaaaaaaaaaaaaaaaaaaaaaaaaaaaaaaaaaaaaaaaaaaaaaaaaaaa

SEQ ID NO: 12638 - RNA, 5785 nt, synthetic construct
  source 1..5785: mol_type = other RNA
aggaaataagagagaaaagaagagtaagaagaaatataagagccaccatggcccctaagaagaagcgtaaagtgagccggatggaacgcctcgtctacgaggtgcggcagaagtgcagaaacatcgaggacatctgcatctcctgcggatctctgaacgtgaccctggagcacccactgttcatcggcggcatgtgccagaactgtaaaaactgttttctggagtgtgcctatcaatacgacgatgacggctaccagagctactgcaccatctgttgcggcggaagagaggtgctgatgtgtggaaataacaactgctgccggtgcttctgcgtggaatgcgtggacctgctggtgggccccggcgccgcccaggccgctattaaggaagatccttggaactgctacatgtgcggccacaagggcacatacggcctgctgagacggagagaggactggcctagcagactgcagatgttcttcgccaataaccacgaccaggagttcgacccccctaaggtgtaccctcccgtccccgccgagaagagaaagcccatccgggtcctgagcctgttcgatggcatcgccaccggtctgctggtgctgaaggacctgggcatccaggtggataggtacattgcctccgaggtgtgcgaggactccatcaccgtgggaatggtgcgtcatcagggcaagatcatgtacgtgggcgacgtgcggagcgtgacacagaagcatatccaggagtggggccctttcgacctggtgatcggcggcagcccttgcaatgacctgagcatcgtgaacccagcccggaagggcctgtacgagggaaccggcagactgttcttcgagttttacagactgctgcacgacgcccggcctaaggaaggcgacgaccggcccttcttttggctgttcgagaatgtggtggccatgggagtcagcgacaagcgggatattagccggttcctggagagcaaccccgtgatgatcgatgccaaggaagtgagcgccgcccaccgggccagatacttctggggcaatctgcctggcatgaacagacccctggccagcaccgtgaacgacaagctggagctgcaggagtgcctggagcacggccggatcgccaagttcagcaaggtgagaaccatcaccacccgaagcaacagcatcaaacaaggcaaggaccagcactttcctgtgttcatgaacgagaaggaggacatcctgtggtgtaccgagatggagagagtgttcgggttcccagtccactacacagatgtcagcaacatgtctagactggccagacagagactgctgggaagaagctggtccgtccctgtgatcagacacctgttcgcccctctgaaggagtacttcgcctgcgtgagcagcggcaacagcaacgccaacagccggggccccagcttctctagcggcctggtgccactgtccctgagagggagccacatgggccccatggagatctacaaaaccgtgagcgcctggaagcggcagcctgtgcgcgtgctgagcctgtttcggaatatcgataaagtcctgaaaagcctgggattcctggagagcggctctggctccggcggtggcaccctgaagtacgtggaggatgtgacaaacgtggtcagacgggatgtggagaagtggggccccttcgatctggtgtacggcagcacccaacccctgggcagctcttgtgaccggtgccctggctggtacatgtttcagttccaccggatcctgcagtacgccctgccgagacaggagtcccagcggccattcttttggattttcatggacaacttgctgctgaccgaggatgaccaggaaactaccactcggttcctgcagaccgaagccgtgaccctgcaggacgtgagaggccgggactaccagaacgccatgcgggtgtggtccaacatccctggactgaaaagcaagcacgcacctctgacccctaaagaagaggagtacctgcaggcccaggtgcggagcagaagcaagctggacgcccctaaggtggatctgctggtgaagaattgcctcctgcccctgagagagtacttcaagtatttcagccagaatagtctgcccctgggaggcagcggcggcggcttccagggcagcctgagcatcgaggacgtgaccgtgggcttcacccaggaggagtggcagcacctggaccccgcccagaggaccctgtacagggacgtgatgctggagaactacagccacctggtgagcgtgggctactgcatccccaagcccgaggtgatcttcaagctggagaggggcgagcagctgtggatcctggaggaggagagcagcagccagagccaccccgaggtgtgcaaggtgggcggcccaagcagcggcgcccctcctcccagcggcggcagcccagccggctccccaacctctaccgaggagggcacctctgagtccgccacccccgagagcggccctggcacctccaccgagcccagcgagggcagcgcacccggcagccctgccggcagccccacctccacagaggagggaaccagcaccgagcccagcgaaggcagcgccccaggcaccagcaccgagcctagtgagcaggagattaaacggatcaacaagatcagaagaagacttgtgaaagacagcaacaccaagaaggccggcaagacaggccccatgaaaaccctgctggttagagtgatgacacccgatctgagagagcggctggaaaacctgagaaagaagcctgaaaatatcccccagcccatcagcaatacatctagagccaacctgaataagctgctgaccgattacaccgaaatgaagaaggcgatcctgcatgtgtactgggaagagttccagaaggaccctgtgggcctgatgagccgggtggcccagcctgccagcaagaagatcgatcagaacaagctgaaacctgagatggacgagaagggcaacctgaccaccgccggctttgcctgctctcagtgtggccagcccctgttcgtgtacaagctggagcaggtgtctgagaagggcaaggcttacaccaactacttcggacggtgcaatgtggccgagcacgaaaagctgatcctgctggcccagctgaagcccgagaaggatagcgacgaagccgtgacatatagcctgggaaagtttgggcagagggccctggatttctacagcattcatgtgaccaaggagtccacccaccccgtgaagcccctggcccagatcgccggaaacagatacgcctccggacctgtgggaaaggccctgagcgacgcatgtatgggcacaatcgcctccttcctgtctaagtaccaggacatcatcatcgaacaccagaaggtggtgaagggcaaccagaagagactggagagcctgcgggagctggccggcaaggaaaacctggaataccctagcgtgaccctgccacctcagcctcacaccaaggagggcgttgatgcctacaacgaagtgatcgcccgggtgcgaatgtgggtgaacctgaacctgtggcagaagctgaagctaagcagagatgatgccaagcctctgctgagactgaagggattcccttcctttcctctggtcgagagacaggccaacgaagtggactggtgggacatggtgtgtaacgtgaagaagctgatcaacgagaaaaaggaggatggcaaggtgttttggcagaatctggctggctacaagagacaggaagccctgagaccatacctgagcagcgaggaagatcggaagaagggaaagaaattcgctcggtaccagctgggcgacctgctgctgcacctggaaaagaagcacggcgaggactggggaaaggtgtacgacgaggcctgggagcggattgacaagaaagtggaaggcctgagcaagcacatcaagctggaagaggaacggagaagcgaggacgcccagagcaaggccgccctgaccgactggctgcgggctaaggccagcttcgtgatcgagggcctgaaggaggccgacaaggacgagttctgcagatgcgagctgaagctgcagaagtggtacggggacctgcggggaaagcccttcgccatcgaagccgagaacagcatcctggacatcagcggcttcagcaagcagtacaactgtgccttcatctggcagaaggacggcgtgaagaagctgaacctgtacctgatcatcaactacttcaagggcggcaagctgcggttcaagaagatcaaacctgaagccttcgaagccaacagattctacaccgtgatcaacaaaaagagcggcgagatcgtgcccatggaggtgaacttcaacttcgacgaccccaacctgatcatcctgcctctggcctttggcaagagacagggcagagaattcatctggaacgacctgctgtccctggaaaccggcagcctgaagctggccaacggaagagtgatcgagaagacactgtacaacagaagaacccggcaggatgagcctgccctgttcgtggccctgaccttcgagcggcgggaggtcctggactcctccaatatcaaaccaatgaacctgatcggcgtggcaagaggcgaaaacatccccgccgtgatcgccctgaccgaccccgagggctgcccactgagccggtttaaggatagcctgggaaacccaacccacatcctgagaatcggcgagagctataaggagaagcagcggaccatccaggccaagaaggaggtggagcagcggagagccggcggctacagccggaagtacgccagcaaagccaagaatctggcagacgatatggtgagaaacaccgctagagatctgctgtactacgccgtgacccaggatgccatgctgatcttcgccaacctgagccggggcttcggccggcagggcaagcggaccttcatggccgagagacagtacacacggatggaggactggctgaccgccaagctggcctacgagggcctgagcaagacctacctgtccaagacactggcccagtacacctccaagacatgcagcaactgtgggtttaccatcaccagcgccgactacgacagggtgctggagaagctgaagaagacagcaacaggctggatgaccacaattaacggcaaggagctgaaggtggagggccagattacctactacaacagatacaagagacagaacgtagtcaaggacctgtccgtcgagctggatagactgagcgaagaatctgtgaacaacgacatctcctcctggacaaagggcagaagcggagaagctctgagcctcctgaagaaaagattctcccatagacccgtgcaggagaagttcgtgtgcctgaactgcggcttcgagacacacgcagccgagcaagccgccctgaacatcgccagatcctggctgttcctgcggagccaggagtacaagaaataccagacaaacaagacaaccggcaacaccgataagagagccttcgtcgagacctggcagtccttttaccggaagaagcttaaggaggtgtggaaacctgccgtgcggtctggcggatctggcggaggctccaccagccccaagaaaaagagaaaagtctaagctgccttctgcggggcttgccttctggccatgcccttcttctctcccttgcacctgtacctcttggtctttgaataaagcctgagtaggaaggctagcaaaaaaaaaaaaaaaaaaaaaaaaaaaaaaaaaaaaaaaaaaaaaaaaaaaaaaaaaaaaaaaaaaaaaaaaaaaaaaaa

SEQ ID NO: 12639 - RNA, 5785 nt, synthetic construct
  source 1..5785: mol_type = other RNA
aggaaataagagagaaaagaagagtaagaagaaatataagagccaccatggcccctaagaagaagcgtaaagtgagccggatggaacgcctcgtctacgaggtgcggcagaagtgcagaaacatcgaggacatctgcatctcctgcggatctctgaacgtgaccctggagcacccactgttcatcggcggcatgtgccagaactgtaaaaactgttttctggagtgtgcctatcaatacgacgatgacggctaccagagctactgcaccatctgttgcggcggaagagaggtgctgatgtgtggaaataacaactgctgccggtgcttctgcgtggaatgcgtggacctgctggtgggccccggcgccgcccaggccgctattaaggaagatccttggaactgctacatgtgcggccacaagggcacatacggcctgctgagacggagagaggactggcctagcagactgcagatgttcttcgccaataaccacgaccaggagttcgacccccctaaggtgtaccctcccgtccccgccgagaagagaaagcccatccgggtcctgagcctgttcgatggcatcgccaccggtctgctggtgctgaaggacctgggcatccaggtggataggtacattgcctccgaggtgtgcgaggactccatcaccgtgggaatggtgcgtcatcagggcaagatcatgtacgtgggcgacgtgcggagcgtgacacagaagcatatccaggagtggggccctttcgacctggtgatcggcggcagcccttgcaatgacctgagcatcgtgaacccagcccggaagggcctgtacgagggaaccggcagactgttcttcgagttttacagactgctgcacgacgcccggcctaaggaaggcgacgaccggcccttcttttggctgttcgagaatgtggtggccatgggagtcagcgacaagcgggatattagccggttcctggagagcaaccccgtgatgatcgatgccaaggaagtgagcgccgcccaccgggccagatacttctggggcaatctgcctggcatgaacagacccctggccagcaccgtgaacgacaagctggagctgcaggagtgcctggagcacggccggatcgccaagttcagcaaggtgagaaccatcaccacccgaagcaacagcatcaaacaaggcaaggaccagcactttcctgtgttcatgaacgagaaggaggacatcctgtggtgtaccgagatggagagagtgttcgggttcccagtccactacacagatgtcagcaacatgtctagactggccagacagagactgctgggaagaagctggtccgtccctgtgatcagacacctgttcgcccctctgaaggagtacttcgcctgcgtgagcagcggcaacagcaacgccaacagccggggccccagcttctctagcggcctggtgccactgtccctgagagggagccacatgggccccatggagatctacaaaaccgtgagcgcctggaagcggcagcctgtgcgcgtgctgagcctgtttcggaatatcgataaagtcctgaaaagcctgggattcctggagagcggctctggctccggcggtggcaccctgaagtacgtggaggatgtgacaaacgtggtcagacgggatgtggagaagtggggccccttcgatctggtgtacggcagcacccaacccctgggcagctcttgtgaccggtgccctggctggtacatgtttcagttccaccggatcctgcagtacgccctgccgagacaggagtcccagcggccattcttttggattttcatggacaacttgctgctgaccgaggatgaccaggaaactaccactcggttcctgcagaccgaagccgtgaccctgcaggacgtgagaggccgggactaccagaacgccatgcgggtgtggtccaacatccctggactgaaaagcaagcacgcacctctgacccctaaagaagaggagtacctgcaggcccaggtgcggagcagaagcaagctggacgcccctaaggtggatctgctggtgaagaattgcctcctgcccctgagagagtacttcaagtatttcagccagaatagtctgcccctgggaggcagcggcggcggcagccagggcagcatcaccttcaaggacgtggccgtggacttcacccaggaggagtggtgcctgctggaccacagccagaaggccctgcacctggaggtgatgctggagaacgtgcagaacctgctgagcgtgggcctgcccgtgcccagggagaacttcatcagctgcttccagcagggcaaggccccctacctgctgcagcagaacgaccccaagagcagcagccccgaggccgagaccaacggcggcccaagcagcggcgcccctcctcccagcggcggcagcccagccggctccccaacctctaccgaggagggcacctctgagtccgccacccccgagagcggccctggcacctccaccgagcccagcgagggcagcgcacccggcagccctgccggcagccccacctccacagaggagggaaccagcaccgagcccagcgaaggcagcgccccaggcaccagcaccgagcctagtgagcaggagattaaacggatcaacaagatcagaagaagacttgtgaaagacagcaacaccaagaaggccggcaagacaggccccatgaaaaccctgctggttagagtgatgacacccgatctgagagagcggctggaaaacctgagaaagaagcctgaaaatatcccccagcccatcagcaatacatctagagccaacctgaataagctgctgaccgattacaccgaaatgaagaaggcgatcctgcatgtgtactgggaagagttccagaaggaccctgtgggcctgatgagccgggtggcccagcctgccagcaagaagatcgatcagaacaagctgaaacctgagatggacgagaagggcaacctgaccaccgccggctttgcctgctctcagtgtggccagcccctgttcgtgtacaagctggagcaggtgtctgagaagggcaaggcttacaccaactacttcggacggtgcaatgtggccgagcacgaaaagctgatcctgctggcccagctgaagcccgagaaggatagcgacgaagccgtgacatatagcctgggaaagtttgggcagagggccctggatttctacagcattcatgtgaccaaggagtccacccaccccgtgaagcccctggcccagatcgccggaaacagatacgcctccggacctgtgggaaaggccctgagcgacgcatgtatgggcacaatcgcctccttcctgtctaagtaccaggacatcatcatcgaacaccagaaggtggtgaagggcaaccagaagagactggagagcctgcgggagctggccggcaaggaaaacctggaataccctagcgtgaccctgccacctcagcctcacaccaaggagggcgttgatgcctacaacgaagtgatcgcccgggtgcgaatgtgggtgaacctgaacctgtggcagaagctgaagctaagcagagatgatgccaagcctctgctgagactgaagggattcccttcctttcctctggtcgagagacaggccaacgaagtggactggtgggacatggtgtgtaacgtgaagaagctgatcaacgagaaaaaggaggatggcaaggtgttttggcagaatctggctggctacaagagacaggaagccctgagaccatacctgagcagcgaggaagatcggaagaagggaaagaaattcgctcggtaccagctgggcgacctgctgctgcacctggaaaagaagcacggcgaggactggggaaaggtgtacgacgaggcctgggagcggattgacaagaaagtggaaggcctgagcaagcacatcaagctggaagaggaacggagaagcgaggacgcccagagcaaggccgccctgaccgactggctgcgggctaaggccagcttcgtgatcgagggcctgaaggaggccgacaaggacgagttctgcagatgcgagctgaagctgcagaagtggtacggggacctgcggggaaagcccttcgccatcgaagccgagaacagcatcctggacatcagcggcttcagcaagcagtacaactgtgccttcatctggcagaaggacggcgtgaagaagctgaacctgtacctgatcatcaactacttcaagggcggcaagctgcggttcaagaagatcaaacctgaagccttcgaagccaacagattctacaccgtgatcaacaaaaagagcggcgagatcgtgcccatggaggtgaacttcaacttcgacgaccccaacctgatcatcctgcctctggcctttggcaagagacagggcagagaattcatctggaacgacctgctgtccctggaaaccggcagcctgaagctggccaacggaagagtgatcgagaagacactgtacaacagaagaacccggcaggatgagcctgccctgttcgtggccctgaccttcgagcggcgggaggtcctggactcctccaatatcaaaccaatgaacctgatcggcgtggcaagaggcgaaaacatccccgccgtgatcgccctgaccgaccccgagggctgcccactgagccggtttaaggatagcctgggaaacccaacccacatcctgagaatcggcgagagctataaggagaagcagcggaccatccaggccaagaaggaggtggagcagcggagagccggcggctacagccggaagtacgccagcaaagccaagaatctggcagacgatatggtgagaaacaccgctagagatctgctgtactacgccgtgacccaggatgccatgctgatcttcgccaacctgagccggggcttcggccggcagggcaagcggaccttcatggccgagagacagtacacacggatggaggactggctgaccgccaagctggcctacgagggcctgagcaagacctacctgtccaagacactggcccagtacacctccaagacatgcagcaactgtgggtttaccatcaccagcgccgactacgacagggtgctggagaagctgaagaagacagcaacaggctggatgaccacaattaacggcaaggagctgaaggtggagggccagattacctactacaacagatacaagagacagaacgtagtcaaggacctgtccgtcgagctggatagactgagcgaagaatctgtgaacaacgacatctcctcctggacaaagggcagaagcggagaagctctgagcctcctgaagaaaagattctcccatagacccgtgcaggagaagttcgtgtgcctgaactgcggcttcgagacacacgcagccgagcaagccgccctgaacatcgccagatcctggctgttcctgcggagccaggagtacaagaaataccagacaaacaagacaaccggcaacaccgataagagagccttcgtcgagacctggcagtccttttaccggaagaagcttaaggaggtgtggaaacctgccgtgcggtctggcggatctggcggaggctccaccagccccaagaaaaagagaaaagtctaagctgccttctgcggggcttgccttctggccatgcccttcttctctcccttgcacctgtacctcttggtctttgaataaagcctgagtaggaaggctagcaaaaaaaaaaaaaaaaaaaaaaaaaaaaaaaaaaaaaaaaaaaaaaaaaaaaaaaaaaaaaaaaaaaaaaaaaaaaaaaa

SEQ ID NO: 12640 - RNA, 5785 nt, synthetic construct
  source 1..5785: mol_type = other RNA
aggaaataagagagaaaagaagagtaagaagaaatataagagccaccatggcccctaagaagaagcgtaaagtgagccggatggaacgcctcgtctacgaggtgcggcagaagtgcagaaacatcgaggacatctgcatctcctgcggatctctgaacgtgaccctggagcacccactgttcatcggcggcatgtgccagaactgtaaaaactgttttctggagtgtgcctatcaatacgacgatgacggctaccagagctactgcaccatctgttgcggcggaagagaggtgctgatgtgtggaaataacaactgctgccggtgcttctgcgtggaatgcgtggacctgctggtgggccccggcgccgcccaggccgctattaaggaagatccttggaactgctacatgtgcggccacaagggcacatacggcctgctgagacggagagaggactggcctagcagactgcagatgttcttcgccaataaccacgaccaggagttcgacccccctaaggtgtaccctcccgtccccgccgagaagagaaagcccatccgggtcctgagcctgttcgatggcatcgccaccggtctgctggtgctgaaggacctgggcatccaggtggataggtacattgcctccgaggtgtgcgaggactccatcaccgtgggaatggtgcgtcatcagggcaagatcatgtacgtgggcgacgtgcggagcgtgacacagaagcatatccaggagtggggccctttcgacctggtgatcggcggcagcccttgcaatgacctgagcatcgtgaacccagcccggaagggcctgtacgagggaaccggcagactgttcttcgagttttacagactgctgcacgacgcccggcctaaggaaggcgacgaccggcccttcttttggctgttcgagaatgtggtggccatgggagtcagcgacaagcgggatattagccggttcctggagagcaaccccgtgatgatcgatgccaaggaagtgagcgccgcccaccgggccagatacttctggggcaatctgcctggcatgaacagacccctggccagcaccgtgaacgacaagctggagctgcaggagtgcctggagcacggccggatcgccaagttcagcaaggtgagaaccatcaccacccgaagcaacagcatcaaacaaggcaaggaccagcactttcctgtgttcatgaacgagaaggaggacatcctgtggtgtaccgagatggagagagtgttcgggttcccagtccactacacagatgtcagcaacatgtctagactggccagacagagactgctgggaagaagctggtccgtccctgtgatcagacacctgttcgcccctctgaaggagtacttcgcctgcgtgagcagcggcaacagcaacgccaacagccggggccccagcttctctagcggcctggtgccactgtccctgagagggagccacatgggccccatggagatctacaaaaccgtgagcgcctggaagcggcagcctgtgcgcgtgctgagcctgtttcggaatatcgataaagtcctgaaaagcctgggattcctggagagcggctctggctccggcggtggcaccctgaagtacgtggaggatgtgacaaacgtggtcagacgggatgtggagaagtggggccccttcgatctggtgtacggcagcacccaacccctgggcagctcttgtgaccggtgccctggctggtacatgtttcagttccaccggatcctgcagtacgccctgccgagacaggagtcccagcggccattcttttggattttcatggacaacttgctgctgaccgaggatgaccaggaaactaccactcggttcctgcagaccgaagccgtgaccctgcaggacgtgagaggccgggactaccagaacgccatgcgggtgtggtccaacatccctggactgaaaagcaagcacgcacctctgacccctaaagaagaggagtacctgcaggcccaggtgcggagcagaagcaagctggacgcccctaaggtggatctgctggtgaagaattgcctcctgcccctgagagagtacttcaagtatttcagccagaatagtctgcccctgggaggcagcggcggcggcgcccaggagagcgtgaccttcagggacgtggccgtggtgttcagcagggacgagtggctgtgcctggaccccgcccagaggagcctgtacagggaggtgatgctggagaactacggcaccctggtgagcctgggcatcctgttcagcaagcccaaggtgatcttccagctgcagcagggcgaggacccctggatggtggagagcggcgtgagccagggcccctgcgtgggctgggagagcatgggcggcccaagcagcggcgcccctcctcccagcggcggcagcccagccggctccccaacctctaccgaggagggcacctctgagtccgccacccccgagagcggccctggcacctccaccgagcccagcgagggcagcgcacccggcagccctgccggcagccccacctccacagaggagggaaccagcaccgagcccagcgaaggcagcgccccaggcaccagcaccgagcctagtgagcaggagattaaacggatcaacaagatcagaagaagacttgtgaaagacagcaacaccaagaaggccggcaagacaggccccatgaaaaccctgctggttagagtgatgacacccgatctgagagagcggctggaaaacctgagaaagaagcctgaaaatatcccccagcccatcagcaatacatctagagccaacctgaataagctgctgaccgattacaccgaaatgaagaaggcgatcctgcatgtgtactgggaagagttccagaaggaccctgtgggcctgatgagccgggtggcccagcctgccagcaagaagatcgatcagaacaagctgaaacctgagatggacgagaagggcaacctgaccaccgccggctttgcctgctctcagtgtggccagcccctgttcgtgtacaagctggagcaggtgtctgagaagggcaaggcttacaccaactacttcggacggtgcaatgtggccgagcacgaaaagctgatcctgctggcccagctgaagcccgagaaggatagcgacgaagccgtgacatatagcctgggaaagtttgggcagagggccctggatttctacagcattcatgtgaccaaggagtccacccaccccgtgaagcccctggcccagatcgccggaaacagatacgcctccggacctgtgggaaaggccctgagcgacgcatgtatgggcacaatcgcctccttcctgtctaagtaccaggacatcatcatcgaacaccagaaggtggtgaagggcaaccagaagagactggagagcctgcgggagctggccggcaaggaaaacctggaataccctagcgtgaccctgccacctcagcctcacaccaaggagggcgttgatgcctacaacgaagtgatcgcccgggtgcgaatgtgggtgaacctgaacctgtggcagaagctgaagctaagcagagatgatgccaagcctctgctgagactgaagggattcccttcctttcctctggtcgagagacaggccaacgaagtggactggtgggacatggtgtgtaacgtgaagaagctgatcaacgagaaaaaggaggatggcaaggtgttttggcagaatctggctggctacaagagacaggaagccctgagaccatacctgagcagcgaggaagatcggaagaagggaaagaaattcgctcggtaccagctgggcgacctgctgctgcacctggaaaagaagcacggcgaggactggggaaaggtgtacgacgaggcctgggagcggattgacaagaaagtggaaggcctgagcaagcacatcaagctggaagaggaacggagaagcgaggacgcccagagcaaggccgccctgaccgactggctgcgggctaaggccagcttcgtgatcgagggcctgaaggaggccgacaaggacgagttctgcagatgcgagctgaagctgcagaagtggtacggggacctgcggggaaagcccttcgccatcgaagccgagaacagcatcctggacatcagcggcttcagcaagcagtacaactgtgccttcatctggcagaaggacggcgtgaagaagctgaacctgtacctgatcatcaactacttcaagggcggcaagctgcggttcaagaagatcaaacctgaagccttcgaagccaacagattctacaccgtgatcaacaaaaagagcggcgagatcgtgcccatggaggtgaacttcaacttcgacgaccccaacctgatcatcctgcctctggcctttggcaagagacagggcagagaattcatctggaacgacctgctgtccctggaaaccggcagcctgaagctggccaacggaagagtgatcgagaagacactgtacaacagaagaacccggcaggatgagcctgccctgttcgtggccctgaccttcgagcggcgggaggtcctggactcctccaatatcaaaccaatgaacctgatcggcgtggcaagaggcgaaaacatccccgccgtgatcgccctgaccgaccccgagggctgcccactgagccggtttaaggatagcctgggaaacccaacccacatcctgagaatcggcgagagctataaggagaagcagcggaccatccaggccaagaaggaggtggagcagcggagagccggcggctacagccggaagtacgccagcaaagccaagaatctggcagacgatatggtgagaaacaccgctagagatctgctgtactacgccgtgacccaggatgccatgctgatcttcgccaacctgagccggggcttcggccggcagggcaagcggaccttcatggccgagagacagtacacacggatggaggactggctgaccgccaagctggcctacgagggcctgagcaagacctacctgtccaagacactggcccagtacacctccaagacatgcagcaactgtgggtttaccatcaccagcgccgactacgacagggtgctggagaagctgaagaagacagcaacaggctggatgaccacaattaacggcaaggagctgaaggtggagggccagattacctactacaacagatacaagagacagaacgtagtcaaggacctgtccgtcgagctggatagactgagcgaagaatctgtgaacaacgacatctcctcctggacaaagggcagaagcggagaagctctgagcctcctgaagaaaagattctcccatagacccgtgcaggagaagttcgtgtgcctgaactgcggcttcgagacacacgcagccgagcaagccgccctgaacatcgccagatcctggctgttcctgcggagccaggagtacaagaaataccagacaaacaagacaaccggcaacaccgataagagagccttcgtcgagacctggcagtccttttaccggaagaagcttaaggaggtgtggaaacctgccgtgcggtctggcggatctggcggaggctccaccagccccaagaaaaagagaaaagtctaagctgccttctgcggggcttgccttctggccatgcccttcttctctcccttgcacctgtacctcttggtctttgaataaagcctgagtaggaaggctagcaaaaaaaaaaaaaaaaaaaaaaaaaaaaaaaaaaaaaaaaaaaaaaaaaaaaaaaaaaaaaaaaaaaaaaaaaaaaaaaa

SEQ ID NO: 12641 - RNA, 5785 nt, synthetic construct
  source 1..5785: mol_type = other RNA
aggaaataagagagaaaagaagagtaagaagaaatataagagccaccatggcccctaagaagaagcgtaaagtgagccggatggaacgcctcgtctacgaggtgcggcagaagtgcagaaacatcgaggacatctgcatctcctgcggatctctgaacgtgaccctggagcacccactgttcatcggcggcatgtgccagaactgtaaaaactgttttctggagtgtgcctatcaatacgacgatgacggctaccagagctactgcaccatctgttgcggcggaagagaggtgctgatgtgtggaaataacaactgctgccggtgcttctgcgtggaatgcgtggacctgctggtgggccccggcgccgcccaggccgctattaaggaagatccttggaactgctacatgtgcggccacaagggcacatacggcctgctgagacggagagaggactggcctagcagactgcagatgttcttcgccaataaccacgaccaggagttcgacccccctaaggtgtaccctcccgtccccgccgagaagagaaagcccatccgggtcctgagcctgttcgatggcatcgccaccggtctgctggtgctgaaggacctgggcatccaggtggataggtacattgcctccgaggtgtgcgaggactccatcaccgtgggaatggtgcgtcatcagggcaagatcatgtacgtgggcgacgtgcggagcgtgacacagaagcatatccaggagtggggccctttcgacctggtgatcggcggcagcccttgcaatgacctgagcatcgtgaacccagcccggaagggcctgtacgagggaaccggcagactgttcttcgagttttacagactgctgcacgacgcccggcctaaggaaggcgacgaccggcccttcttttggctgttcgagaatgtggtggccatgggagtcagcgacaagcgggatattagccggttcctggagagcaaccccgtgatgatcgatgccaaggaagtgagcgccgcccaccgggccagatacttctggggcaatctgcctggcatgaacagacccctggccagcaccgtgaacgacaagctggagctgcaggagtgcctggagcacggccggatcgccaagttcagcaaggtgagaaccatcaccacccgaagcaacagcatcaaacaaggcaaggaccagcactttcctgtgttcatgaacgagaaggaggacatcctgtggtgtaccgagatggagagagtgttcgggttcccagtccactacacagatgtcagcaacatgtctagactggccagacagagactgctgggaagaagctggtccgtccctgtgatcagacacctgttcgcccctctgaaggagtacttcgcctgcgtgagcagcggcaacagcaacgccaacagccggggccccagcttctctagcggcctggtgccactgtccctgagagggagccacatgggccccatggagatctacaaaaccgtgagcgcctggaagcggcagcctgtgcgcgtgctgagcctgtttcggaatatcgataaagtcctgaaaagcctgggattcctggagagcggctctggctccggcggtggcaccctgaagtacgtggaggatgtgacaaacgtggtcagacgggatgtggagaagtggggccccttcgatctggtgtacggcagcacccaacccctgggcagctcttgtgaccggtgccctggctggtacatgtttcagttccaccggatcctgcagtacgccctgccgagacaggagtcccagcggccattcttttggattttcatggacaacttgctgctgaccgaggatgaccaggaaactaccactcggttcctgcagaccgaagccgtgaccctgcaggacgtgagaggccgggactaccagaacgccatgcgggtgtggtccaacatccctggactgaaaagcaagcacgcacctctgacccctaaagaagaggagtacctgcaggcccaggtgcggagcagaagcaagctggacgcccctaaggtggatctgctggtgaagaattgcctcctgcccctgagagagtacttcaagtatttcagccagaatagtctgcccctgggaggcagcggcggcggcatgagggtgctgaccttcagggacgtggccgtggagttcagccccgaggagtgggagtgcctggacagcgcccagcagcacctgtacagggacgtgatgctggagaactacggcaacctgttcagcctgggcctggccatcttcaagcccgacctgatcacctacctggagcagaggaaggagccctggaacgccaggaggcagaagaccgtggccaagcaccccgccggcagcctgcacttcggcggcccaagcagcggcgcccctcctcccagcggcggcagcccagccggctccccaacctctaccgaggagggcacctctgagtccgccacccccgagagcggccctggcacctccaccgagcccagcgagggcagcgcacccggcagccctgccggcagccccacctccacagaggagggaaccagcaccgagcccagcgaaggcagcgccccaggcaccagcaccgagcctagtgagcaggagattaaacggatcaacaagatcagaagaagacttgtgaaagacagcaacaccaagaaggccggcaagacaggccccatgaaaaccctgctggttagagtgatgacacccgatctgagagagcggctggaaaacctgagaaagaagcctgaaaatatcccccagcccatcagcaatacatctagagccaacctgaataagctgctgaccgattacaccgaaatgaagaaggcgatcctgcatgtgtactgggaagagttccagaaggaccctgtgggcctgatgagccgggtggcccagcctgccagcaagaagatcgatcagaacaagctgaaacctgagatggacgagaagggcaacctgaccaccgccggctttgcctgctctcagtgtggccagcccctgttcgtgtacaagctggagcaggtgtctgagaagggcaaggcttacaccaactacttcggacggtgcaatgtggccgagcacgaaaagctgatcctgctggcccagctgaagcccgagaaggatagcgacgaagccgtgacatatagcctgggaaagtttgggcagagggccctggatttctacagcattcatgtgaccaaggagtccacccaccccgtgaagcccctggcccagatcgccggaaacagatacgcctccggacctgtgggaaaggccctgagcgacgcatgtatgggcacaatcgcctccttcctgtctaagtaccaggacatcatcatcgaacaccagaaggtggtgaagggcaaccagaagagactggagagcctgcgggagctggccggcaaggaaaacctggaataccctagcgtgaccctgccacctcagcctcacaccaaggagggcgttgatgcctacaacgaagtgatcgcccgggtgcgaatgtgggtgaacctgaacctgtggcagaagctgaagctaagcagagatgatgccaagcctctgctgagactgaagggattcccttcctttcctctggtcgagagacaggccaacgaagtggactggtgggacatggtgtgtaacgtgaagaagctgatcaacgagaaaaaggaggatggcaaggtgttttggcagaatctggctggctacaagagacaggaagccctgagaccatacctgagcagcgaggaagatcggaagaagggaaagaaattcgctcggtaccagctgggcgacctgctgctgcacctggaaaagaagcacggcgaggactggggaaaggtgtacgacgaggcctgggagcggattgacaagaaagtggaaggcctgagcaagcacatcaagctggaagaggaacggagaagcgaggacgcccagagcaaggccgccctgaccgactggctgcgggctaaggccagcttcgtgatcgagggcctgaaggaggccgacaaggacgagttctgcagatgcgagctgaagctgcagaagtggtacggggacctgcggggaaagcccttcgccatcgaagccgagaacagcatcctggacatcagcggcttcagcaagcagtacaactgtgccttcatctggcagaaggacggcgtgaagaagctgaacctgtacctgatcatcaactacttcaagggcggcaagctgcggttcaagaagatcaaacctgaagccttcgaagccaacagattctacaccgtgatcaacaaaaagagcggcgagatcgtgcccatggaggtgaacttcaacttcgacgaccccaacctgatcatcctgcctctggcctttggcaagagacagggcagagaattcatctggaacgacctgctgtccctggaaaccggcagcctgaagctggccaacggaagagtgatcgagaagacactgtacaacagaagaacccggcaggatgagcctgccctgttcgtggccctgaccttcgagcggcgggaggtcctggactcctccaatatcaaaccaatgaacctgatcggcgtggcaagaggcgaaaacatccccgccgtgatcgccctgaccgaccccgagggctgcccactgagccggtttaaggatagcctgggaaacccaacccacatcctgagaatcggcgagagctataaggagaagcagcggaccatccaggccaagaaggaggtggagcagcggagagccggcggctacagccggaagtacgccagcaaagccaagaatctggcagacgatatggtgagaaacaccgctagagatctgctgtactacgccgtgacccaggatgccatgctgatcttcgccaacctgagccggggcttcggccggcagggcaagcggaccttcatggccgagagacagtacacacggatggaggactggctgaccgccaagctggcctacgagggcctgagcaagacctacctgtccaagacactggcccagtacacctccaagacatgcagcaactgtgggtttaccatcaccagcgccgactacgacagggtgctggagaagctgaagaagacagcaacaggctggatgaccacaattaacggcaaggagctgaaggtggagggccagattacctactacaacagatacaagagacagaacgtagtcaaggacctgtccgtcgagctggatagactgagcgaagaatctgtgaacaacgacatctcctcctggacaaagggcagaagcggagaagctctgagcctcctgaagaaaagattctcccatagacccgtgcaggagaagttcgtgtgcctgaactgcggcttcgagacacacgcagccgagcaagccgccctgaacatcgccagatcctggctgttcctgcggagccaggagtacaagaaataccagacaaacaagacaaccggcaacaccgataagagagccttcgtcgagacctggcagtccttttaccggaagaagcttaaggaggtgtggaaacctgccgtgcggtctggcggatctggcggaggctccaccagccccaagaaaaagagaaaagtctaagctgccttctgcggggcttgccttctggccatgcccttcttctctcccttgcacctgtacctcttggtctttgaataaagcctgagtaggaaggctagcaaaaaaaaaaaaaaaaaaaaaaaaaaaaaaaaaaaaaaaaaaaaaaaaaaaaaaaaaaaaaaaaaaaaaaaaaaaaaaaa

SEQ ID NO: 12642 - RNA, 5785 nt, synthetic construct
  source 1..5785: mol_type = other RNA
aggaaataagagagaaaagaagagtaagaagaaatataagagccaccatggcccctaagaagaagcgtaaagtgagccggatggaacgcctcgtctacgaggtgcggcagaagtgcagaaacatcgaggacatctgcatctcctgcggatctctgaacgtgaccctggagcacccactgttcatcggcggcatgtgccagaactgtaaaaactgttttctggagtgtgcctatcaatacgacgatgacggctaccagagctactgcaccatctgttgcggcggaagagaggtgctgatgtgtggaaataacaactgctgccggtgcttctgcgtggaatgcgtggacctgctggtgggccccggcgccgcccaggccgctattaaggaagatccttggaactgctacatgtgcggccacaagggcacatacggcctgctgagacggagagaggactggcctagcagactgcagatgttcttcgccaataaccacgaccaggagttcgacccccctaaggtgtaccctcccgtccccgccgagaagagaaagcccatccgggtcctgagcctgttcgatggcatcgccaccggtctgctggtgctgaaggacctgggcatccaggtggataggtacattgcctccgaggtgtgcgaggactccatcaccgtgggaatggtgcgtcatcagggcaagatcatgtacgtgggcgacgtgcggagcgtgacacagaagcatatccaggagtggggccctttcgacctggtgatcggcggcagcccttgcaatgacctgagcatcgtgaacccagcccggaagggcctgtacgagggaaccggcagactgttcttcgagttttacagactgctgcacgacgcccggcctaaggaaggcgacgaccggcccttcttttggctgttcgagaatgtggtggccatgggagtcagcgacaagcgggatattagccggttcctggagagcaaccccgtgatgatcgatgccaaggaagtgagcgccgcccaccgggccagatacttctggggcaatctgcctggcatgaacagacccctggccagcaccgtgaacgacaagctggagctgcaggagtgcctggagcacggccggatcgccaagttcagcaaggtgagaaccatcaccacccgaagcaacagcatcaaacaaggcaaggaccagcactttcctgtgttcatgaacgagaaggaggacatcctgtggtgtaccgagatggagagagtgttcgggttcccagtccactacacagatgtcagcaacatgtctagactggccagacagagactgctgggaagaagctggtccgtccctgtgatcagacacctgttcgcccctctgaaggagtacttcgcctgcgtgagcagcggcaacagcaacgccaacagccggggccccagcttctctagcggcctggtgccactgtccctgagagggagccacatgggccccatggagatctacaaaaccgtgagcgcctggaagcggcagcctgtgcgcgtgctgagcctgtttcggaatatcgataaagtcctgaaaagcctgggattcctggagagcggctctggctccggcggtggcaccctgaagtacgtggaggatgtgacaaacgtggtcagacgggatgtggagaagtggggccccttcgatctggtgtacggcagcacccaacccctgggcagctcttgtgaccggtgccctggctggtacatgtttcagttccaccggatcctgcagtacgccctgccgagacaggagtcccagcggccattcttttggattttcatggacaacttgctgctgaccgaggatgaccaggaaactaccactcggttcctgcagaccgaagccgtgaccctgcaggacgtgagaggccgggactaccagaacgccatgcgggtgtggtccaacatccctggactgaaaagcaagcacgcacctctgacccctaaagaagaggagtacctgcaggcccaggtgcggagcagaagcaagctggacgcccctaaggtggatctgctggtgaagaattgcctcctgcccctgagagagtacttcaagtatttcagccagaatagtctgcccctgggaggcagcggcggcggcagccaggagagcctgaccttcaaggacgtggccgtggacttcacccccgaggagtggggccagctgtaccccgcccagagggacctgtacagggaggtgatgctggagaactacaggaacctggtgagcctgggccaccaggtgagcaagccccacctgatcagccagctggagcagaggaaggagccctggatgatggagaggaagatccccaggggcaacttccccgactgggagaccaggggcggcccaagcagcggcgcccctcctcccagcggcggcagcccagccggctccccaacctctaccgaggagggcacctctgagtccgccacccccgagagcggccctggcacctccaccgagcccagcgagggcagcgcacccggcagccctgccggcagccccacctccacagaggagggaaccagcaccgagcccagcgaaggcagcgccccaggcaccagcaccgagcctagtgagcaggagattaaacggatcaacaagatcagaagaagacttgtgaaagacagcaacaccaagaaggccggcaagacaggccccatgaaaaccctgctggttagagtgatgacacccgatctgagagagcggctggaaaacctgagaaagaagcctgaaaatatcccccagcccatcagcaatacatctagagccaacctgaataagctgctgaccgattacaccgaaatgaagaaggcgatcctgcatgtgtactgggaagagttccagaaggaccctgtgggcctgatgagccgggtggcccagcctgccagcaagaagatcgatcagaacaagctgaaacctgagatggacgagaagggcaacctgaccaccgccggctttgcctgctctcagtgtggccagcccctgttcgtgtacaagctggagcaggtgtctgagaagggcaaggcttacaccaactacttcggacggtgcaatgtggccgagcacgaaaagctgatcctgctggcccagctgaagcccgagaaggatagcgacgaagccgtgacatatagcctgggaaagtttgggcagagggccctggatttctacagcattcatgtgaccaaggagtccacccaccccgtgaagcccctggcccagatcgccggaaacagatacgcctccggacctgtgggaaaggccctgagcgacgcatgtatgggcacaatcgcctccttcctgtctaagtaccaggacatcatcatcgaacaccagaaggtggtgaagggcaaccagaagagactggagagcctgcgggagctggccggcaaggaaaacctggaataccctagcgtgaccctgccacctcagcctcacaccaaggagggcgttgatgcctacaacgaagtgatcgcccgggtgcgaatgtgggtgaacctgaacctgtggcagaagctgaagctaagcagagatgatgccaagcctctgctgagactgaagggattcccttcctttcctctggtcgagagacaggccaacgaagtggactggtgggacatggtgtgtaacgtgaagaagctgatcaacgagaaaaaggaggatggcaaggtgttttggcagaatctggctggctacaagagacaggaagccctgagaccatacctgagcagcgaggaagatcggaagaagggaaagaaattcgctcggtaccagctgggcgacctgctgctgcacctggaaaagaagcacggcgaggactggggaaaggtgtacgacgaggcctgggagcggattgacaagaaagtggaaggcctgagcaagcacatcaagctggaagaggaacggagaagcgaggacgcccagagcaaggccgccctgaccgactggctgcgggctaaggccagcttcgtgatcgagggcctgaaggaggccgacaaggacgagttctgcagatgcgagctgaagctgcagaagtggtacggggacctgcggggaaagcccttcgccatcgaagccgagaacagcatcctggacatcagcggcttcagcaagcagtacaactgtgccttcatctggcagaaggacggcgtgaagaagctgaacctgtacctgatcatcaactacttcaagggcggcaagctgcggttcaagaagatcaaacctgaagccttcgaagccaacagattctacaccgtgatcaacaaaaagagcggcgagatcgtgcccatggaggtgaacttcaacttcgacgaccccaacctgatcatcctgcctctggcctttggcaagagacagggcagagaattcatctggaacgacctgctgtccctggaaaccggcagcctgaagctggccaacggaagagtgatcgagaagacactgtacaacagaagaacccggcaggatgagcctgccctgttcgtggccctgaccttcgagcggcgggaggtcctggactcctccaatatcaaaccaatgaacctgatcggcgtggcaagaggcgaaaacatccccgccgtgatcgccctgaccgaccccgagggctgcccactgagccggtttaaggatagcctgggaaacccaacccacatcctgagaatcggcgagagctataaggagaagcagcggaccatccaggccaagaaggaggtggagcagcggagagccggcggctacagccggaagtacgccagcaaagccaagaatctggcagacgatatggtgagaaacaccgctagagatctgctgtactacgccgtgacccaggatgccatgctgatcttcgccaacctgagccggggcttcggccggcagggcaagcggaccttcatggccgagagacagtacacacggatggaggactggctgaccgccaagctggcctacgagggcctgagcaagacctacctgtccaagacactggcccagtacacctccaagacatgcagcaactgtgggtttaccatcaccagcgccgactacgacagggtgctggagaagctgaagaagacagcaacaggctggatgaccacaattaacggcaaggagctgaaggtggagggccagattacctactacaacagatacaagagacagaacgtagtcaaggacctgtccgtcgagctggatagactgagcgaagaatctgtgaacaacgacatctcctcctggacaaagggcagaagcggagaagctctgagcctcctgaagaaaagattctcccatagacccgtgcaggagaagttcgtgtgcctgaactgcggcttcgagacacacgcagccgagcaagccgccctgaacatcgccagatcctggctgttcctgcggagccaggagtacaagaaataccagacaaacaagacaaccggcaacaccgataagagagccttcgtcgagacctggcagtccttttaccggaagaagcttaaggaggtgtggaaacctgccgtgcggtctggcggatctggcggaggctccaccagccccaagaaaaagagaaaagtctaagctgccttctgcggggcttgccttctggccatgcccttcttctctcccttgcacctgtacctcttggtctttgaataaagcctgagtaggaaggctagcaaaaaaaaaaaaaaaaaaaaaaaaaaaaaaaaaaaaaaaaaaaaaaaaaaaaaaaaaaaaaaaaaaaaaaaaaaaaaaaa

SEQ ID NO: 12643 - RNA, 5785 nt, synthetic construct
  source 1..5785: mol_type = other RNA
aggaaataagagagaaaagaagagtaagaagaaatataagagccaccatggcccctaagaagaagcgtaaagtgagccggatggaacgcctcgtctacgaggtgcggcagaagtgcagaaacatcgaggacatctgcatctcctgcggatctctgaacgtgaccctggagcacccactgttcatcggcggcatgtgccagaactgtaaaaactgttttctggagtgtgcctatcaatacgacgatgacggctaccagagctactgcaccatctgttgcggcggaagagaggtgctgatgtgtggaaataacaactgctgccggtgcttctgcgtggaatgcgtggacctgctggtgggccccggcgccgcccaggccgctattaaggaagatccttggaactgctacatgtgcggccacaagggcacatacggcctgctgagacggagagaggactggcctagcagactgcagatgttcttcgccaataaccacgaccaggagttcgacccccctaaggtgtaccctcccgtccccgccgagaagagaaagcccatccgggtcctgagcctgttcgatggcatcgccaccggtctgctggtgctgaaggacctgggcatccaggtggataggtacattgcctccgaggtgtgcgaggactccatcaccgtgggaatggtgcgtcatcagggcaagatcatgtacgtgggcgacgtgcggagcgtgacacagaagcatatccaggagtggggccctttcgacctggtgatcggcggcagcccttgcaatgacctgagcatcgtgaacccagcccggaagggcctgtacgagggaaccggcagactgttcttcgagttttacagactgctgcacgacgcccggcctaaggaaggcgacgaccggcccttcttttggctgttcgagaatgtggtggccatgggagtcagcgacaagcgggatattagccggttcctggagagcaaccccgtgatgatcgatgccaaggaagtgagcgccgcccaccgggccagatacttctggggcaatctgcctggcatgaacagacccctggccagcaccgtgaacgacaagctggagctgcaggagtgcctggagcacggccggatcgccaagttcagcaaggtgagaaccatcaccacccgaagcaacagcatcaaacaaggcaaggaccagcactttcctgtgttcatgaacgagaaggaggacatcctgtggtgtaccgagatggagagagtgttcgggttcccagtccactacacagatgtcagcaacatgtctagactggccagacagagactgctgggaagaagctggtccgtccctgtgatcagacacctgttcgcccctctgaaggagtacttcgcctgcgtgagcagcggcaacagcaacgccaacagccggggccccagcttctctagcggcctggtgccactgtccctgagagggagccacatgggccccatggagatctacaaaaccgtgagcgcctggaagcggcagcctgtgcgcgtgctgagcctgtttcggaatatcgataaagtcctgaaaagcctgggattcctggagagcggctctggctccggcggtggcaccctgaagtacgtggaggatgtgacaaacgtggtcagacgggatgtggagaagtggggccccttcgatctggtgtacggcagcacccaacccctgggcagctcttgtgaccggtgccctggctggtacatgtttcagttccaccggatcctgcagtacgccctgccgagacaggagtcccagcggccattcttttggattttcatggacaacttgctgctgaccgaggatgaccaggaaactaccactcggttcctgcagaccgaagccgtgaccctgcaggacgtgagaggccgggactaccagaacgccatgcgggtgtggtccaacatccctggactgaaaagcaagcacgcacctctgacccctaaagaagaggagtacctgcaggcccaggtgcggagcagaagcaagctggacgcccctaaggtggatctgctggtgaagaattgcctcctgcccctgagagagtacttcaagtatttcagccagaatagtctgcccctgggaggcagcggcggcggcccccagggcctggtgaccttcggcgacgtggccgtggacttcagccaggaggagtgggagtggctggactgcgcccagaggaccctgtacaggagcgtgatgctggagaactacaggagcctggtgagcctgggcctgtgcgtgagcaagcccgagatgatcagcagcctggagcagaggaaggagccctggaccgtgaagaggaagtgcaccaggggccagtgccccgacagcgaggccgtgggcggcccaagcagcggcgcccctcctcccagcggcggcagcccagccggctccccaacctctaccgaggagggcacctctgagtccgccacccccgagagcggccctggcacctccaccgagcccagcgagggcagcgcacccggcagccctgccggcagccccacctccacagaggagggaaccagcaccgagcccagcgaaggcagcgccccaggcaccagcaccgagcctagtgagcaggagattaaacggatcaacaagatcagaagaagacttgtgaaagacagcaacaccaagaaggccggcaagacaggccccatgaaaaccctgctggttagagtgatgacacccgatctgagagagcggctggaaaacctgagaaagaagcctgaaaatatcccccagcccatcagcaatacatctagagccaacctgaataagctgctgaccgattacaccgaaatgaagaaggcgatcctgcatgtgtactgggaagagttccagaaggaccctgtgggcctgatgagccgggtggcccagcctgccagcaagaagatcgatcagaacaagctgaaacctgagatggacgagaagggcaacctgaccaccgccggctttgcctgctctcagtgtggccagcccctgttcgtgtacaagctggagcaggtgtctgagaagggcaaggcttacaccaactacttcggacggtgcaatgtggccgagcacgaaaagctgatcctgctggcccagctgaagcccgagaaggatagcgacgaagccgtgacatatagcctgggaaagtttgggcagagggccctggatttctacagcattcatgtgaccaaggagtccacccaccccgtgaagcccctggcccagatcgccggaaacagatacgcctccggacctgtgggaaaggccctgagcgacgcatgtatgggcacaatcgcctccttcctgtctaagtaccaggacatcatcatcgaacaccagaaggtggtgaagggcaaccagaagagactggagagcctgcgggagctggccggcaaggaaaacctggaataccctagcgtgaccctgccacctcagcctcacaccaaggagggcgttgatgcctacaacgaagtgatcgcccgggtgcgaatgtgggtgaacctgaacctgtggcagaagctgaagctaagcagagatgatgccaagcctctgctgagactgaagggattcccttcctttcctctggtcgagagacaggccaacgaagtggactggtgggacatggtgtgtaacgtgaagaagctgatcaacgagaaaaaggaggatggcaaggtgttttggcagaatctggctggctacaagagacaggaagccctgagaccatacctgagcagcgaggaagatcggaagaagggaaagaaattcgctcggtaccagctgggcgacctgctgctgcacctggaaaagaagcacggcgaggactggggaaaggtgtacgacgaggcctgggagcggattgacaagaaagtggaaggcctgagcaagcacatcaagctggaagaggaacggagaagcgaggacgcccagagcaaggccgccctgaccgactggctgcgggctaaggccagcttcgtgatcgagggcctgaaggaggccgacaaggacgagttctgcagatgcgagctgaagctgcagaagtggtacggggacctgcggggaaagcccttcgccatcgaagccgagaacagcatcctggacatcagcggcttcagcaagcagtacaactgtgccttcatctggcagaaggacggcgtgaagaagctgaacctgtacctgatcatcaactacttcaagggcggcaagctgcggttcaagaagatcaaacctgaagccttcgaagccaacagattctacaccgtgatcaacaaaaagagcggcgagatcgtgcccatggaggtgaacttcaacttcgacgaccccaacctgatcatcctgcctctggcctttggcaagagacagggcagagaattcatctggaacgacctgctgtccctggaaaccggcagcctgaagctggccaacggaagagtgatcgagaagacactgtacaacagaagaacccggcaggatgagcctgccctgttcgtggccctgaccttcgagcggcgggaggtcctggactcctccaatatcaaaccaatgaacctgatcggcgtggcaagaggcgaaaacatccccgccgtgatcgccctgaccgaccccgagggctgcccactgagccggtttaaggatagcctgggaaacccaacccacatcctgagaatcggcgagagctataaggagaagcagcggaccatccaggccaagaaggaggtggagcagcggagagccggcggctacagccggaagtacgccagcaaagccaagaatctggcagacgatatggtgagaaacaccgctagagatctgctgtactacgccgtgacccaggatgccatgctgatcttcgccaacctgagccggggcttcggccggcagggcaagcggaccttcatggccgagagacagtacacacggatggaggactggctgaccgccaagctggcctacgagggcctgagcaagacctacctgtccaagacactggcccagtacacctccaagacatgcagcaactgtgggtttaccatcaccagcgccgactacgacagggtgctggagaagctgaagaagacagcaacaggctggatgaccacaattaacggcaaggagctgaaggtggagggccagattacctactacaacagatacaagagacagaacgtagtcaaggacctgtccgtcgagctggatagactgagcgaagaatctgtgaacaacgacatctcctcctggacaaagggcagaagcggagaagctctgagcctcctgaagaaaagattctcccatagacccgtgcaggagaagttcgtgtgcctgaactgcggcttcgagacacacgcagccgagcaagccgccctgaacatcgccagatcctggctgttcctgcggagccaggagtacaagaaataccagacaaacaagacaaccggcaacaccgataagagagccttcgtcgagacctggcagtccttttaccggaagaagcttaaggaggtgtggaaacctgccgtgcggtctggcggatctggcggaggctccaccagccccaagaaaaagagaaaagtctaagctgccttctgcggggcttgccttctggccatgcccttcttctctcccttgcacctgtacctcttggtctttgaataaagcctgagtaggaaggctagcaaaaaaaaaaaaaaaaaaaaaaaaaaaaaaaaaaaaaaaaaaaaaaaaaaaaaaaaaaaaaaaaaaaaaaaaaaaaaaaa

SEQ ID NO: 12644 - RNA, 5785 nt, synthetic construct
  source 1..5785: mol_type = other RNA
aggaaataagagagaaaagaagagtaagaagaaatataagagccaccatggcccctaagaagaagcgtaaagtgagccggatggaacgcctcgtctacgaggtgcggcagaagtgcagaaacatcgaggacatctgcatctcctgcggatctctgaacgtgaccctggagcacccactgttcatcggcggcatgtgccagaactgtaaaaactgttttctggagtgtgcctatcaatacgacgatgacggctaccagagctactgcaccatctgttgcggcggaagagaggtgctgatgtgtggaaataacaactgctgccggtgcttctgcgtggaatgcgtggacctgctggtgggccccggcgccgcccaggccgctattaaggaagatccttggaactgctacatgtgcggccacaagggcacatacggcctgctgagacggagagaggactggcctagcagactgcagatgttcttcgccaataaccacgaccaggagttcgacccccctaaggtgtaccctcccgtccccgccgagaagagaaagcccatccgggtcctgagcctgttcgatggcatcgccaccggtctgctggtgctgaaggacctgggcatccaggtggataggtacattgcctccgaggtgtgcgaggactccatcaccgtgggaatggtgcgtcatcagggcaagatcatgtacgtgggcgacgtgcggagcgtgacacagaagcatatccaggagtggggccctttcgacctggtgatcggcggcagcccttgcaatgacctgagcatcgtgaacccagcccggaagggcctgtacgagggaaccggcagactgttcttcgagttttacagactgctgcacgacgcccggcctaaggaaggcgacgaccggcccttcttttggctgttcgagaatgtggtggccatgggagtcagcgacaagcgggatattagccggttcctggagagcaaccccgtgatgatcgatgccaaggaagtgagcgccgcccaccgggccagatacttctggggcaatctgcctggcatgaacagacccctggccagcaccgtgaacgacaagctggagctgcaggagtgcctggagcacggccggatcgccaagttcagcaaggtgagaaccatcaccacccgaagcaacagcatcaaacaaggcaaggaccagcactttcctgtgttcatgaacgagaaggaggacatcctgtggtgtaccgagatggagagagtgttcgggttcccagtccactacacagatgtcagcaacatgtctagactggccagacagagactgctgggaagaagctggtccgtccctgtgatcagacacctgttcgcccctctgaaggagtacttcgcctgcgtgagcagcggcaacagcaacgccaacagccggggccccagcttctctagcggcctggtgccactgtccctgagagggagccacatgggccccatggagatctacaaaaccgtgagcgcctggaagcggcagcctgtgcgcgtgctgagcctgtttcggaatatcgataaagtcctgaaaagcctgggattcctggagagcggctctggctccggcggtggcaccctgaagtacgtggaggatgtgacaaacgtggtcagacgggatgtggagaagtggggccccttcgatctggtgtacggcagcacccaacccctgggcagctcttgtgaccggtgccctggctggtacatgtttcagttccaccggatcctgcagtacgccctgccgagacaggagtcccagcggccattcttttggattttcatggacaacttgctgctgaccgaggatgaccaggaaactaccactcggttcctgcagaccgaagccgtgaccctgcaggacgtgagaggccgggactaccagaacgccatgcgggtgtggtccaacatccctggactgaaaagcaagcacgcacctctgacccctaaagaagaggagtacctgcaggcccaggtgcggagcagaagcaagctggacgcccctaaggtggatctgctggtgaagaattgcctcctgcccctgagagagtacttcaagtatttcagccagaatagtctgcccctgggaggcagcggcggcggctgcaacagctggatcagccccagcgacgtggccatcaacttcagcaaggaggagtgggagtgcctgcaccccagccagaaggacctgtacagggacgtgatgctggagaactacagcaacctggtgagcgtgggcctgagcgagagcaagcccgagctggtgacctgcctggaggagaacaaggagccctggatggtgaacatcgacgaggccgagggcctgggccagggcgtgttctgctacggcggcccaagcagcggcgcccctcctcccagcggcggcagcccagccggctccccaacctctaccgaggagggcacctctgagtccgccacccccgagagcggccctggcacctccaccgagcccagcgagggcagcgcacccggcagccctgccggcagccccacctccacagaggagggaaccagcaccgagcccagcgaaggcagcgccccaggcaccagcaccgagcctagtgagcaggagattaaacggatcaacaagatcagaagaagacttgtgaaagacagcaacaccaagaaggccggcaagacaggccccatgaaaaccctgctggttagagtgatgacacccgatctgagagagcggctggaaaacctgagaaagaagcctgaaaatatcccccagcccatcagcaatacatctagagccaacctgaataagctgctgaccgattacaccgaaatgaagaaggcgatcctgcatgtgtactgggaagagttccagaaggaccctgtgggcctgatgagccgggtggcccagcctgccagcaagaagatcgatcagaacaagctgaaacctgagatggacgagaagggcaacctgaccaccgccggctttgcctgctctcagtgtggccagcccctgttcgtgtacaagctggagcaggtgtctgagaagggcaaggcttacaccaactacttcggacggtgcaatgtggccgagcacgaaaagctgatcctgctggcccagctgaagcccgagaaggatagcgacgaagccgtgacatatagcctgggaaagtttgggcagagggccctggatttctacagcattcatgtgaccaaggagtccacccaccccgtgaagcccctggcccagatcgccggaaacagatacgcctccggacctgtgggaaaggccctgagcgacgcatgtatgggcacaatcgcctccttcctgtctaagtaccaggacatcatcatcgaacaccagaaggtggtgaagggcaaccagaagagactggagagcctgcgggagctggccggcaaggaaaacctggaataccctagcgtgaccctgccacctcagcctcacaccaaggagggcgttgatgcctacaacgaagtgatcgcccgggtgcgaatgtgggtgaacctgaacctgtggcagaagctgaagctaagcagagatgatgccaagcctctgctgagactgaagggattcccttcctttcctctggtcgagagacaggccaacgaagtggactggtgggacatggtgtgtaacgtgaagaagctgatcaacgagaaaaaggaggatggcaaggtgttttggcagaatctggctggctacaagagacaggaagccctgagaccatacctgagcagcgaggaagatcggaagaagggaaagaaattcgctcggtaccagctgggcgacctgctgctgcacctggaaaagaagcacggcgaggactggggaaaggtgtacgacgaggcctgggagcggattgacaagaaagtggaaggcctgagcaagcacatcaagctggaagaggaacggagaagcgaggacgcccagagcaaggccgccctgaccgactggctgcgggctaaggccagcttcgtgatcgagggcctgaaggaggccgacaaggacgagttctgcagatgcgagctgaagctgcagaagtggtacggggacctgcggggaaagcccttcgccatcgaagccgagaacagcatcctggacatcagcggcttcagcaagcagtacaactgtgccttcatctggcagaaggacggcgtgaagaagctgaacctgtacctgatcatcaactacttcaagggcggcaagctgcggttcaagaagatcaaacctgaagccttcgaagccaacagattctacaccgtgatcaacaaaaagagcggcgagatcgtgcccatggaggtgaacttcaacttcgacgaccccaacctgatcatcctgcctctggcctttggcaagagacagggcagagaattcatctggaacgacctgctgtccctggaaaccggcagcctgaagctggccaacggaagagtgatcgagaagacactgtacaacagaagaacccggcaggatgagcctgccctgttcgtggccctgaccttcgagcggcgggaggtcctggactcctccaatatcaaaccaatgaacctgatcggcgtggcaagaggcgaaaacatccccgccgtgatcgccctgaccgaccccgagggctgcccactgagccggtttaaggatagcctgggaaacccaacccacatcctgagaatcggcgagagctataaggagaagcagcggaccatccaggccaagaaggaggtggagcagcggagagccggcggctacagccggaagtacgccagcaaagccaagaatctggcagacgatatggtgagaaacaccgctagagatctgctgtactacgccgtgacccaggatgccatgctgatcttcgccaacctgagccggggcttcggccggcagggcaagcggaccttcatggccgagagacagtacacacggatggaggactggctgaccgccaagctggcctacgagggcctgagcaagacctacctgtccaagacactggcccagtacacctccaagacatgcagcaactgtgggtttaccatcaccagcgccgactacgacagggtgctggagaagctgaagaagacagcaacaggctggatgaccacaattaacggcaaggagctgaaggtggagggccagattacctactacaacagatacaagagacagaacgtagtcaaggacctgtccgtcgagctggatagactgagcgaagaatctgtgaacaacgacatctcctcctggacaaagggcagaagcggagaagctctgagcctcctgaagaaaagattctcccatagacccgtgcaggagaagttcgtgtgcctgaactgcggcttcgagacacacgcagccgagcaagccgccctgaacatcgccagatcctggctgttcctgcggagccaggagtacaagaaataccagacaaacaagacaaccggcaacaccgataagagagccttcgtcgagacctggcagtccttttaccggaagaagcttaaggaggtgtggaaacctgccgtgcggtctggcggatctggcggaggctccaccagccccaagaaaaagagaaaagtctaagctgccttctgcggggcttgccttctggccatgcccttcttctctcccttgcacctgtacctcttggtctttgaataaagcctgagtaggaaggctagcaaaaaaaaaaaaaaaaaaaaaaaaaaaaaaaaaaaaaaaaaaaaaaaaaaaaaaaaaaaaaaaaaaaaaaaaaaaaaaaa

SEQ ID NO: 12645 - RNA, 5785 nt, synthetic construct
  source 1..5785: mol_type = other RNA
aggaaataagagagaaaagaagagtaagaagaaatataagagccaccatggcccctaagaagaagcgtaaagtgagccggatggaacgcctcgtctacgaggtgcggcagaagtgcagaaacatcgaggacatctgcatctcctgcggatctctgaacgtgaccctggagcacccactgttcatcggcggcatgtgccagaactgtaaaaactgttttctggagtgtgcctatcaatacgacgatgacggctaccagagctactgcaccatctgttgcggcggaagagaggtgctgatgtgtggaaataacaactgctgccggtgcttctgcgtggaatgcgtggacctgctggtgggccccggcgccgcccaggccgctattaaggaagatccttggaactgctacatgtgcggccacaagggcacatacggcctgctgagacggagagaggactggcctagcagactgcagatgttcttcgccaataaccacgaccaggagttcgacccccctaaggtgtaccctcccgtccccgccgagaagagaaagcccatccgggtcctgagcctgttcgatggcatcgccaccggtctgctggtgctgaaggacctgggcatccaggtggataggtacattgcctccgaggtgtgcgaggactccatcaccgtgggaatggtgcgtcatcagggcaagatcatgtacgtgggcgacgtgcggagcgtgacacagaagcatatccaggagtggggccctttcgacctggtgatcggcggcagcccttgcaatgacctgagcatcgtgaacccagcccggaagggcctgtacgagggaaccggcagactgttcttcgagttttacagactgctgcacgacgcccggcctaaggaaggcgacgaccggcccttcttttggctgttcgagaatgtggtggccatgggagtcagcgacaagcgggatattagccggttcctggagagcaaccccgtgatgatcgatgccaaggaagtgagcgccgcccaccgggccagatacttctggggcaatctgcctggcatgaacagacccctggccagcaccgtgaacgacaagctggagctgcaggagtgcctggagcacggccggatcgccaagttcagcaaggtgagaaccatcaccacccgaagcaacagcatcaaacaaggcaaggaccagcactttcctgtgttcatgaacgagaaggaggacatcctgtggtgtaccgagatggagagagtgttcgggttcccagtccactacacagatgtcagcaacatgtctagactggccagacagagactgctgggaagaagctggtccgtccctgtgatcagacacctgttcgcccctctgaaggagtacttcgcctgcgtgagcagcggcaacagcaacgccaacagccggggccccagcttctctagcggcctggtgccactgtccctgagagggagccacatgggccccatggagatctacaaaaccgtgagcgcctggaagcggcagcctgtgcgcgtgctgagcctgtttcggaatatcgataaagtcctgaaaagcctgggattcctggagagcggctctggctccggcggtggcaccctgaagtacgtggaggatgtgacaaacgtggtcagacgggatgtggagaagtggggccccttcgatctggtgtacggcagcacccaacccctgggcagctcttgtgaccggtgccctggctggtacatgtttcagttccaccggatcctgcagtacgccctgccgagacaggagtcccagcggccattcttttggattttcatggacaacttgctgctgaccgaggatgaccaggaaactaccactcggttcctgcagaccgaagccgtgaccctgcaggacgtgagaggccgggactaccagaacgccatgcgggtgtggtccaacatccctggactgaaaagcaagcacgcacctctgacccctaaagaagaggagtacctgcaggcccaggtgcggagcagaagcaagctggacgcccctaaggtggatctgctggtgaagaattgcctcctgcccctgagagagtacttcaagtatttcagccagaatagtctgcccctgggaggcagcggcggcggcgcccacgagagcctggccttcagggacgtggccatcgacctgagccaggaggagtgggagtgcctggacaccgcccagagggacctgtacagggaggtgatgctggagaactacagcaacctgatcagcctgggctgcatcatccccaagcccgacgtgatcgtgctgctggagcaggagaaggacccctggctggagaccagggaggagaccaggaggaggagcagcgacttcaccaagaagggcggcccaagcagcggcgcccctcctcccagcggcggcagcccagccggctccccaacctctaccgaggagggcacctctgagtccgccacccccgagagcggccctggcacctccaccgagcccagcgagggcagcgcacccggcagccctgccggcagccccacctccacagaggagggaaccagcaccgagcccagcgaaggcagcgccccaggcaccagcaccgagcctagtgagcaggagattaaacggatcaacaagatcagaagaagacttgtgaaagacagcaacaccaagaaggccggcaagacaggccccatgaaaaccctgctggttagagtgatgacacccgatctgagagagcggctggaaaacctgagaaagaagcctgaaaatatcccccagcccatcagcaatacatctagagccaacctgaataagctgctgaccgattacaccgaaatgaagaaggcgatcctgcatgtgtactgggaagagttccagaaggaccctgtgggcctgatgagccgggtggcccagcctgccagcaagaagatcgatcagaacaagctgaaacctgagatggacgagaagggcaacctgaccaccgccggctttgcctgctctcagtgtggccagcccctgttcgtgtacaagctggagcaggtgtctgagaagggcaaggcttacaccaactacttcggacggtgcaatgtggccgagcacgaaaagctgatcctgctggcccagctgaagcccgagaaggatagcgacgaagccgtgacatatagcctgggaaagtttgggcagagggccctggatttctacagcattcatgtgaccaaggagtccacccaccccgtgaagcccctggcccagatcgccggaaacagatacgcctccggacctgtgggaaaggccctgagcgacgcatgtatgggcacaatcgcctccttcctgtctaagtaccaggacatcatcatcgaacaccagaaggtggtgaagggcaaccagaagagactggagagcctgcgggagctggccggcaaggaaaacctggaataccctagcgtgaccctgccacctcagcctcacaccaaggagggcgttgatgcctacaacgaagtgatcgcccgggtgcgaatgtgggtgaacctgaacctgtggcagaagctgaagctaagcagagatgatgccaagcctctgctgagactgaagggattcccttcctttcctctggtcgagagacaggccaacgaagtggactggtgggacatggtgtgtaacgtgaagaagctgatcaacgagaaaaaggaggatggcaaggtgttttggcagaatctggctggctacaagagacaggaagccctgagaccatacctgagcagcgaggaagatcggaagaagggaaagaaattcgctcggtaccagctgggcgacctgctgctgcacctggaaaagaagcacggcgaggactggggaaaggtgtacgacgaggcctgggagcggattgacaagaaagtggaaggcctgagcaagcacatcaagctggaagaggaacggagaagcgaggacgcccagagcaaggccgccctgaccgactggctgcgggctaaggccagcttcgtgatcgagggcctgaaggaggccgacaaggacgagttctgcagatgcgagctgaagctgcagaagtggtacggggacctgcggggaaagcccttcgccatcgaagccgagaacagcatcctggacatcagcggcttcagcaagcagtacaactgtgccttcatctggcagaaggacggcgtgaagaagctgaacctgtacctgatcatcaactacttcaagggcggcaagctgcggttcaagaagatcaaacctgaagccttcgaagccaacagattctacaccgtgatcaacaaaaagagcggcgagatcgtgcccatggaggtgaacttcaacttcgacgaccccaacctgatcatcctgcctctggcctttggcaagagacagggcagagaattcatctggaacgacctgctgtccctggaaaccggcagcctgaagctggccaacggaagagtgatcgagaagacactgtacaacagaagaacccggcaggatgagcctgccctgttcgtggccctgaccttcgagcggcgggaggtcctggactcctccaatatcaaaccaatgaacctgatcggcgtggcaagaggcgaaaacatccccgccgtgatcgccctgaccgaccccgagggctgcccactgagccggtttaaggatagcctgggaaacccaacccacatcctgagaatcggcgagagctataaggagaagcagcggaccatccaggccaagaaggaggtggagcagcggagagccggcggctacagccggaagtacgccagcaaagccaagaatctggcagacgatatggtgagaaacaccgctagagatctgctgtactacgccgtgacccaggatgccatgctgatcttcgccaacctgagccggggcttcggccggcagggcaagcggaccttcatggccgagagacagtacacacggatggaggactggctgaccgccaagctggcctacgagggcctgagcaagacctacctgtccaagacactggcccagtacacctccaagacatgcagcaactgtgggtttaccatcaccagcgccgactacgacagggtgctggagaagctgaagaagacagcaacaggctggatgaccacaattaacggcaaggagctgaaggtggagggccagattacctactacaacagatacaagagacagaacgtagtcaaggacctgtccgtcgagctggatagactgagcgaagaatctgtgaacaacgacatctcctcctggacaaagggcagaagcggagaagctctgagcctcctgaagaaaagattctcccatagacccgtgcaggagaagttcgtgtgcctgaactgcggcttcgagacacacgcagccgagcaagccgccctgaacatcgccagatcctggctgttcctgcggagccaggagtacaagaaataccagacaaacaagacaaccggcaacaccgataagagagccttcgtcgagacctggcagtccttttaccggaagaagcttaaggaggtgtggaaacctgccgtgcggtctggcggatctggcggaggctccaccagccccaagaaaaagagaaaagtctaagctgccttctgcggggcttgccttctggccatgcccttcttctctcccttgcacctgtacctcttggtctttgaataaagcctgagtaggaaggctagcaaaaaaaaaaaaaaaaaaaaaaaaaaaaaaaaaaaaaaaaaaaaaaaaaaaaaaaaaaaaaaaaaaaaaaaaaaaaaaaa

SEQ ID NO: 12646 - RNA, 5785 nt, synthetic construct
  source 1..5785: mol_type = other RNA
aggaaataagagagaaaagaagagtaagaagaaatataagagccaccatggcccctaagaagaagcgtaaagtgagccggatggaacgcctcgtctacgaggtgcggcagaagtgcagaaacatcgaggacatctgcatctcctgcggatctctgaacgtgaccctggagcacccactgttcatcggcggcatgtgccagaactgtaaaaactgttttctggagtgtgcctatcaatacgacgatgacggctaccagagctactgcaccatctgttgcggcggaagagaggtgctgatgtgtggaaataacaactgctgccggtgcttctgcgtggaatgcgtggacctgctggtgggccccggcgccgcccaggccgctattaaggaagatccttggaactgctacatgtgcggccacaagggcacatacggcctgctgagacggagagaggactggcctagcagactgcagatgttcttcgccaataaccacgaccaggagttcgacccccctaaggtgtaccctcccgtccccgccgagaagagaaagcccatccgggtcctgagcctgttcgatggcatcgccaccggtctgctggtgctgaaggacctgggcatccaggtggataggtacattgcctccgaggtgtgcgaggactccatcaccgtgggaatggtgcgtcatcagggcaagatcatgtacgtgggcgacgtgcggagcgtgacacagaagcatatccaggagtggggccctttcgacctggtgatcggcggcagcccttgcaatgacctgagcatcgtgaacccagcccggaagggcctgtacgagggaaccggcagactgttcttcgagttttacagactgctgcacgacgcccggcctaaggaaggcgacgaccggcccttcttttggctgttcgagaatgtggtggccatgggagtcagcgacaagcgggatattagccggttcctggagagcaaccccgtgatgatcgatgccaaggaagtgagcgccgcccaccgggccagatacttctggggcaatctgcctggcatgaacagacccctggccagcaccgtgaacgacaagctggagctgcaggagtgcctggagcacggccggatcgccaagttcagcaaggtgagaaccatcaccacccgaagcaacagcatcaaacaaggcaaggaccagcactttcctgtgttcatgaacgagaaggaggacatcctgtggtgtaccgagatggagagagtgttcgggttcccagtccactacacagatgtcagcaacatgtctagactggccagacagagactgctgggaagaagctggtccgtccctgtgatcagacacctgttcgcccctctgaaggagtacttcgcctgcgtgagcagcggcaacagcaacgccaacagccggggccccagcttctctagcggcctggtgccactgtccctgagagggagccacatgggccccatggagatctacaaaaccgtgagcgcctggaagcggcagcctgtgcgcgtgctgagcctgtttcggaatatcgataaagtcctgaaaagcctgggattcctggagagcggctctggctccggcggtggcaccctgaagtacgtggaggatgtgacaaacgtggtcagacgggatgtggagaagtggggccccttcgatctggtgtacggcagcacccaacccctgggcagctcttgtgaccggtgccctggctggtacatgtttcagttccaccggatcctgcagtacgccctgccgagacaggagtcccagcggccattcttttggattttcatggacaacttgctgctgaccgaggatgaccaggaaactaccactcggttcctgcagaccgaagccgtgaccctgcaggacgtgagaggccgggactaccagaacgccatgcgggtgtggtccaacatccctggactgaaaagcaagcacgcacctctgacccctaaagaagaggagtacctgcaggcccaggtgcggagcagaagcaagctggacgcccctaaggtggatctgctggtgaagaattgcctcctgcccctgagagagtacttcaagtatttcagccagaatagtctgcccctgggaggcagcggcggcggcaggcccggcgccgtgagcttcgccgacgtggccgtgtacttcagccccgaggagtggggctgcctgaggcccgcccagagggccctgtacagggaggtgatgagggagacctacggccacctgggcgccctgggcttccccggccccaagcccgccctgatcagctggatggagcaggagagcgaggcctggagccccgacgcccaggaccccgaggagggcgagagcctgggcggcgccctgggcggcccaagcagcggcgcccctcctcccagcggcggcagcccagccggctccccaacctctaccgaggagggcacctctgagtccgccacccccgagagcggccctggcacctccaccgagcccagcgagggcagcgcacccggcagccctgccggcagccccacctccacagaggagggaaccagcaccgagcccagcgaaggcagcgccccaggcaccagcaccgagcctagtgagcaggagattaaacggatcaacaagatcagaagaagacttgtgaaagacagcaacaccaagaaggccggcaagacaggccccatgaaaaccctgctggttagagtgatgacacccgatctgagagagcggctggaaaacctgagaaagaagcctgaaaatatcccccagcccatcagcaatacatctagagccaacctgaataagctgctgaccgattacaccgaaatgaagaaggcgatcctgcatgtgtactgggaagagttccagaaggaccctgtgggcctgatgagccgggtggcccagcctgccagcaagaagatcgatcagaacaagctgaaacctgagatggacgagaagggcaacctgaccaccgccggctttgcctgctctcagtgtggccagcccctgttcgtgtacaagctggagcaggtgtctgagaagggcaaggcttacaccaactacttcggacggtgcaatgtggccgagcacgaaaagctgatcctgctggcccagctgaagcccgagaaggatagcgacgaagccgtgacatatagcctgggaaagtttgggcagagggccctggatttctacagcattcatgtgaccaaggagtccacccaccccgtgaagcccctggcccagatcgccggaaacagatacgcctccggacctgtgggaaaggccctgagcgacgcatgtatgggcacaatcgcctccttcctgtctaagtaccaggacatcatcatcgaacaccagaaggtggtgaagggcaaccagaagagactggagagcctgcgggagctggccggcaaggaaaacctggaataccctagcgtgaccctgccacctcagcctcacaccaaggagggcgttgatgcctacaacgaagtgatcgcccgggtgcgaatgtgggtgaacctgaacctgtggcagaagctgaagctaagcagagatgatgccaagcctctgctgagactgaagggattcccttcctttcctctggtcgagagacaggccaacgaagtggactggtgggacatggtgtgtaacgtgaagaagctgatcaacgagaaaaaggaggatggcaaggtgttttggcagaatctggctggctacaagagacaggaagccctgagaccatacctgagcagcgaggaagatcggaagaagggaaagaaattcgctcggtaccagctgggcgacctgctgctgcacctggaaaagaagcacggcgaggactggggaaaggtgtacgacgaggcctgggagcggattgacaagaaagtggaaggcctgagcaagcacatcaagctggaagaggaacggagaagcgaggacgcccagagcaaggccgccctgaccgactggctgcgggctaaggccagcttcgtgatcgagggcctgaaggaggccgacaaggacgagttctgcagatgcgagctgaagctgcagaagtggtacggggacctgcggggaaagcccttcgccatcgaagccgagaacagcatcctggacatcagcggcttcagcaagcagtacaactgtgccttcatctggcagaaggacggcgtgaagaagctgaacctgtacctgatcatcaactacttcaagggcggcaagctgcggttcaagaagatcaaacctgaagccttcgaagccaacagattctacaccgtgatcaacaaaaagagcggcgagatcgtgcccatggaggtgaacttcaacttcgacgaccccaacctgatcatcctgcctctggcctttggcaagagacagggcagagaattcatctggaacgacctgctgtccctggaaaccggcagcctgaagctggccaacggaagagtgatcgagaagacactgtacaacagaagaacccggcaggatgagcctgccctgttcgtggccctgaccttcgagcggcgggaggtcctggactcctccaatatcaaaccaatgaacctgatcggcgtggcaagaggcgaaaacatccccgccgtgatcgccctgaccgaccccgagggctgcccactgagccggtttaaggatagcctgggaaacccaacccacatcctgagaatcggcgagagctataaggagaagcagcggaccatccaggccaagaaggaggtggagcagcggagagccggcggctacagccggaagtacgccagcaaagccaagaatctggcagacgatatggtgagaaacaccgctagagatctgctgtactacgccgtgacccaggatgccatgctgatcttcgccaacctgagccggggcttcggccggcagggcaagcggaccttcatggccgagagacagtacacacggatggaggactggctgaccgccaagctggcctacgagggcctgagcaagacctacctgtccaagacactggcccagtacacctccaagacatgcagcaactgtgggtttaccatcaccagcgccgactacgacagggtgctggagaagctgaagaagacagcaacaggctggatgaccacaattaacggcaaggagctgaaggtggagggccagattacctactacaacagatacaagagacagaacgtagtcaaggacctgtccgtcgagctggatagactgagcgaagaatctgtgaacaacgacatctcctcctggacaaagggcagaagcggagaagctctgagcctcctgaagaaaagattctcccatagacccgtgcaggagaagttcgtgtgcctgaactgcggcttcgagacacacgcagccgagcaagccgccctgaacatcgccagatcctggctgttcctgcggagccaggagtacaagaaataccagacaaacaagacaaccggcaacaccgataagagagccttcgtcgagacctggcagtccttttaccggaagaagcttaaggaggtgtggaaacctgccgtgcggtctggcggatctggcggaggctccaccagccccaagaaaaagagaaaagtctaagctgccttctgcggggcttgccttctggccatgcccttcttctctcccttgcacctgtacctcttggtctttgaataaagcctgagtaggaaggctagcaaaaaaaaaaaaaaaaaaaaaaaaaaaaaaaaaaaaaaaaaaaaaaaaaaaaaaaaaaaaaaaaaaaaaaaaaaaaaaaa

SEQ ID NO: 12647 - RNA, 5785 nt, synthetic construct
  source 1..5785: mol_type = other RNA
aggaaataagagagaaaagaagagtaagaagaaatataagagccaccatggcccctaagaagaagcgtaaagtgagccggatggaacgcctcgtctacgaggtgcggcagaagtgcagaaacatcgaggacatctgcatctcctgcggatctctgaacgtgaccctggagcacccactgttcatcggcggcatgtgccagaactgtaaaaactgttttctggagtgtgcctatcaatacgacgatgacggctaccagagctactgcaccatctgttgcggcggaagagaggtgctgatgtgtggaaataacaactgctgccggtgcttctgcgtggaatgcgtggacctgctggtgggccccggcgccgcccaggccgctattaaggaagatccttggaactgctacatgtgcggccacaagggcacatacggcctgctgagacggagagaggactggcctagcagactgcagatgttcttcgccaataaccacgaccaggagttcgacccccctaaggtgtaccctcccgtccccgccgagaagagaaagcccatccgggtcctgagcctgttcgatggcatcgccaccggtctgctggtgctgaaggacctgggcatccaggtggataggtacattgcctccgaggtgtgcgaggactccatcaccgtgggaatggtgcgtcatcagggcaagatcatgtacgtgggcgacgtgcggagcgtgacacagaagcatatccaggagtggggccctttcgacctggtgatcggcggcagcccttgcaatgacctgagcatcgtgaacccagcccggaagggcctgtacgagggaaccggcagactgttcttcgagttttacagactgctgcacgacgcccggcctaaggaaggcgacgaccggcccttcttttggctgttcgagaatgtggtggccatgggagtcagcgacaagcgggatattagccggttcctggagagcaaccccgtgatgatcgatgccaaggaagtgagcgccgcccaccgggccagatacttctggggcaatctgcctggcatgaacagacccctggccagcaccgtgaacgacaagctggagctgcaggagtgcctggagcacggccggatcgccaagttcagcaaggtgagaaccatcaccacccgaagcaacagcatcaaacaaggcaaggaccagcactttcctgtgttcatgaacgagaaggaggacatcctgtggtgtaccgagatggagagagtgttcgggttcccagtccactacacagatgtcagcaacatgtctagactggccagacagagactgctgggaagaagctggtccgtccctgtgatcagacacctgttcgcccctctgaaggagtacttcgcctgcgtgagcagcggcaacagcaacgccaacagccggggccccagcttctctagcggcctggtgccactgtccctgagagggagccacatgggccccatggagatctacaaaaccgtgagcgcctggaagcggcagcctgtgcgcgtgctgagcctgtttcggaatatcgataaagtcctgaaaagcctgggattcctggagagcggctctggctccggcggtggcaccctgaagtacgtggaggatgtgacaaacgtggtcagacgggatgtggagaagtggggccccttcgatctggtgtacggcagcacccaacccctgggcagctcttgtgaccggtgccctggctggtacatgtttcagttccaccggatcctgcagtacgccctgccgagacaggagtcccagcggccattcttttggattttcatggacaacttgctgctgaccgaggatgaccaggaaactaccactcggttcctgcagaccgaagccgtgaccctgcaggacgtgagaggccgggactaccagaacgccatgcgggtgtggtccaacatccctggactgaaaagcaagcacgcacctctgacccctaaagaagaggagtacctgcaggcccaggtgcggagcagaagcaagctggacgcccctaaggtggatctgctggtgaagaattgcctcctgcccctgagagagtacttcaagtatttcagccagaatagtctgcccctgggaggcagcggcggcggcttccagggcagcgtgaccttccaggacgtggccgtggtgttcacccccgaggagtggggccacctggagcccagccagaaggagctgtacagggaggtgatgctggagaacttcaggaacctggtgtgcctgggcctggtggtgtacaagcccagcgtgatctaccagctggagaggggcggcgccccctggaagcccggcggcggcggcaggaggagcggcagcagcgactgggagaccctgggcggcccaagcagcggcgcccctcctcccagcggcggcagcccagccggctccccaacctctaccgaggagggcacctctgagtccgccacccccgagagcggccctggcacctccaccgagcccagcgagggcagcgcacccggcagccctgccggcagccccacctccacagaggagggaaccagcaccgagcccagcgaaggcagcgccccaggcaccagcaccgagcctagtgagcaggagattaaacggatcaacaagatcagaagaagacttgtgaaagacagcaacaccaagaaggccggcaagacaggccccatgaaaaccctgctggttagagtgatgacacccgatctgagagagcggctggaaaacctgagaaagaagcctgaaaatatcccccagcccatcagcaatacatctagagccaacctgaataagctgctgaccgattacaccgaaatgaagaaggcgatcctgcatgtgtactgggaagagttccagaaggaccctgtgggcctgatgagccgggtggcccagcctgccagcaagaagatcgatcagaacaagctgaaacctgagatggacgagaagggcaacctgaccaccgccggctttgcctgctctcagtgtggccagcccctgttcgtgtacaagctggagcaggtgtctgagaagggcaaggcttacaccaactacttcggacggtgcaatgtggccgagcacgaaaagctgatcctgctggcccagctgaagcccgagaaggatagcgacgaagccgtgacatatagcctgggaaagtttgggcagagggccctggatttctacagcattcatgtgaccaaggagtccacccaccccgtgaagcccctggcccagatcgccggaaacagatacgcctccggacctgtgggaaaggccctgagcgacgcatgtatgggcacaatcgcctccttcctgtctaagtaccaggacatcatcatcgaacaccagaaggtggtgaagggcaaccagaagagactggagagcctgcgggagctggccggcaaggaaaacctggaataccctagcgtgaccctgccacctcagcctcacaccaaggagggcgttgatgcctacaacgaagtgatcgcccgggtgcgaatgtgggtgaacctgaacctgtggcagaagctgaagctaagcagagatgatgccaagcctctgctgagactgaagggattcccttcctttcctctggtcgagagacaggccaacgaagtggactggtgggacatggtgtgtaacgtgaagaagctgatcaacgagaaaaaggaggatggcaaggtgttttggcagaatctggctggctacaagagacaggaagccctgagaccatacctgagcagcgaggaagatcggaagaagggaaagaaattcgctcggtaccagctgggcgacctgctgctgcacctggaaaagaagcacggcgaggactggggaaaggtgtacgacgaggcctgggagcggattgacaagaaagtggaaggcctgagcaagcacatcaagctggaagaggaacggagaagcgaggacgcccagagcaaggccgccctgaccgactggctgcgggctaaggccagcttcgtgatcgagggcctgaaggaggccgacaaggacgagttctgcagatgcgagctgaagctgcagaagtggtacggggacctgcggggaaagcccttcgccatcgaagccgagaacagcatcctggacatcagcggcttcagcaagcagtacaactgtgccttcatctggcagaaggacggcgtgaagaagctgaacctgtacctgatcatcaactacttcaagggcggcaagctgcggttcaagaagatcaaacctgaagccttcgaagccaacagattctacaccgtgatcaacaaaaagagcggcgagatcgtgcccatggaggtgaacttcaacttcgacgaccccaacctgatcatcctgcctctggcctttggcaagagacagggcagagaattcatctggaacgacctgctgtccctggaaaccggcagcctgaagctggccaacggaagagtgatcgagaagacactgtacaacagaagaacccggcaggatgagcctgccctgttcgtggccctgaccttcgagcggcgggaggtcctggactcctccaatatcaaaccaatgaacctgatcggcgtggcaagaggcgaaaacatccccgccgtgatcgccctgaccgaccccgagggctgcccactgagccggtttaaggatagcctgggaaacccaacccacatcctgagaatcggcgagagctataaggagaagcagcggaccatccaggccaagaaggaggtggagcagcggagagccggcggctacagccggaagtacgccagcaaagccaagaatctggcagacgatatggtgagaaacaccgctagagatctgctgtactacgccgtgacccaggatgccatgctgatcttcgccaacctgagccggggcttcggccggcagggcaagcggaccttcatggccgagagacagtacacacggatggaggactggctgaccgccaagctggcctacgagggcctgagcaagacctacctgtccaagacactggcccagtacacctccaagacatgcagcaactgtgggtttaccatcaccagcgccgactacgacagggtgctggagaagctgaagaagacagcaacaggctggatgaccacaattaacggcaaggagctgaaggtggagggccagattacctactacaacagatacaagagacagaacgtagtcaaggacctgtccgtcgagctggatagactgagcgaagaatctgtgaacaacgacatctcctcctggacaaagggcagaagcggagaagctctgagcctcctgaagaaaagattctcccatagacccgtgcaggagaagttcgtgtgcctgaactgcggcttcgagacacacgcagccgagcaagccgccctgaacatcgccagatcctggctgttcctgcggagccaggagtacaagaaataccagacaaacaagacaaccggcaacaccgataagagagccttcgtcgagacctggcagtccttttaccggaagaagcttaaggaggtgtggaaacctgccgtgcggtctggcggatctggcggaggctccaccagccccaagaaaaagagaaaagtctaagctgccttctgcggggcttgccttctggccatgcccttcttctctcccttgcacctgtacctcttggtctttgaataaagcctgagtaggaaggctagcaaaaaaaaaaaaaaaaaaaaaaaaaaaaaaaaaaaaaaaaaaaaaaaaaaaaaaaaaaaaaaaaaaaaaaaaaaaaaaaa

SEQ ID NO: 12648 - RNA, 5785 nt, synthetic construct
  source 1..5785: mol_type = other RNA
aggaaataagagagaaaagaagagtaagaagaaatataagagccaccatggcccctaagaagaagcgtaaagtgagccggatggaacgcctcgtctacgaggtgcggcagaagtgcagaaacatcgaggacatctgcatctcctgcggatctctgaacgtgaccctggagcacccactgttcatcggcggcatgtgccagaactgtaaaaactgttttctggagtgtgcctatcaatacgacgatgacggctaccagagctactgcaccatctgttgcggcggaagagaggtgctgatgtgtggaaataacaactgctgccggtgcttctgcgtggaatgcgtggacctgctggtgggccccggcgccgcccaggccgctattaaggaagatccttggaactgctacatgtgcggccacaagggcacatacggcctgctgagacggagagaggactggcctagcagactgcagatgttcttcgccaataaccacgaccaggagttcgacccccctaaggtgtaccctcccgtccccgccgagaagagaaagcccatccgggtcctgagcctgttcgatggcatcgccaccggtctgctggtgctgaaggacctgggcatccaggtggataggtacattgcctccgaggtgtgcgaggactccatcaccgtgggaatggtgcgtcatcagggcaagatcatgtacgtgggcgacgtgcggagcgtgacacagaagcatatccaggagtggggccctttcgacctggtgatcggcggcagcccttgcaatgacctgagcatcgtgaacccagcccggaagggcctgtacgagggaaccggcagactgttcttcgagttttacagactgctgcacgacgcccggcctaaggaaggcgacgaccggcccttcttttggctgttcgagaatgtggtggccatgggagtcagcgacaagcgggatattagccggttcctggagagcaaccccgtgatgatcgatgccaaggaagtgagcgccgcccaccgggccagatacttctggggcaatctgcctggcatgaacagacccctggccagcaccgtgaacgacaagctggagctgcaggagtgcctggagcacggccggatcgccaagttcagcaaggtgagaaccatcaccacccgaagcaacagcatcaaacaaggcaaggaccagcactttcctgtgttcatgaacgagaaggaggacatcctgtggtgtaccgagatggagagagtgttcgggttcccagtccactacacagatgtcagcaacatgtctagactggccagacagagactgctgggaagaagctggtccgtccctgtgatcagacacctgttcgcccctctgaaggagtacttcgcctgcgtgagcagcggcaacagcaacgccaacagccggggccccagcttctctagcggcctggtgccactgtccctgagagggagccacatgggccccatggagatctacaaaaccgtgagcgcctggaagcggcagcctgtgcgcgtgctgagcctgtttcggaatatcgataaagtcctgaaaagcctgggattcctggagagcggctctggctccggcggtggcaccctgaagtacgtggaggatgtgacaaacgtggtcagacgggatgtggagaagtggggccccttcgatctggtgtacggcagcacccaacccctgggcagctcttgtgaccggtgccctggctggtacatgtttcagttccaccggatcctgcagtacgccctgccgagacaggagtcccagcggccattcttttggattttcatggacaacttgctgctgaccgaggatgaccaggaaactaccactcggttcctgcagaccgaagccgtgaccctgcaggacgtgagaggccgggactaccagaacgccatgcgggtgtggtccaacatccctggactgaaaagcaagcacgcacctctgacccctaaagaagaggagtacctgcaggcccaggtgcggagcagaagcaagctggacgcccctaaggtggatctgctggtgaagaattgcctcctgcccctgagagagtacttcaagtatttcagccagaatagtctgcccctgggaggcagcggcggcggcagcctgggcagcgacctgttcagggacgtggccgtggtgttcagccaggaggagtgggagcagctggcccccgcccagagggacctgtacagggacgtgatgctggagatctacagcaacctggtgagcctgggcttcgccatcagcaagcccgacgtgatcagcttcctggagcagggcagggagccctggatggtggagaaggtggtgaccggcggccagtgccccgtgctggagagcaggggcggcccaagcagcggcgcccctcctcccagcggcggcagcccagccggctccccaacctctaccgaggagggcacctctgagtccgccacccccgagagcggccctggcacctccaccgagcccagcgagggcagcgcacccggcagccctgccggcagccccacctccacagaggagggaaccagcaccgagcccagcgaaggcagcgccccaggcaccagcaccgagcctagtgagcaggagattaaacggatcaacaagatcagaagaagacttgtgaaagacagcaacaccaagaaggccggcaagacaggccccatgaaaaccctgctggttagagtgatgacacccgatctgagagagcggctggaaaacctgagaaagaagcctgaaaatatcccccagcccatcagcaatacatctagagccaacctgaataagctgctgaccgattacaccgaaatgaagaaggcgatcctgcatgtgtactgggaagagttccagaaggaccctgtgggcctgatgagccgggtggcccagcctgccagcaagaagatcgatcagaacaagctgaaacctgagatggacgagaagggcaacctgaccaccgccggctttgcctgctctcagtgtggccagcccctgttcgtgtacaagctggagcaggtgtctgagaagggcaaggcttacaccaactacttcggacggtgcaatgtggccgagcacgaaaagctgatcctgctggcccagctgaagcccgagaaggatagcgacgaagccgtgacatatagcctgggaaagtttgggcagagggccctggatttctacagcattcatgtgaccaaggagtccacccaccccgtgaagcccctggcccagatcgccggaaacagatacgcctccggacctgtgggaaaggccctgagcgacgcatgtatgggcacaatcgcctccttcctgtctaagtaccaggacatcatcatcgaacaccagaaggtggtgaagggcaaccagaagagactggagagcctgcgggagctggccggcaaggaaaacctggaataccctagcgtgaccctgccacctcagcctcacaccaaggagggcgttgatgcctacaacgaagtgatcgcccgggtgcgaatgtgggtgaacctgaacctgtggcagaagctgaagctaagcagagatgatgccaagcctctgctgagactgaagggattcccttcctttcctctggtcgagagacaggccaacgaagtggactggtgggacatggtgtgtaacgtgaagaagctgatcaacgagaaaaaggaggatggcaaggtgttttggcagaatctggctggctacaagagacaggaagccctgagaccatacctgagcagcgaggaagatcggaagaagggaaagaaattcgctcggtaccagctgggcgacctgctgctgcacctggaaaagaagcacggcgaggactggggaaaggtgtacgacgaggcctgggagcggattgacaagaaagtggaaggcctgagcaagcacatcaagctggaagaggaacggagaagcgaggacgcccagagcaaggccgccctgaccgactggctgcgggctaaggccagcttcgtgatcgagggcctgaaggaggccgacaaggacgagttctgcagatgcgagctgaagctgcagaagtggtacggggacctgcggggaaagcccttcgccatcgaagccgagaacagcatcctggacatcagcggcttcagcaagcagtacaactgtgccttcatctggcagaaggacggcgtgaagaagctgaacctgtacctgatcatcaactacttcaagggcggcaagctgcggttcaagaagatcaaacctgaagccttcgaagccaacagattctacaccgtgatcaacaaaaagagcggcgagatcgtgcccatggaggtgaacttcaacttcgacgaccccaacctgatcatcctgcctctggcctttggcaagagacagggcagagaattcatctggaacgacctgctgtccctggaaaccggcagcctgaagctggccaacggaagagtgatcgagaagacactgtacaacagaagaacccggcaggatgagcctgccctgttcgtggccctgaccttcgagcggcgggaggtcctggactcctccaatatcaaaccaatgaacctgatcggcgtggcaagaggcgaaaacatccccgccgtgatcgccctgaccgaccccgagggctgcccactgagccggtttaaggatagcctgggaaacccaacccacatcctgagaatcggcgagagctataaggagaagcagcggaccatccaggccaagaaggaggtggagcagcggagagccggcggctacagccggaagtacgccagcaaagccaagaatctggcagacgatatggtgagaaacaccgctagagatctgctgtactacgccgtgacccaggatgccatgctgatcttcgccaacctgagccggggcttcggccggcagggcaagcggaccttcatggccgagagacagtacacacggatggaggactggctgaccgccaagctggcctacgagggcctgagcaagacctacctgtccaagacactggcccagtacacctccaagacatgcagcaactgtgggtttaccatcaccagcgccgactacgacagggtgctggagaagctgaagaagacagcaacaggctggatgaccacaattaacggcaaggagctgaaggtggagggccagattacctactacaacagatacaagagacagaacgtagtcaaggacctgtccgtcgagctggatagactgagcgaagaatctgtgaacaacgacatctcctcctggacaaagggcagaagcggagaagctctgagcctcctgaagaaaagattctcccatagacccgtgcaggagaagttcgtgtgcctgaactgcggcttcgagacacacgcagccgagcaagccgccctgaacatcgccagatcctggctgttcctgcggagccaggagtacaagaaataccagacaaacaagacaaccggcaacaccgataagagagccttcgtcgagacctggcagtccttttaccggaagaagcttaaggaggtgtggaaacctgccgtgcggtctggcggatctggcggaggctccaccagccccaagaaaaagagaaaagtctaagctgccttctgcggggcttgccttctggccatgcccttcttctctcccttgcacctgtacctcttggtctttgaataaagcctgagtaggaaggctagcaaaaaaaaaaaaaaaaaaaaaaaaaaaaaaaaaaaaaaaaaaaaaaaaaaaaaaaaaaaaaaaaaaaaaaaaaaaaaaaa

SEQ ID NO: 12649 - RNA, 5785 nt, synthetic construct
  source 1..5785: mol_type = other RNA
aggaaataagagagaaaagaagagtaagaagaaatataagagccaccatggcccctaagaagaagcgtaaagtgagccggatggaacgcctcgtctacgaggtgcggcagaagtgcagaaacatcgaggacatctgcatctcctgcggatctctgaacgtgaccctggagcacccactgttcatcggcggcatgtgccagaactgtaaaaactgttttctggagtgtgcctatcaatacgacgatgacggctaccagagctactgcaccatctgttgcggcggaagagaggtgctgatgtgtggaaataacaactgctgccggtgcttctgcgtggaatgcgtggacctgctggtgggccccggcgccgcccaggccgctattaaggaagatccttggaactgctacatgtgcggccacaagggcacatacggcctgctgagacggagagaggactggcctagcagactgcagatgttcttcgccaataaccacgaccaggagttcgacccccctaaggtgtaccctcccgtccccgccgagaagagaaagcccatccgggtcctgagcctgttcgatggcatcgccaccggtctgctggtgctgaaggacctgggcatccaggtggataggtacattgcctccgaggtgtgcgaggactccatcaccgtgggaatggtgcgtcatcagggcaagatcatgtacgtgggcgacgtgcggagcgtgacacagaagcatatccaggagtggggccctttcgacctggtgatcggcggcagcccttgcaatgacctgagcatcgtgaacccagcccggaagggcctgtacgagggaaccggcagactgttcttcgagttttacagactgctgcacgacgcccggcctaaggaaggcgacgaccggcccttcttttggctgttcgagaatgtggtggccatgggagtcagcgacaagcgggatattagccggttcctggagagcaaccccgtgatgatcgatgccaaggaagtgagcgccgcccaccgggccagatacttctggggcaatctgcctggcatgaacagacccctggccagcaccgtgaacgacaagctggagctgcaggagtgcctggagcacggccggatcgccaagttcagcaaggtgagaaccatcaccacccgaagcaacagcatcaaacaaggcaaggaccagcactttcctgtgttcatgaacgagaaggaggacatcctgtggtgtaccgagatggagagagtgttcgggttcccagtccactacacagatgtcagcaacatgtctagactggccagacagagactgctgggaagaagctggtccgtccctgtgatcagacacctgttcgcccctctgaaggagtacttcgcctgcgtgagcagcggcaacagcaacgccaacagccggggccccagcttctctagcggcctggtgccactgtccctgagagggagccacatgggccccatggagatctacaaaaccgtgagcgcctggaagcggcagcctgtgcgcgtgctgagcctgtttcggaatatcgataaagtcctgaaaagcctgggattcctggagagcggctctggctccggcggtggcaccctgaagtacgtggaggatgtgacaaacgtggtcagacgggatgtggagaagtggggccccttcgatctggtgtacggcagcacccaacccctgggcagctcttgtgaccggtgccctggctggtacatgtttcagttccaccggatcctgcagtacgccctgccgagacaggagtcccagcggccattcttttggattttcatggacaacttgctgctgaccgaggatgaccaggaaactaccactcggttcctgcagaccgaagccgtgaccctgcaggacgtgagaggccgggactaccagaacgccatgcgggtgtggtccaacatccctggactgaaaagcaagcacgcacctctgacccctaaagaagaggagtacctgcaggcccaggtgcggagcagaagcaagctggacgcccctaaggtggatctgctggtgaagaattgcctcctgcccctgagagagtacttcaagtatttcagccagaatagtctgcccctgggaggcagcggcggcggcctgctgcccgccgccggctgcggcaaggacagcggcacccccgccaccgaggccgtgaccttcgaggacgtggccgtgaacttcagcagggaggagtgggccctgctggaccccccccagaggaagctgtacagggacgtgatgtgggagaccctgaggcacctggccgccgtgggcatgaacagcgacgacaggcagatcgaggacgtgtacaagatctgcaggaagaacctgagcggcgccggcggcccaagcagcggcgcccctcctcccagcggcggcagcccagccggctccccaacctctaccgaggagggcacctctgagtccgccacccccgagagcggccctggcacctccaccgagcccagcgagggcagcgcacccggcagccctgccggcagccccacctccacagaggagggaaccagcaccgagcccagcgaaggcagcgccccaggcaccagcaccgagcctagtgagcaggagattaaacggatcaacaagatcagaagaagacttgtgaaagacagcaacaccaagaaggccggcaagacaggccccatgaaaaccctgctggttagagtgatgacacccgatctgagagagcggctggaaaacctgagaaagaagcctgaaaatatcccccagcccatcagcaatacatctagagccaacctgaataagctgctgaccgattacaccgaaatgaagaaggcgatcctgcatgtgtactgggaagagttccagaaggaccctgtgggcctgatgagccgggtggcccagcctgccagcaagaagatcgatcagaacaagctgaaacctgagatggacgagaagggcaacctgaccaccgccggctttgcctgctctcagtgtggccagcccctgttcgtgtacaagctggagcaggtgtctgagaagggcaaggcttacaccaactacttcggacggtgcaatgtggccgagcacgaaaagctgatcctgctggcccagctgaagcccgagaaggatagcgacgaagccgtgacatatagcctgggaaagtttgggcagagggccctggatttctacagcattcatgtgaccaaggagtccacccaccccgtgaagcccctggcccagatcgccggaaacagatacgcctccggacctgtgggaaaggccctgagcgacgcatgtatgggcacaatcgcctccttcctgtctaagtaccaggacatcatcatcgaacaccagaaggtggtgaagggcaaccagaagagactggagagcctgcgggagctggccggcaaggaaaacctggaataccctagcgtgaccctgccacctcagcctcacaccaaggagggcgttgatgcctacaacgaagtgatcgcccgggtgcgaatgtgggtgaacctgaacctgtggcagaagctgaagctaagcagagatgatgccaagcctctgctgagactgaagggattcccttcctttcctctggtcgagagacaggccaacgaagtggactggtgggacatggtgtgtaacgtgaagaagctgatcaacgagaaaaaggaggatggcaaggtgttttggcagaatctggctggctacaagagacaggaagccctgagaccatacctgagcagcgaggaagatcggaagaagggaaagaaattcgctcggtaccagctgggcgacctgctgctgcacctggaaaagaagcacggcgaggactggggaaaggtgtacgacgaggcctgggagcggattgacaagaaagtggaaggcctgagcaagcacatcaagctggaagaggaacggagaagcgaggacgcccagagcaaggccgccctgaccgactggctgcgggctaaggccagcttcgtgatcgagggcctgaaggaggccgacaaggacgagttctgcagatgcgagctgaagctgcagaagtggtacggggacctgcggggaaagcccttcgccatcgaagccgagaacagcatcctggacatcagcggcttcagcaagcagtacaactgtgccttcatctggcagaaggacggcgtgaagaagctgaacctgtacctgatcatcaactacttcaagggcggcaagctgcggttcaagaagatcaaacctgaagccttcgaagccaacagattctacaccgtgatcaacaaaaagagcggcgagatcgtgcccatggaggtgaacttcaacttcgacgaccccaacctgatcatcctgcctctggcctttggcaagagacagggcagagaattcatctggaacgacctgctgtccctggaaaccggcagcctgaagctggccaacggaagagtgatcgagaagacactgtacaacagaagaacccggcaggatgagcctgccctgttcgtggccctgaccttcgagcggcgggaggtcctggactcctccaatatcaaaccaatgaacctgatcggcgtggcaagaggcgaaaacatccccgccgtgatcgccctgaccgaccccgagggctgcccactgagccggtttaaggatagcctgggaaacccaacccacatcctgagaatcggcgagagctataaggagaagcagcggaccatccaggccaagaaggaggtggagcagcggagagccggcggctacagccggaagtacgccagcaaagccaagaatctggcagacgatatggtgagaaacaccgctagagatctgctgtactacgccgtgacccaggatgccatgctgatcttcgccaacctgagccggggcttcggccggcagggcaagcggaccttcatggccgagagacagtacacacggatggaggactggctgaccgccaagctggcctacgagggcctgagcaagacctacctgtccaagacactggcccagtacacctccaagacatgcagcaactgtgggtttaccatcaccagcgccgactacgacagggtgctggagaagctgaagaagacagcaacaggctggatgaccacaattaacggcaaggagctgaaggtggagggccagattacctactacaacagatacaagagacagaacgtagtcaaggacctgtccgtcgagctggatagactgagcgaagaatctgtgaacaacgacatctcctcctggacaaagggcagaagcggagaagctctgagcctcctgaagaaaagattctcccatagacccgtgcaggagaagttcgtgtgcctgaactgcggcttcgagacacacgcagccgagcaagccgccctgaacatcgccagatcctggctgttcctgcggagccaggagtacaagaaataccagacaaacaagacaaccggcaacaccgataagagagccttcgtcgagacctggcagtccttttaccggaagaagcttaaggaggtgtggaaacctgccgtgcggtctggcggatctggcggaggctccaccagccccaagaaaaagagaaaagtctaagctgccttctgcggggcttgccttctggccatgcccttcttctctcccttgcacctgtacctcttggtctttgaataaagcctgagtaggaaggctagcaaaaaaaaaaaaaaaaaaaaaaaaaaaaaaaaaaaaaaaaaaaaaaaaaaaaaaaaaaaaaaaaaaaaaaaaaaaaaaaa

SEQ ID NO: 12650 - RNA, 5785 nt, synthetic construct
  source 1..5785: mol_type = other RNA
aggaaataagagagaaaagaagagtaagaagaaatataagagccaccatggcccctaagaagaagcgtaaagtgagccggatggaacgcctcgtctacgaggtgcggcagaagtgcagaaacatcgaggacatctgcatctcctgcggatctctgaacgtgaccctggagcacccactgttcatcggcggcatgtgccagaactgtaaaaactgttttctggagtgtgcctatcaatacgacgatgacggctaccagagctactgcaccatctgttgcggcggaagagaggtgctgatgtgtggaaataacaactgctgccggtgcttctgcgtggaatgcgtggacctgctggtgggccccggcgccgcccaggccgctattaaggaagatccttggaactgctacatgtgcggccacaagggcacatacggcctgctgagacggagagaggactggcctagcagactgcagatgttcttcgccaataaccacgaccaggagttcgacccccctaaggtgtaccctcccgtccccgccgagaagagaaagcccatccgggtcctgagcctgttcgatggcatcgccaccggtctgctggtgctgaaggacctgggcatccaggtggataggtacattgcctccgaggtgtgcgaggactccatcaccgtgggaatggtgcgtcatcagggcaagatcatgtacgtgggcgacgtgcggagcgtgacacagaagcatatccaggagtggggccctttcgacctggtgatcggcggcagcccttgcaatgacctgagcatcgtgaacccagcccggaagggcctgtacgagggaaccggcagactgttcttcgagttttacagactgctgcacgacgcccggcctaaggaaggcgacgaccggcccttcttttggctgttcgagaatgtggtggccatgggagtcagcgacaagcgggatattagccggttcctggagagcaaccccgtgatgatcgatgccaaggaagtgagcgccgcccaccgggccagatacttctggggcaatctgcctggcatgaacagacccctggccagcaccgtgaacgacaagctggagctgcaggagtgcctggagcacggccggatcgccaagttcagcaaggtgagaaccatcaccacccgaagcaacagcatcaaacaaggcaaggaccagcactttcctgtgttcatgaacgagaaggaggacatcctgtggtgtaccgagatggagagagtgttcgggttcccagtccactacacagatgtcagcaacatgtctagactggccagacagagactgctgggaagaagctggtccgtccctgtgatcagacacctgttcgcccctctgaaggagtacttcgcctgcgtgagcagcggcaacagcaacgccaacagccggggccccagcttctctagcggcctggtgccactgtccctgagagggagccacatgggccccatggagatctacaaaaccgtgagcgcctggaagcggcagcctgtgcgcgtgctgagcctgtttcggaatatcgataaagtcctgaaaagcctgggattcctggagagcggctctggctccggcggtggcaccctgaagtacgtggaggatgtgacaaacgtggtcagacgggatgtggagaagtggggccccttcgatctggtgtacggcagcacccaacccctgggcagctcttgtgaccggtgccctggctggtacatgtttcagttccaccggatcctgcagtacgccctgccgagacaggagtcccagcggccattcttttggattttcatggacaacttgctgctgaccgaggatgaccaggaaactaccactcggttcctgcagaccgaagccgtgaccctgcaggacgtgagaggccgggactaccagaacgccatgcgggtgtggtccaacatccctggactgaaaagcaagcacgcacctctgacccctaaagaagaggagtacctgcaggcccaggtgcggagcagaagcaagctggacgcccctaaggtggatctgctggtgaagaattgcctcctgcccctgagagagtacttcaagtatttcagccagaatagtctgcccctgggaggcagcggcggcggcgaggagctgcccgtggtgttcgaggacgtggccgtgtacttcaccagggaggagtggggcatgctggacaagaggcagaaggagctgtacagggacgtgatgaggatgaactacgagctgctggccagcctgggccccgccgccgccaagcccgacctgatcagcaagctggagaggagggccgccccctggatcaagcaccccaacggccccaagtggggcaagggcaggccccccggcaacggcggcccaagcagcggcgcccctcctcccagcggcggcagcccagccggctccccaacctctaccgaggagggcacctctgagtccgccacccccgagagcggccctggcacctccaccgagcccagcgagggcagcgcacccggcagccctgccggcagccccacctccacagaggagggaaccagcaccgagcccagcgaaggcagcgccccaggcaccagcaccgagcctagtgagcaggagattaaacggatcaacaagatcagaagaagacttgtgaaagacagcaacaccaagaaggccggcaagacaggccccatgaaaaccctgctggttagagtgatgacacccgatctgagagagcggctggaaaacctgagaaagaagcctgaaaatatcccccagcccatcagcaatacatctagagccaacctgaataagctgctgaccgattacaccgaaatgaagaaggcgatcctgcatgtgtactgggaagagttccagaaggaccctgtgggcctgatgagccgggtggcccagcctgccagcaagaagatcgatcagaacaagctgaaacctgagatggacgagaagggcaacctgaccaccgccggctttgcctgctctcagtgtggccagcccctgttcgtgtacaagctggagcaggtgtctgagaagggcaaggcttacaccaactacttcggacggtgcaatgtggccgagcacgaaaagctgatcctgctggcccagctgaagcccgagaaggatagcgacgaagccgtgacatatagcctgggaaagtttgggcagagggccctggatttctacagcattcatgtgaccaaggagtccacccaccccgtgaagcccctggcccagatcgccggaaacagatacgcctccggacctgtgggaaaggccctgagcgacgcatgtatgggcacaatcgcctccttcctgtctaagtaccaggacatcatcatcgaacaccagaaggtggtgaagggcaaccagaagagactggagagcctgcgggagctggccggcaaggaaaacctggaataccctagcgtgaccctgccacctcagcctcacaccaaggagggcgttgatgcctacaacgaagtgatcgcccgggtgcgaatgtgggtgaacctgaacctgtggcagaagctgaagctaagcagagatgatgccaagcctctgctgagactgaagggattcccttcctttcctctggtcgagagacaggccaacgaagtggactggtgggacatggtgtgtaacgtgaagaagctgatcaacgagaaaaaggaggatggcaaggtgttttggcagaatctggctggctacaagagacaggaagccctgagaccatacctgagcagcgaggaagatcggaagaagggaaagaaattcgctcggtaccagctgggcgacctgctgctgcacctggaaaagaagcacggcgaggactggggaaaggtgtacgacgaggcctgggagcggattgacaagaaagtggaaggcctgagcaagcacatcaagctggaagaggaacggagaagcgaggacgcccagagcaaggccgccctgaccgactggctgcgggctaaggccagcttcgtgatcgagggcctgaaggaggccgacaaggacgagttctgcagatgcgagctgaagctgcagaagtggtacggggacctgcggggaaagcccttcgccatcgaagccgagaacagcatcctggacatcagcggcttcagcaagcagtacaactgtgccttcatctggcagaaggacggcgtgaagaagctgaacctgtacctgatcatcaactacttcaagggcggcaagctgcggttcaagaagatcaaacctgaagccttcgaagccaacagattctacaccgtgatcaacaaaaagagcggcgagatcgtgcccatggaggtgaacttcaacttcgacgaccccaacctgatcatcctgcctctggcctttggcaagagacagggcagagaattcatctggaacgacctgctgtccctggaaaccggcagcctgaagctggccaacggaagagtgatcgagaagacactgtacaacagaagaacccggcaggatgagcctgccctgttcgtggccctgaccttcgagcggcgggaggtcctggactcctccaatatcaaaccaatgaacctgatcggcgtggcaagaggcgaaaacatccccgccgtgatcgccctgaccgaccccgagggctgcccactgagccggtttaaggatagcctgggaaacccaacccacatcctgagaatcggcgagagctataaggagaagcagcggaccatccaggccaagaaggaggtggagcagcggagagccggcggctacagccggaagtacgccagcaaagccaagaatctggcagacgatatggtgagaaacaccgctagagatctgctgtactacgccgtgacccaggatgccatgctgatcttcgccaacctgagccggggcttcggccggcagggcaagcggaccttcatggccgagagacagtacacacggatggaggactggctgaccgccaagctggcctacgagggcctgagcaagacctacctgtccaagacactggcccagtacacctccaagacatgcagcaactgtgggtttaccatcaccagcgccgactacgacagggtgctggagaagctgaagaagacagcaacaggctggatgaccacaattaacggcaaggagctgaaggtggagggccagattacctactacaacagatacaagagacagaacgtagtcaaggacctgtccgtcgagctggatagactgagcgaagaatctgtgaacaacgacatctcctcctggacaaagggcagaagcggagaagctctgagcctcctgaagaaaagattctcccatagacccgtgcaggagaagttcgtgtgcctgaactgcggcttcgagacacacgcagccgagcaagccgccctgaacatcgccagatcctggctgttcctgcggagccaggagtacaagaaataccagacaaacaagacaaccggcaacaccgataagagagccttcgtcgagacctggcagtccttttaccggaagaagcttaaggaggtgtggaaacctgccgtgcggtctggcggatctggcggaggctccaccagccccaagaaaaagagaaaagtctaagctgccttctgcggggcttgccttctggccatgcccttcttctctcccttgcacctgtacctcttggtctttgaataaagcctgagtaggaaggctagcaaaaaaaaaaaaaaaaaaaaaaaaaaaaaaaaaaaaaaaaaaaaaaaaaaaaaaaaaaaaaaaaaaaaaaaaaaaaaaaa

SEQ ID NO: 12651 - RNA, 5785 nt, synthetic construct
  source 1..5785: mol_type = other RNA
aggaaataagagagaaaagaagagtaagaagaaatataagagccaccatggcccctaagaagaagcgtaaagtgagccggatggaacgcctcgtctacgaggtgcggcagaagtgcagaaacatcgaggacatctgcatctcctgcggatctctgaacgtgaccctggagcacccactgttcatcggcggcatgtgccagaactgtaaaaactgttttctggagtgtgcctatcaatacgacgatgacggctaccagagctactgcaccatctgttgcggcggaagagaggtgctgatgtgtggaaataacaactgctgccggtgcttctgcgtggaatgcgtggacctgctggtgggccccggcgccgcccaggccgctattaaggaagatccttggaactgctacatgtgcggccacaagggcacatacggcctgctgagacggagagaggactggcctagcagactgcagatgttcttcgccaataaccacgaccaggagttcgacccccctaaggtgtaccctcccgtccccgccgagaagagaaagcccatccgggtcctgagcctgttcgatggcatcgccaccggtctgctggtgctgaaggacctgggcatccaggtggataggtacattgcctccgaggtgtgcgaggactccatcaccgtgggaatggtgcgtcatcagggcaagatcatgtacgtgggcgacgtgcggagcgtgacacagaagcatatccaggagtggggccctttcgacctggtgatcggcggcagcccttgcaatgacctgagcatcgtgaacccagcccggaagggcctgtacgagggaaccggcagactgttcttcgagttttacagactgctgcacgacgcccggcctaaggaaggcgacgaccggcccttcttttggctgttcgagaatgtggtggccatgggagtcagcgacaagcgggatattagccggttcctggagagcaaccccgtgatgatcgatgccaaggaagtgagcgccgcccaccgggccagatacttctggggcaatctgcctggcatgaacagacccctggccagcaccgtgaacgacaagctggagctgcaggagtgcctggagcacggccggatcgccaagttcagcaaggtgagaaccatcaccacccgaagcaacagcatcaaacaaggcaaggaccagcactttcctgtgttcatgaacgagaaggaggacatcctgtggtgtaccgagatggagagagtgttcgggttcccagtccactacacagatgtcagcaacatgtctagactggccagacagagactgctgggaagaagctggtccgtccctgtgatcagacacctgttcgcccctctgaaggagtacttcgcctgcgtgagcagcggcaacagcaacgccaacagccggggccccagcttctctagcggcctggtgccactgtccctgagagggagccacatgggccccatggagatctacaaaaccgtgagcgcctggaagcggcagcctgtgcgcgtgctgagcctgtttcggaatatcgataaagtcctgaaaagcctgggattcctggagagcggctctggctccggcggtggcaccctgaagtacgtggaggatgtgacaaacgtggtcagacgggatgtggagaagtggggccccttcgatctggtgtacggcagcacccaacccctgggcagctcttgtgaccggtgccctggctggtacatgtttcagttccaccggatcctgcagtacgccctgccgagacaggagtcccagcggccattcttttggattttcatggacaacttgctgctgaccgaggatgaccaggaaactaccactcggttcctgcagaccgaagccgtgaccctgcaggacgtgagaggccgggactaccagaacgccatgcgggtgtggtccaacatccctggactgaaaagcaagcacgcacctctgacccctaaagaagaggagtacctgcaggcccaggtgcggagcagaagcaagctggacgcccctaaggtggatctgctggtgaagaattgcctcctgcccctgagagagtacttcaagtatttcagccagaatagtctgcccctgggaggcagcggcggcggcacccaggtgagcgtgaccttcgacgacgtggccgtgaccttcaccagggaggagtggaggcagctggaccccgcccagaggaccctgtaccaggaggtgatgctggagaactgcaggctgctggtgagcctgggctgccccgtgcccaggcccgagctgatcttccagctggagcagggccagaagctgtggaccgtgaaggaggacctgagcaggagcacctgccccggcaagaggtacaggggcggcccaagcagcggcgcccctcctcccagcggcggcagcccagccggctccccaacctctaccgaggagggcacctctgagtccgccacccccgagagcggccctggcacctccaccgagcccagcgagggcagcgcacccggcagccctgccggcagccccacctccacagaggagggaaccagcaccgagcccagcgaaggcagcgccccaggcaccagcaccgagcctagtgagcaggagattaaacggatcaacaagatcagaagaagacttgtgaaagacagcaacaccaagaaggccggcaagacaggccccatgaaaaccctgctggttagagtgatgacacccgatctgagagagcggctggaaaacctgagaaagaagcctgaaaatatcccccagcccatcagcaatacatctagagccaacctgaataagctgctgaccgattacaccgaaatgaagaaggcgatcctgcatgtgtactgggaagagttccagaaggaccctgtgggcctgatgagccgggtggcccagcctgccagcaagaagatcgatcagaacaagctgaaacctgagatggacgagaagggcaacctgaccaccgccggctttgcctgctctcagtgtggccagcccctgttcgtgtacaagctggagcaggtgtctgagaagggcaaggcttacaccaactacttcggacggtgcaatgtggccgagcacgaaaagctgatcctgctggcccagctgaagcccgagaaggatagcgacgaagccgtgacatatagcctgggaaagtttgggcagagggccctggatttctacagcattcatgtgaccaaggagtccacccaccccgtgaagcccctggcccagatcgccggaaacagatacgcctccggacctgtgggaaaggccctgagcgacgcatgtatgggcacaatcgcctccttcctgtctaagtaccaggacatcatcatcgaacaccagaaggtggtgaagggcaaccagaagagactggagagcctgcgggagctggccggcaaggaaaacctggaataccctagcgtgaccctgccacctcagcctcacaccaaggagggcgttgatgcctacaacgaagtgatcgcccgggtgcgaatgtgggtgaacctgaacctgtggcagaagctgaagctaagcagagatgatgccaagcctctgctgagactgaagggattcccttcctttcctctggtcgagagacaggccaacgaagtggactggtgggacatggtgtgtaacgtgaagaagctgatcaacgagaaaaaggaggatggcaaggtgttttggcagaatctggctggctacaagagacaggaagccctgagaccatacctgagcagcgaggaagatcggaagaagggaaagaaattcgctcggtaccagctgggcgacctgctgctgcacctggaaaagaagcacggcgaggactggggaaaggtgtacgacgaggcctgggagcggattgacaagaaagtggaaggcctgagcaagcacatcaagctggaagaggaacggagaagcgaggacgcccagagcaaggccgccctgaccgactggctgcgggctaaggccagcttcgtgatcgagggcctgaaggaggccgacaaggacgagttctgcagatgcgagctgaagctgcagaagtggtacggggacctgcggggaaagcccttcgccatcgaagccgagaacagcatcctggacatcagcggcttcagcaagcagtacaactgtgccttcatctggcagaaggacggcgtgaagaagctgaacctgtacctgatcatcaactacttcaagggcggcaagctgcggttcaagaagatcaaacctgaagccttcgaagccaacagattctacaccgtgatcaacaaaaagagcggcgagatcgtgcccatggaggtgaacttcaacttcgacgaccccaacctgatcatcctgcctctggcctttggcaagagacagggcagagaattcatctggaacgacctgctgtccctggaaaccggcagcctgaagctggccaacggaagagtgatcgagaagacactgtacaacagaagaacccggcaggatgagcctgccctgttcgtggccctgaccttcgagcggcgggaggtcctggactcctccaatatcaaaccaatgaacctgatcggcgtggcaagaggcgaaaacatccccgccgtgatcgccctgaccgaccccgagggctgcccactgagccggtttaaggatagcctgggaaacccaacccacatcctgagaatcggcgagagctataaggagaagcagcggaccatccaggccaagaaggaggtggagcagcggagagccggcggctacagccggaagtacgccagcaaagccaagaatctggcagacgatatggtgagaaacaccgctagagatctgctgtactacgccgtgacccaggatgccatgctgatcttcgccaacctgagccggggcttcggccggcagggcaagcggaccttcatggccgagagacagtacacacggatggaggactggctgaccgccaagctggcctacgagggcctgagcaagacctacctgtccaagacactggcccagtacacctccaagacatgcagcaactgtgggtttaccatcaccagcgccgactacgacagggtgctggagaagctgaagaagacagcaacaggctggatgaccacaattaacggcaaggagctgaaggtggagggccagattacctactacaacagatacaagagacagaacgtagtcaaggacctgtccgtcgagctggatagactgagcgaagaatctgtgaacaacgacatctcctcctggacaaagggcagaagcggagaagctctgagcctcctgaagaaaagattctcccatagacccgtgcaggagaagttcgtgtgcctgaactgcggcttcgagacacacgcagccgagcaagccgccctgaacatcgccagatcctggctgttcctgcggagccaggagtacaagaaataccagacaaacaagacaaccggcaacaccgataagagagccttcgtcgagacctggcagtccttttaccggaagaagcttaaggaggtgtggaaacctgccgtgcggtctggcggatctggcggaggctccaccagccccaagaaaaagagaaaagtctaagctgccttctgcggggcttgccttctggccatgcccttcttctctcccttgcacctgtacctcttggtctttgaataaagcctgagtaggaaggctagcaaaaaaaaaaaaaaaaaaaaaaaaaaaaaaaaaaaaaaaaaaaaaaaaaaaaaaaaaaaaaaaaaaaaaaaaaaaaaaaa

SEQ ID NO: 12652 - RNA, 5785 nt, synthetic construct
  source 1..5785: mol_type = other RNA
aggaaataagagagaaaagaagagtaagaagaaatataagagccaccatggcccctaagaagaagcgtaaagtgagccggatggaacgcctcgtctacgaggtgcggcagaagtgcagaaacatcgaggacatctgcatctcctgcggatctctgaacgtgaccctggagcacccactgttcatcggcggcatgtgccagaactgtaaaaactgttttctggagtgtgcctatcaatacgacgatgacggctaccagagctactgcaccatctgttgcggcggaagagaggtgctgatgtgtggaaataacaactgctgccggtgcttctgcgtggaatgcgtggacctgctggtgggccccggcgccgcccaggccgctattaaggaagatccttggaactgctacatgtgcggccacaagggcacatacggcctgctgagacggagagaggactggcctagcagactgcagatgttcttcgccaataaccacgaccaggagttcgacccccctaaggtgtaccctcccgtccccgccgagaagagaaagcccatccgggtcctgagcctgttcgatggcatcgccaccggtctgctggtgctgaaggacctgggcatccaggtggataggtacattgcctccgaggtgtgcgaggactccatcaccgtgggaatggtgcgtcatcagggcaagatcatgtacgtgggcgacgtgcggagcgtgacacagaagcatatccaggagtggggccctttcgacctggtgatcggcggcagcccttgcaatgacctgagcatcgtgaacccagcccggaagggcctgtacgagggaaccggcagactgttcttcgagttttacagactgctgcacgacgcccggcctaaggaaggcgacgaccggcccttcttttggctgttcgagaatgtggtggccatgggagtcagcgacaagcgggatattagccggttcctggagagcaaccccgtgatgatcgatgccaaggaagtgagcgccgcccaccgggccagatacttctggggcaatctgcctggcatgaacagacccctggccagcaccgtgaacgacaagctggagctgcaggagtgcctggagcacggccggatcgccaagttcagcaaggtgagaaccatcaccacccgaagcaacagcatcaaacaaggcaaggaccagcactttcctgtgttcatgaacgagaaggaggacatcctgtggtgtaccgagatggagagagtgttcgggttcccagtccactacacagatgtcagcaacatgtctagactggccagacagagactgctgggaagaagctggtccgtccctgtgatcagacacctgttcgcccctctgaaggagtacttcgcctgcgtgagcagcggcaacagcaacgccaacagccggggccccagcttctctagcggcctggtgccactgtccctgagagggagccacatgggccccatggagatctacaaaaccgtgagcgcctggaagcggcagcctgtgcgcgtgctgagcctgtttcggaatatcgataaagtcctgaaaagcctgggattcctggagagcggctctggctccggcggtggcaccctgaagtacgtggaggatgtgacaaacgtggtcagacgggatgtggagaagtggggccccttcgatctggtgtacggcagcacccaacccctgggcagctcttgtgaccggtgccctggctggtacatgtttcagttccaccggatcctgcagtacgccctgccgagacaggagtcccagcggccattcttttggattttcatggacaacttgctgctgaccgaggatgaccaggaaactaccactcggttcctgcagaccgaagccgtgaccctgcaggacgtgagaggccgggactaccagaacgccatgcgggtgtggtccaacatccctggactgaaaagcaagcacgcacctctgacccctaaagaagaggagtacctgcaggcccaggtgcggagcagaagcaagctggacgcccctaaggtggatctgctggtgaagaattgcctcctgcccctgagagagtacttcaagtatttcagccagaatagtctgcccctgggaggcagcggcggcggcagccagggcctggtggccttcgaggacgtggccgtgtacttcagcctggaggagtgggagaggctggacgccgaccagagggagctgtaccaggaggtgatgcaggagaactacggcatcctggtgagcctgggctaccccatccccaagcccgacctgatcttcaggctggagcagggcgaggagccctgggtgcccgacagccccaggcccgaggagggcgacatcgtgaccggcgtgtacggcggcccaagcagcggcgcccctcctcccagcggcggcagcccagccggctccccaacctctaccgaggagggcacctctgagtccgccacccccgagagcggccctggcacctccaccgagcccagcgagggcagcgcacccggcagccctgccggcagccccacctccacagaggagggaaccagcaccgagcccagcgaaggcagcgccccaggcaccagcaccgagcctagtgagcaggagattaaacggatcaacaagatcagaagaagacttgtgaaagacagcaacaccaagaaggccggcaagacaggccccatgaaaaccctgctggttagagtgatgacacccgatctgagagagcggctggaaaacctgagaaagaagcctgaaaatatcccccagcccatcagcaatacatctagagccaacctgaataagctgctgaccgattacaccgaaatgaagaaggcgatcctgcatgtgtactgggaagagttccagaaggaccctgtgggcctgatgagccgggtggcccagcctgccagcaagaagatcgatcagaacaagctgaaacctgagatggacgagaagggcaacctgaccaccgccggctttgcctgctctcagtgtggccagcccctgttcgtgtacaagctggagcaggtgtctgagaagggcaaggcttacaccaactacttcggacggtgcaatgtggccgagcacgaaaagctgatcctgctggcccagctgaagcccgagaaggatagcgacgaagccgtgacatatagcctgggaaagtttgggcagagggccctggatttctacagcattcatgtgaccaaggagtccacccaccccgtgaagcccctggcccagatcgccggaaacagatacgcctccggacctgtgggaaaggccctgagcgacgcatgtatgggcacaatcgcctccttcctgtctaagtaccaggacatcatcatcgaacaccagaaggtggtgaagggcaaccagaagagactggagagcctgcgggagctggccggcaaggaaaacctggaataccctagcgtgaccctgccacctcagcctcacaccaaggagggcgttgatgcctacaacgaagtgatcgcccgggtgcgaatgtgggtgaacctgaacctgtggcagaagctgaagctaagcagagatgatgccaagcctctgctgagactgaagggattcccttcctttcctctggtcgagagacaggccaacgaagtggactggtgggacatggtgtgtaacgtgaagaagctgatcaacgagaaaaaggaggatggcaaggtgttttggcagaatctggctggctacaagagacaggaagccctgagaccatacctgagcagcgaggaagatcggaagaagggaaagaaattcgctcggtaccagctgggcgacctgctgctgcacctggaaaagaagcacggcgaggactggggaaaggtgtacgacgaggcctgggagcggattgacaagaaagtggaaggcctgagcaagcacatcaagctggaagaggaacggagaagcgaggacgcccagagcaaggccgccctgaccgactggctgcgggctaaggccagcttcgtgatcgagggcctgaaggaggccgacaaggacgagttctgcagatgcgagctgaagctgcagaagtggtacggggacctgcggggaaagcccttcgccatcgaagccgagaacagcatcctggacatcagcggcttcagcaagcagtacaactgtgccttcatctggcagaaggacggcgtgaagaagctgaacctgtacctgatcatcaactacttcaagggcggcaagctgcggttcaagaagatcaaacctgaagccttcgaagccaacagattctacaccgtgatcaacaaaaagagcggcgagatcgtgcccatggaggtgaacttcaacttcgacgaccccaacctgatcatcctgcctctggcctttggcaagagacagggcagagaattcatctggaacgacctgctgtccctggaaaccggcagcctgaagctggccaacggaagagtgatcgagaagacactgtacaacagaagaacccggcaggatgagcctgccctgttcgtggccctgaccttcgagcggcgggaggtcctggactcctccaatatcaaaccaatgaacctgatcggcgtggcaagaggcgaaaacatccccgccgtgatcgccctgaccgaccccgagggctgcccactgagccggtttaaggatagcctgggaaacccaacccacatcctgagaatcggcgagagctataaggagaagcagcggaccatccaggccaagaaggaggtggagcagcggagagccggcggctacagccggaagtacgccagcaaagccaagaatctggcagacgatatggtgagaaacaccgctagagatctgctgtactacgccgtgacccaggatgccatgctgatcttcgccaacctgagccggggcttcggccggcagggcaagcggaccttcatggccgagagacagtacacacggatggaggactggctgaccgccaagctggcctacgagggcctgagcaagacctacctgtccaagacactggcccagtacacctccaagacatgcagcaactgtgggtttaccatcaccagcgccgactacgacagggtgctggagaagctgaagaagacagcaacaggctggatgaccacaattaacggcaaggagctgaaggtggagggccagattacctactacaacagatacaagagacagaacgtagtcaaggacctgtccgtcgagctggatagactgagcgaagaatctgtgaacaacgacatctcctcctggacaaagggcagaagcggagaagctctgagcctcctgaagaaaagattctcccatagacccgtgcaggagaagttcgtgtgcctgaactgcggcttcgagacacacgcagccgagcaagccgccctgaacatcgccagatcctggctgttcctgcggagccaggagtacaagaaataccagacaaacaagacaaccggcaacaccgataagagagccttcgtcgagacctggcagtccttttaccggaagaagcttaaggaggtgtggaaacctgccgtgcggtctggcggatctggcggaggctccaccagccccaagaaaaagagaaaagtctaagctgccttctgcggggcttgccttctggccatgcccttcttctctcccttgcacctgtacctcttggtctttgaataaagcctgagtaggaaggctagcaaaaaaaaaaaaaaaaaaaaaaaaaaaaaaaaaaaaaaaaaaaaaaaaaaaaaaaaaaaaaaaaaaaaaaaaaaaaaaaa

SEQ ID NO: 12653 - RNA, 5785 nt, synthetic construct
  source 1..5785: mol_type = other RNA
aggaaataagagagaaaagaagagtaagaagaaatataagagccaccatggcccctaagaagaagcgtaaagtgagccggatggaacgcctcgtctacgaggtgcggcagaagtgcagaaacatcgaggacatctgcatctcctgcggatctctgaacgtgaccctggagcacccactgttcatcggcggcatgtgccagaactgtaaaaactgttttctggagtgtgcctatcaatacgacgatgacggctaccagagctactgcaccatctgttgcggcggaagagaggtgctgatgtgtggaaataacaactgctgccggtgcttctgcgtggaatgcgtggacctgctggtgggccccggcgccgcccaggccgctattaaggaagatccttggaactgctacatgtgcggccacaagggcacatacggcctgctgagacggagagaggactggcctagcagactgcagatgttcttcgccaataaccacgaccaggagttcgacccccctaaggtgtaccctcccgtccccgccgagaagagaaagcccatccgggtcctgagcctgttcgatggcatcgccaccggtctgctggtgctgaaggacctgggcatccaggtggataggtacattgcctccgaggtgtgcgaggactccatcaccgtgggaatggtgcgtcatcagggcaagatcatgtacgtgggcgacgtgcggagcgtgacacagaagcatatccaggagtggggccctttcgacctggtgatcggcggcagcccttgcaatgacctgagcatcgtgaacccagcccggaagggcctgtacgagggaaccggcagactgttcttcgagttttacagactgctgcacgacgcccggcctaaggaaggcgacgaccggcccttcttttggctgttcgagaatgtggtggccatgggagtcagcgacaagcgggatattagccggttcctggagagcaaccccgtgatgatcgatgccaaggaagtgagcgccgcccaccgggccagatacttctggggcaatctgcctggcatgaacagacccctggccagcaccgtgaacgacaagctggagctgcaggagtgcctggagcacggccggatcgccaagttcagcaaggtgagaaccatcaccacccgaagcaacagcatcaaacaaggcaaggaccagcactttcctgtgttcatgaacgagaaggaggacatcctgtggtgtaccgagatggagagagtgttcgggttcccagtccactacacagatgtcagcaacatgtctagactggccagacagagactgctgggaagaagctggtccgtccctgtgatcagacacctgttcgcccctctgaaggagtacttcgcctgcgtgagcagcggcaacagcaacgccaacagccggggccccagcttctctagcggcctggtgccactgtccctgagagggagccacatgggccccatggagatctacaaaaccgtgagcgcctggaagcggcagcctgtgcgcgtgctgagcctgtttcggaatatcgataaagtcctgaaaagcctgggattcctggagagcggctctggctccggcggtggcaccctgaagtacgtggaggatgtgacaaacgtggtcagacgggatgtggagaagtggggccccttcgatctggtgtacggcagcacccaacccctgggcagctcttgtgaccggtgccctggctggtacatgtttcagttccaccggatcctgcagtacgccctgccgagacaggagtcccagcggccattcttttggattttcatggacaacttgctgctgaccgaggatgaccaggaaactaccactcggttcctgcagaccgaagccgtgaccctgcaggacgtgagaggccgggactaccagaacgccatgcgggtgtggtccaacatccctggactgaaaagcaagcacgcacctctgacccctaaagaagaggagtacctgcaggcccaggtgcggagcagaagcaagctggacgcccctaaggtggatctgctggtgaagaattgcctcctgcccctgagagagtacttcaagtatttcagccagaatagtctgcccctgggaggcagcggcggcggcttccaggagcccgtgaccttcgaggacgtggccgtgtacttcacccagaaccagtgggccagcctggacagcgcccagagggccctgtacagggaggtgatgctggagaactacgccaacgtggccagcctggtgagccccttccccaggcccgacctgatcagccagctggagaggggcgaggccccctgggaccccgacccctgggaggccgaggacctgaggggcatctgccccggcggcggcggcccaagcagcggcgcccctcctcccagcggcggcagcccagccggctccccaacctctaccgaggagggcacctctgagtccgccacccccgagagcggccctggcacctccaccgagcccagcgagggcagcgcacccggcagccctgccggcagccccacctccacagaggagggaaccagcaccgagcccagcgaaggcagcgccccaggcaccagcaccgagcctagtgagcaggagattaaacggatcaacaagatcagaagaagacttgtgaaagacagcaacaccaagaaggccggcaagacaggccccatgaaaaccctgctggttagagtgatgacacccgatctgagagagcggctggaaaacctgagaaagaagcctgaaaatatcccccagcccatcagcaatacatctagagccaacctgaataagctgctgaccgattacaccgaaatgaagaaggcgatcctgcatgtgtactgggaagagttccagaaggaccctgtgggcctgatgagccgggtggcccagcctgccagcaagaagatcgatcagaacaagctgaaacctgagatggacgagaagggcaacctgaccaccgccggctttgcctgctctcagtgtggccagcccctgttcgtgtacaagctggagcaggtgtctgagaagggcaaggcttacaccaactacttcggacggtgcaatgtggccgagcacgaaaagctgatcctgctggcccagctgaagcccgagaaggatagcgacgaagccgtgacatatagcctgggaaagtttgggcagagggccctggatttctacagcattcatgtgaccaaggagtccacccaccccgtgaagcccctggcccagatcgccggaaacagatacgcctccggacctgtgggaaaggccctgagcgacgcatgtatgggcacaatcgcctccttcctgtctaagtaccaggacatcatcatcgaacaccagaaggtggtgaagggcaaccagaagagactggagagcctgcgggagctggccggcaaggaaaacctggaataccctagcgtgaccctgccacctcagcctcacaccaaggagggcgttgatgcctacaacgaagtgatcgcccgggtgcgaatgtgggtgaacctgaacctgtggcagaagctgaagctaagcagagatgatgccaagcctctgctgagactgaagggattcccttcctttcctctggtcgagagacaggccaacgaagtggactggtgggacatggtgtgtaacgtgaagaagctgatcaacgagaaaaaggaggatggcaaggtgttttggcagaatctggctggctacaagagacaggaagccctgagaccatacctgagcagcgaggaagatcggaagaagggaaagaaattcgctcggtaccagctgggcgacctgctgctgcacctggaaaagaagcacggcgaggactggggaaaggtgtacgacgaggcctgggagcggattgacaagaaagtggaaggcctgagcaagcacatcaagctggaagaggaacggagaagcgaggacgcccagagcaaggccgccctgaccgactggctgcgggctaaggccagcttcgtgatcgagggcctgaaggaggccgacaaggacgagttctgcagatgcgagctgaagctgcagaagtggtacggggacctgcggggaaagcccttcgccatcgaagccgagaacagcatcctggacatcagcggcttcagcaagcagtacaactgtgccttcatctggcagaaggacggcgtgaagaagctgaacctgtacctgatcatcaactacttcaagggcggcaagctgcggttcaagaagatcaaacctgaagccttcgaagccaacagattctacaccgtgatcaacaaaaagagcggcgagatcgtgcccatggaggtgaacttcaacttcgacgaccccaacctgatcatcctgcctctggcctttggcaagagacagggcagagaattcatctggaacgacctgctgtccctggaaaccggcagcctgaagctggccaacggaagagtgatcgagaagacactgtacaacagaagaacccggcaggatgagcctgccctgttcgtggccctgaccttcgagcggcgggaggtcctggactcctccaatatcaaaccaatgaacctgatcggcgtggcaagaggcgaaaacatccccgccgtgatcgccctgaccgaccccgagggctgcccactgagccggtttaaggatagcctgggaaacccaacccacatcctgagaatcggcgagagctataaggagaagcagcggaccatccaggccaagaaggaggtggagcagcggagagccggcggctacagccggaagtacgccagcaaagccaagaatctggcagacgatatggtgagaaacaccgctagagatctgctgtactacgccgtgacccaggatgccatgctgatcttcgccaacctgagccggggcttcggccggcagggcaagcggaccttcatggccgagagacagtacacacggatggaggactggctgaccgccaagctggcctacgagggcctgagcaagacctacctgtccaagacactggcccagtacacctccaagacatgcagcaactgtgggtttaccatcaccagcgccgactacgacagggtgctggagaagctgaagaagacagcaacaggctggatgaccacaattaacggcaaggagctgaaggtggagggccagattacctactacaacagatacaagagacagaacgtagtcaaggacctgtccgtcgagctggatagactgagcgaagaatctgtgaacaacgacatctcctcctggacaaagggcagaagcggagaagctctgagcctcctgaagaaaagattctcccatagacccgtgcaggagaagttcgtgtgcctgaactgcggcttcgagacacacgcagccgagcaagccgccctgaacatcgccagatcctggctgttcctgcggagccaggagtacaagaaataccagacaaacaagacaaccggcaacaccgataagagagccttcgtcgagacctggcagtccttttaccggaagaagcttaaggaggtgtggaaacctgccgtgcggtctggcggatctggcggaggctccaccagccccaagaaaaagagaaaagtctaagctgccttctgcggggcttgccttctggccatgcccttcttctctcccttgcacctgtacctcttggtctttgaataaagcctgagtaggaaggctagcaaaaaaaaaaaaaaaaaaaaaaaaaaaaaaaaaaaaaaaaaaaaaaaaaaaaaaaaaaaaaaaaaaaaaaaaaaaaaaaa

SEQ ID NO: 12654 - RNA, 5785 nt, synthetic construct
  source 1..5785: mol_type = other RNA
aggaaataagagagaaaagaagagtaagaagaaatataagagccaccatggcccctaagaagaagcgtaaagtgagccggatggaacgcctcgtctacgaggtgcggcagaagtgcagaaacatcgaggacatctgcatctcctgcggatctctgaacgtgaccctggagcacccactgttcatcggcggcatgtgccagaactgtaaaaactgttttctggagtgtgcctatcaatacgacgatgacggctaccagagctactgcaccatctgttgcggcggaagagaggtgctgatgtgtggaaataacaactgctgccggtgcttctgcgtggaatgcgtggacctgctggtgggccccggcgccgcccaggccgctattaaggaagatccttggaactgctacatgtgcggccacaagggcacatacggcctgctgagacggagagaggactggcctagcagactgcagatgttcttcgccaataaccacgaccaggagttcgacccccctaaggtgtaccctcccgtccccgccgagaagagaaagcccatccgggtcctgagcctgttcgatggcatcgccaccggtctgctggtgctgaaggacctgggcatccaggtggataggtacattgcctccgaggtgtgcgaggactccatcaccgtgggaatggtgcgtcatcagggcaagatcatgtacgtgggcgacgtgcggagcgtgacacagaagcatatccaggagtggggccctttcgacctggtgatcggcggcagcccttgcaatgacctgagcatcgtgaacccagcccggaagggcctgtacgagggaaccggcagactgttcttcgagttttacagactgctgcacgacgcccggcctaaggaaggcgacgaccggcccttcttttggctgttcgagaatgtggtggccatgggagtcagcgacaagcgggatattagccggttcctggagagcaaccccgtgatgatcgatgccaaggaagtgagcgccgcccaccgggccagatacttctggggcaatctgcctggcatgaacagacccctggccagcaccgtgaacgacaagctggagctgcaggagtgcctggagcacggccggatcgccaagttcagcaaggtgagaaccatcaccacccgaagcaacagcatcaaacaaggcaaggaccagcactttcctgtgttcatgaacgagaaggaggacatcctgtggtgtaccgagatggagagagtgttcgggttcccagtccactacacagatgtcagcaacatgtctagactggccagacagagactgctgggaagaagctggtccgtccctgtgatcagacacctgttcgcccctctgaaggagtacttcgcctgcgtgagcagcggcaacagcaacgccaacagccggggccccagcttctctagcggcctggtgccactgtccctgagagggagccacatgggccccatggagatctacaaaaccgtgagcgcctggaagcggcagcctgtgcgcgtgctgagcctgtttcggaatatcgataaagtcctgaaaagcctgggattcctggagagcggctctggctccggcggtggcaccctgaagtacgtggaggatgtgacaaacgtggtcagacgggatgtggagaagtggggccccttcgatctggtgtacggcagcacccaacccctgggcagctcttgtgaccggtgccctggctggtacatgtttcagttccaccggatcctgcagtacgccctgccgagacaggagtcccagcggccattcttttggattttcatggacaacttgctgctgaccgaggatgaccaggaaactaccactcggttcctgcagaccgaagccgtgaccctgcaggacgtgagaggccgggactaccagaacgccatgcgggtgtggtccaacatccctggactgaaaagcaagcacgcacctctgacccctaaagaagaggagtacctgcaggcccaggtgcggagcagaagcaagctggacgcccctaaggtggatctgctggtgaagaattgcctcctgcccctgagagagtacttcaagtatttcagccagaatagtctgcccctgggaggcagcggcggcggcgtgaccttcgacgacgtggccgtgaacttcaccatggaggagtgggccctgctggaccccagccagaagaagctgtacagggacgtgatgtgggagaacttcaggaacgtgaccgccatcggcaggaactgggacaaccagcagatcgaggaccagtacaagaactacaggaacaacctgaggaagaccagcgccgacttccagagcctgcagaagcacgccatgaccaaccccgaggagaagggcggcccaagcagcggcgcccctcctcccagcggcggcagcccagccggctccccaacctctaccgaggagggcacctctgagtccgccacccccgagagcggccctggcacctccaccgagcccagcgagggcagcgcacccggcagccctgccggcagccccacctccacagaggagggaaccagcaccgagcccagcgaaggcagcgccccaggcaccagcaccgagcctagtgagcaggagattaaacggatcaacaagatcagaagaagacttgtgaaagacagcaacaccaagaaggccggcaagacaggccccatgaaaaccctgctggttagagtgatgacacccgatctgagagagcggctggaaaacctgagaaagaagcctgaaaatatcccccagcccatcagcaatacatctagagccaacctgaataagctgctgaccgattacaccgaaatgaagaaggcgatcctgcatgtgtactgggaagagttccagaaggaccctgtgggcctgatgagccgggtggcccagcctgccagcaagaagatcgatcagaacaagctgaaacctgagatggacgagaagggcaacctgaccaccgccggctttgcctgctctcagtgtggccagcccctgttcgtgtacaagctggagcaggtgtctgagaagggcaaggcttacaccaactacttcggacggtgcaatgtggccgagcacgaaaagctgatcctgctggcccagctgaagcccgagaaggatagcgacgaagccgtgacatatagcctgggaaagtttgggcagagggccctggatttctacagcattcatgtgaccaaggagtccacccaccccgtgaagcccctggcccagatcgccggaaacagatacgcctccggacctgtgggaaaggccctgagcgacgcatgtatgggcacaatcgcctccttcctgtctaagtaccaggacatcatcatcgaacaccagaaggtggtgaagggcaaccagaagagactggagagcctgcgggagctggccggcaaggaaaacctggaataccctagcgtgaccctgccacctcagcctcacaccaaggagggcgttgatgcctacaacgaagtgatcgcccgggtgcgaatgtgggtgaacctgaacctgtggcagaagctgaagctaagcagagatgatgccaagcctctgctgagactgaagggattcccttcctttcctctggtcgagagacaggccaacgaagtggactggtgggacatggtgtgtaacgtgaagaagctgatcaacgagaaaaaggaggatggcaaggtgttttggcagaatctggctggctacaagagacaggaagccctgagaccatacctgagcagcgaggaagatcggaagaagggaaagaaattcgctcggtaccagctgggcgacctgctgctgcacctggaaaagaagcacggcgaggactggggaaaggtgtacgacgaggcctgggagcggattgacaagaaagtggaaggcctgagcaagcacatcaagctggaagaggaacggagaagcgaggacgcccagagcaaggccgccctgaccgactggctgcgggctaaggccagcttcgtgatcgagggcctgaaggaggccgacaaggacgagttctgcagatgcgagctgaagctgcagaagtggtacggggacctgcggggaaagcccttcgccatcgaagccgagaacagcatcctggacatcagcggcttcagcaagcagtacaactgtgccttcatctggcagaaggacggcgtgaagaagctgaacctgtacctgatcatcaactacttcaagggcggcaagctgcggttcaagaagatcaaacctgaagccttcgaagccaacagattctacaccgtgatcaacaaaaagagcggcgagatcgtgcccatggaggtgaacttcaacttcgacgaccccaacctgatcatcctgcctctggcctttggcaagagacagggcagagaattcatctggaacgacctgctgtccctggaaaccggcagcctgaagctggccaacggaagagtgatcgagaagacactgtacaacagaagaacccggcaggatgagcctgccctgttcgtggccctgaccttcgagcggcgggaggtcctggactcctccaatatcaaaccaatgaacctgatcggcgtggcaagaggcgaaaacatccccgccgtgatcgccctgaccgaccccgagggctgcccactgagccggtttaaggatagcctgggaaacccaacccacatcctgagaatcggcgagagctataaggagaagcagcggaccatccaggccaagaaggaggtggagcagcggagagccggcggctacagccggaagtacgccagcaaagccaagaatctggcagacgatatggtgagaaacaccgctagagatctgctgtactacgccgtgacccaggatgccatgctgatcttcgccaacctgagccggggcttcggccggcagggcaagcggaccttcatggccgagagacagtacacacggatggaggactggctgaccgccaagctggcctacgagggcctgagcaagacctacctgtccaagacactggcccagtacacctccaagacatgcagcaactgtgggtttaccatcaccagcgccgactacgacagggtgctggagaagctgaagaagacagcaacaggctggatgaccacaattaacggcaaggagctgaaggtggagggccagattacctactacaacagatacaagagacagaacgtagtcaaggacctgtccgtcgagctggatagactgagcgaagaatctgtgaacaacgacatctcctcctggacaaagggcagaagcggagaagctctgagcctcctgaagaaaagattctcccatagacccgtgcaggagaagttcgtgtgcctgaactgcggcttcgagacacacgcagccgagcaagccgccctgaacatcgccagatcctggctgttcctgcggagccaggagtacaagaaataccagacaaacaagacaaccggcaacaccgataagagagccttcgtcgagacctggcagtccttttaccggaagaagcttaaggaggtgtggaaacctgccgtgcggtctggcggatctggcggaggctccaccagccccaagaaaaagagaaaagtctaagctgccttctgcggggcttgccttctggccatgcccttcttctctcccttgcacctgtacctcttggtctttgaataaagcctgagtaggaaggctagcaaaaaaaaaaaaaaaaaaaaaaaaaaaaaaaaaaaaaaaaaaaaaaaaaaaaaaaaaaaaaaaaaaaaaaaaaaaaaaaa

SEQ ID NO: 12655 - RNA, 5785 nt, synthetic construct
  source 1..5785: mol_type = other RNA
aggaaataagagagaaaagaagagtaagaagaaatataagagccaccatggcccctaagaagaagcgtaaagtgagccggatggaacgcctcgtctacgaggtgcggcagaagtgcagaaacatcgaggacatctgcatctcctgcggatctctgaacgtgaccctggagcacccactgttcatcggcggcatgtgccagaactgtaaaaactgttttctggagtgtgcctatcaatacgacgatgacggctaccagagctactgcaccatctgttgcggcggaagagaggtgctgatgtgtggaaataacaactgctgccggtgcttctgcgtggaatgcgtggacctgctggtgggccccggcgccgcccaggccgctattaaggaagatccttggaactgctacatgtgcggccacaagggcacatacggcctgctgagacggagagaggactggcctagcagactgcagatgttcttcgccaataaccacgaccaggagttcgacccccctaaggtgtaccctcccgtccccgccgagaagagaaagcccatccgggtcctgagcctgttcgatggcatcgccaccggtctgctggtgctgaaggacctgggcatccaggtggataggtacattgcctccgaggtgtgcgaggactccatcaccgtgggaatggtgcgtcatcagggcaagatcatgtacgtgggcgacgtgcggagcgtgacacagaagcatatccaggagtggggccctttcgacctggtgatcggcggcagcccttgcaatgacctgagcatcgtgaacccagcccggaagggcctgtacgagggaaccggcagactgttcttcgagttttacagactgctgcacgacgcccggcctaaggaaggcgacgaccggcccttcttttggctgttcgagaatgtggtggccatgggagtcagcgacaagcgggatattagccggttcctggagagcaaccccgtgatgatcgatgccaaggaagtgagcgccgcccaccgggccagatacttctggggcaatctgcctggcatgaacagacccctggccagcaccgtgaacgacaagctggagctgcaggagtgcctggagcacggccggatcgccaagttcagcaaggtgagaaccatcaccacccgaagcaacagcatcaaacaaggcaaggaccagcactttcctgtgttcatgaacgagaaggaggacatcctgtggtgtaccgagatggagagagtgttcgggttcccagtccactacacagatgtcagcaacatgtctagactggccagacagagactgctgggaagaagctggtccgtccctgtgatcagacacctgttcgcccctctgaaggagtacttcgcctgcgtgagcagcggcaacagcaacgccaacagccggggccccagcttctctagcggcctggtgccactgtccctgagagggagccacatgggccccatggagatctacaaaaccgtgagcgcctggaagcggcagcctgtgcgcgtgctgagcctgtttcggaatatcgataaagtcctgaaaagcctgggattcctggagagcggctctggctccggcggtggcaccctgaagtacgtggaggatgtgacaaacgtggtcagacgggatgtggagaagtggggccccttcgatctggtgtacggcagcacccaacccctgggcagctcttgtgaccggtgccctggctggtacatgtttcagttccaccggatcctgcagtacgccctgccgagacaggagtcccagcggccattcttttggattttcatggacaacttgctgctgaccgaggatgaccaggaaactaccactcggttcctgcagaccgaagccgtgaccctgcaggacgtgagaggccgggactaccagaacgccatgcgggtgtggtccaacatccctggactgaaaagcaagcacgcacctctgacccctaaagaagaggagtacctgcaggcccaggtgcggagcagaagcaagctggacgcccctaaggtggatctgctggtgaagaattgcctcctgcccctgagagagtacttcaagtatttcagccagaatagtctgcccctgggaggcagcggcggcggccccaaggtgcccgtgagcttcgaggacgtggccatgtacttcaccaagaccgagtggaagctgctggaccacaggcagaggaagctgtacaagcaggtgatgctggagaactaccaccacctggtgagcctgggcttcagcttcgccaagccccagctggtgatccagctggagcagggccagaagccctgggtggccgacgtgcacaggatgaggatcaccaccggcatgcaggccggcgacggcggcccaagcagcggcgcccctcctcccagcggcggcagcccagccggctccccaacctctaccgaggagggcacctctgagtccgccacccccgagagcggccctggcacctccaccgagcccagcgagggcagcgcacccggcagccctgccggcagccccacctccacagaggagggaaccagcaccgagcccagcgaaggcagcgccccaggcaccagcaccgagcctagtgagcaggagattaaacggatcaacaagatcagaagaagacttgtgaaagacagcaacaccaagaaggccggcaagacaggccccatgaaaaccctgctggttagagtgatgacacccgatctgagagagcggctggaaaacctgagaaagaagcctgaaaatatcccccagcccatcagcaatacatctagagccaacctgaataagctgctgaccgattacaccgaaatgaagaaggcgatcctgcatgtgtactgggaagagttccagaaggaccctgtgggcctgatgagccgggtggcccagcctgccagcaagaagatcgatcagaacaagctgaaacctgagatggacgagaagggcaacctgaccaccgccggctttgcctgctctcagtgtggccagcccctgttcgtgtacaagctggagcaggtgtctgagaagggcaaggcttacaccaactacttcggacggtgcaatgtggccgagcacgaaaagctgatcctgctggcccagctgaagcccgagaaggatagcgacgaagccgtgacatatagcctgggaaagtttgggcagagggccctggatttctacagcattcatgtgaccaaggagtccacccaccccgtgaagcccctggcccagatcgccggaaacagatacgcctccggacctgtgggaaaggccctgagcgacgcatgtatgggcacaatcgcctccttcctgtctaagtaccaggacatcatcatcgaacaccagaaggtggtgaagggcaaccagaagagactggagagcctgcgggagctggccggcaaggaaaacctggaataccctagcgtgaccctgccacctcagcctcacaccaaggagggcgttgatgcctacaacgaagtgatcgcccgggtgcgaatgtgggtgaacctgaacctgtggcagaagctgaagctaagcagagatgatgccaagcctctgctgagactgaagggattcccttcctttcctctggtcgagagacaggccaacgaagtggactggtgggacatggtgtgtaacgtgaagaagctgatcaacgagaaaaaggaggatggcaaggtgttttggcagaatctggctggctacaagagacaggaagccctgagaccatacctgagcagcgaggaagatcggaagaagggaaagaaattcgctcggtaccagctgggcgacctgctgctgcacctggaaaagaagcacggcgaggactggggaaaggtgtacgacgaggcctgggagcggattgacaagaaagtggaaggcctgagcaagcacatcaagctggaagaggaacggagaagcgaggacgcccagagcaaggccgccctgaccgactggctgcgggctaaggccagcttcgtgatcgagggcctgaaggaggccgacaaggacgagttctgcagatgcgagctgaagctgcagaagtggtacggggacctgcggggaaagcccttcgccatcgaagccgagaacagcatcctggacatcagcggcttcagcaagcagtacaactgtgccttcatctggcagaaggacggcgtgaagaagctgaacctgtacctgatcatcaactacttcaagggcggcaagctgcggttcaagaagatcaaacctgaagccttcgaagccaacagattctacaccgtgatcaacaaaaagagcggcgagatcgtgcccatggaggtgaacttcaacttcgacgaccccaacctgatcatcctgcctctggcctttggcaagagacagggcagagaattcatctggaacgacctgctgtccctggaaaccggcagcctgaagctggccaacggaagagtgatcgagaagacactgtacaacagaagaacccggcaggatgagcctgccctgttcgtggccctgaccttcgagcggcgggaggtcctggactcctccaatatcaaaccaatgaacctgatcggcgtggcaagaggcgaaaacatccccgccgtgatcgccctgaccgaccccgagggctgcccactgagccggtttaaggatagcctgggaaacccaacccacatcctgagaatcggcgagagctataaggagaagcagcggaccatccaggccaagaaggaggtggagcagcggagagccggcggctacagccggaagtacgccagcaaagccaagaatctggcagacgatatggtgagaaacaccgctagagatctgctgtactacgccgtgacccaggatgccatgctgatcttcgccaacctgagccggggcttcggccggcagggcaagcggaccttcatggccgagagacagtacacacggatggaggactggctgaccgccaagctggcctacgagggcctgagcaagacctacctgtccaagacactggcccagtacacctccaagacatgcagcaactgtgggtttaccatcaccagcgccgactacgacagggtgctggagaagctgaagaagacagcaacaggctggatgaccacaattaacggcaaggagctgaaggtggagggccagattacctactacaacagatacaagagacagaacgtagtcaaggacctgtccgtcgagctggatagactgagcgaagaatctgtgaacaacgacatctcctcctggacaaagggcagaagcggagaagctctgagcctcctgaagaaaagattctcccatagacccgtgcaggagaagttcgtgtgcctgaactgcggcttcgagacacacgcagccgagcaagccgccctgaacatcgccagatcctggctgttcctgcggagccaggagtacaagaaataccagacaaacaagacaaccggcaacaccgataagagagccttcgtcgagacctggcagtccttttaccggaagaagcttaaggaggtgtggaaacctgccgtgcggtctggcggatctggcggaggctccaccagccccaagaaaaagagaaaagtctaagctgccttctgcggggcttgccttctggccatgcccttcttctctcccttgcacctgtacctcttggtctttgaataaagcctgagtaggaaggctagcaaaaaaaaaaaaaaaaaaaaaaaaaaaaaaaaaaaaaaaaaaaaaaaaaaaaaaaaaaaaaaaaaaaaaaaaaaaaaaaa

SEQ ID NO: 12656 - RNA, 5785 nt, synthetic construct
  source 1..5785: mol_type = other RNA
aggaaataagagagaaaagaagagtaagaagaaatataagagccaccatggcccctaagaagaagcgtaaagtgagccggatggaacgcctcgtctacgaggtgcggcagaagtgcagaaacatcgaggacatctgcatctcctgcggatctctgaacgtgaccctggagcacccactgttcatcggcggcatgtgccagaactgtaaaaactgttttctggagtgtgcctatcaatacgacgatgacggctaccagagctactgcaccatctgttgcggcggaagagaggtgctgatgtgtggaaataacaactgctgccggtgcttctgcgtggaatgcgtggacctgctggtgggccccggcgccgcccaggccgctattaaggaagatccttggaactgctacatgtgcggccacaagggcacatacggcctgctgagacggagagaggactggcctagcagactgcagatgttcttcgccaataaccacgaccaggagttcgacccccctaaggtgtaccctcccgtccccgccgagaagagaaagcccatccgggtcctgagcctgttcgatggcatcgccaccggtctgctggtgctgaaggacctgggcatccaggtggataggtacattgcctccgaggtgtgcgaggactccatcaccgtgggaatggtgcgtcatcagggcaagatcatgtacgtgggcgacgtgcggagcgtgacacagaagcatatccaggagtggggccctttcgacctggtgatcggcggcagcccttgcaatgacctgagcatcgtgaacccagcccggaagggcctgtacgagggaaccggcagactgttcttcgagttttacagactgctgcacgacgcccggcctaaggaaggcgacgaccggcccttcttttggctgttcgagaatgtggtggccatgggagtcagcgacaagcgggatattagccggttcctggagagcaaccccgtgatgatcgatgccaaggaagtgagcgccgcccaccgggccagatacttctggggcaatctgcctggcatgaacagacccctggccagcaccgtgaacgacaagctggagctgcaggagtgcctggagcacggccggatcgccaagttcagcaaggtgagaaccatcaccacccgaagcaacagcatcaaacaaggcaaggaccagcactttcctgtgttcatgaacgagaaggaggacatcctgtggtgtaccgagatggagagagtgttcgggttcccagtccactacacagatgtcagcaacatgtctagactggccagacagagactgctgggaagaagctggtccgtccctgtgatcagacacctgttcgcccctctgaaggagtacttcgcctgcgtgagcagcggcaacagcaacgccaacagccggggccccagcttctctagcggcctggtgccactgtccctgagagggagccacatgggccccatggagatctacaaaaccgtgagcgcctggaagcggcagcctgtgcgcgtgctgagcctgtttcggaatatcgataaagtcctgaaaagcctgggattcctggagagcggctctggctccggcggtggcaccctgaagtacgtggaggatgtgacaaacgtggtcagacgggatgtggagaagtggggccccttcgatctggtgtacggcagcacccaacccctgggcagctcttgtgaccggtgccctggctggtacatgtttcagttccaccggatcctgcagtacgccctgccgagacaggagtcccagcggccattcttttggattttcatggacaacttgctgctgaccgaggatgaccaggaaactaccactcggttcctgcagaccgaagccgtgaccctgcaggacgtgagaggccgggactaccagaacgccatgcgggtgtggtccaacatccctggactgaaaagcaagcacgcacctctgacccctaaagaagaggagtacctgcaggcccaggtgcggagcagaagcaagctggacgcccctaaggtggatctgctggtgaagaattgcctcctgcccctgagagagtacttcaagtatttcagccagaatagtctgcccctgggaggcagcggcggcggcagccagggcagcatcaccttcaaggacgtggccgtggacttcacccaggaggagtggtgcctgctggaccacagccagaaggagctgtacctggaggtgatgctggagaacgtgcagaacctgctgagcgtgggcctgcccgtgcccagggagaacttcatcagctgcctgcagcagggcaaggccccctggctgctggcccagaaggacagcaggaacagctgcctggaggccaagaccaacggcggcccaagcagcggcgcccctcctcccagcggcggcagcccagccggctccccaacctctaccgaggagggcacctctgagtccgccacccccgagagcggccctggcacctccaccgagcccagcgagggcagcgcacccggcagccctgccggcagccccacctccacagaggagggaaccagcaccgagcccagcgaaggcagcgccccaggcaccagcaccgagcctagtgagcaggagattaaacggatcaacaagatcagaagaagacttgtgaaagacagcaacaccaagaaggccggcaagacaggccccatgaaaaccctgctggttagagtgatgacacccgatctgagagagcggctggaaaacctgagaaagaagcctgaaaatatcccccagcccatcagcaatacatctagagccaacctgaataagctgctgaccgattacaccgaaatgaagaaggcgatcctgcatgtgtactgggaagagttccagaaggaccctgtgggcctgatgagccgggtggcccagcctgccagcaagaagatcgatcagaacaagctgaaacctgagatggacgagaagggcaacctgaccaccgccggctttgcctgctctcagtgtggccagcccctgttcgtgtacaagctggagcaggtgtctgagaagggcaaggcttacaccaactacttcggacggtgcaatgtggccgagcacgaaaagctgatcctgctggcccagctgaagcccgagaaggatagcgacgaagccgtgacatatagcctgggaaagtttgggcagagggccctggatttctacagcattcatgtgaccaaggagtccacccaccccgtgaagcccctggcccagatcgccggaaacagatacgcctccggacctgtgggaaaggccctgagcgacgcatgtatgggcacaatcgcctccttcctgtctaagtaccaggacatcatcatcgaacaccagaaggtggtgaagggcaaccagaagagactggagagcctgcgggagctggccggcaaggaaaacctggaataccctagcgtgaccctgccacctcagcctcacaccaaggagggcgttgatgcctacaacgaagtgatcgcccgggtgcgaatgtgggtgaacctgaacctgtggcagaagctgaagctaagcagagatgatgccaagcctctgctgagactgaagggattcccttcctttcctctggtcgagagacaggccaacgaagtggactggtgggacatggtgtgtaacgtgaagaagctgatcaacgagaaaaaggaggatggcaaggtgttttggcagaatctggctggctacaagagacaggaagccctgagaccatacctgagcagcgaggaagatcggaagaagggaaagaaattcgctcggtaccagctgggcgacctgctgctgcacctggaaaagaagcacggcgaggactggggaaaggtgtacgacgaggcctgggagcggattgacaagaaagtggaaggcctgagcaagcacatcaagctggaagaggaacggagaagcgaggacgcccagagcaaggccgccctgaccgactggctgcgggctaaggccagcttcgtgatcgagggcctgaaggaggccgacaaggacgagttctgcagatgcgagctgaagctgcagaagtggtacggggacctgcggggaaagcccttcgccatcgaagccgagaacagcatcctggacatcagcggcttcagcaagcagtacaactgtgccttcatctggcagaaggacggcgtgaagaagctgaacctgtacctgatcatcaactacttcaagggcggcaagctgcggttcaagaagatcaaacctgaagccttcgaagccaacagattctacaccgtgatcaacaaaaagagcggcgagatcgtgcccatggaggtgaacttcaacttcgacgaccccaacctgatcatcctgcctctggcctttggcaagagacagggcagagaattcatctggaacgacctgctgtccctggaaaccggcagcctgaagctggccaacggaagagtgatcgagaagacactgtacaacagaagaacccggcaggatgagcctgccctgttcgtggccctgaccttcgagcggcgggaggtcctggactcctccaatatcaaaccaatgaacctgatcggcgtggcaagaggcgaaaacatccccgccgtgatcgccctgaccgaccccgagggctgcccactgagccggtttaaggatagcctgggaaacccaacccacatcctgagaatcggcgagagctataaggagaagcagcggaccatccaggccaagaaggaggtggagcagcggagagccggcggctacagccggaagtacgccagcaaagccaagaatctggcagacgatatggtgagaaacaccgctagagatctgctgtactacgccgtgacccaggatgccatgctgatcttcgccaacctgagccggggcttcggccggcagggcaagcggaccttcatggccgagagacagtacacacggatggaggactggctgaccgccaagctggcctacgagggcctgagcaagacctacctgtccaagacactggcccagtacacctccaagacatgcagcaactgtgggtttaccatcaccagcgccgactacgacagggtgctggagaagctgaagaagacagcaacaggctggatgaccacaattaacggcaaggagctgaaggtggagggccagattacctactacaacagatacaagagacagaacgtagtcaaggacctgtccgtcgagctggatagactgagcgaagaatctgtgaacaacgacatctcctcctggacaaagggcagaagcggagaagctctgagcctcctgaagaaaagattctcccatagacccgtgcaggagaagttcgtgtgcctgaactgcggcttcgagacacacgcagccgagcaagccgccctgaacatcgccagatcctggctgttcctgcggagccaggagtacaagaaataccagacaaacaagacaaccggcaacaccgataagagagccttcgtcgagacctggcagtccttttaccggaagaagcttaaggaggtgtggaaacctgccgtgcggtctggcggatctggcggaggctccaccagccccaagaaaaagagaaaagtctaagctgccttctgcggggcttgccttctggccatgcccttcttctctcccttgcacctgtacctcttggtctttgaataaagcctgagtaggaaggctagcaaaaaaaaaaaaaaaaaaaaaaaaaaaaaaaaaaaaaaaaaaaaaaaaaaaaaaaaaaaaaaaaaaaaaaaaaaaaaaaa

SEQ ID NO: 12657 - RNA, 5785 nt, synthetic construct
  source 1..5785: mol_type = other RNA
aggaaataagagagaaaagaagagtaagaagaaatataagagccaccatggcccctaagaagaagcgtaaagtgagccggatggaacgcctcgtctacgaggtgcggcagaagtgcagaaacatcgaggacatctgcatctcctgcggatctctgaacgtgaccctggagcacccactgttcatcggcggcatgtgccagaactgtaaaaactgttttctggagtgtgcctatcaatacgacgatgacggctaccagagctactgcaccatctgttgcggcggaagagaggtgctgatgtgtggaaataacaactgctgccggtgcttctgcgtggaatgcgtggacctgctggtgggccccggcgccgcccaggccgctattaaggaagatccttggaactgctacatgtgcggccacaagggcacatacggcctgctgagacggagagaggactggcctagcagactgcagatgttcttcgccaataaccacgaccaggagttcgacccccctaaggtgtaccctcccgtccccgccgagaagagaaagcccatccgggtcctgagcctgttcgatggcatcgccaccggtctgctggtgctgaaggacctgggcatccaggtggataggtacattgcctccgaggtgtgcgaggactccatcaccgtgggaatggtgcgtcatcagggcaagatcatgtacgtgggcgacgtgcggagcgtgacacagaagcatatccaggagtggggccctttcgacctggtgatcggcggcagcccttgcaatgacctgagcatcgtgaacccagcccggaagggcctgtacgagggaaccggcagactgttcttcgagttttacagactgctgcacgacgcccggcctaaggaaggcgacgaccggcccttcttttggctgttcgagaatgtggtggccatgggagtcagcgacaagcgggatattagccggttcctggagagcaaccccgtgatgatcgatgccaaggaagtgagcgccgcccaccgggccagatacttctggggcaatctgcctggcatgaacagacccctggccagcaccgtgaacgacaagctggagctgcaggagtgcctggagcacggccggatcgccaagttcagcaaggtgagaaccatcaccacccgaagcaacagcatcaaacaaggcaaggaccagcactttcctgtgttcatgaacgagaaggaggacatcctgtggtgtaccgagatggagagagtgttcgggttcccagtccactacacagatgtcagcaacatgtctagactggccagacagagactgctgggaagaagctggtccgtccctgtgatcagacacctgttcgcccctctgaaggagtacttcgcctgcgtgagcagcggcaacagcaacgccaacagccggggccccagcttctctagcggcctggtgccactgtccctgagagggagccacatgggccccatggagatctacaaaaccgtgagcgcctggaagcggcagcctgtgcgcgtgctgagcctgtttcggaatatcgataaagtcctgaaaagcctgggattcctggagagcggctctggctccggcggtggcaccctgaagtacgtggaggatgtgacaaacgtggtcagacgggatgtggagaagtggggccccttcgatctggtgtacggcagcacccaacccctgggcagctcttgtgaccggtgccctggctggtacatgtttcagttccaccggatcctgcagtacgccctgccgagacaggagtcccagcggccattcttttggattttcatggacaacttgctgctgaccgaggatgaccaggaaactaccactcggttcctgcagaccgaagccgtgaccctgcaggacgtgagaggccgggactaccagaacgccatgcgggtgtggtccaacatccctggactgaaaagcaagcacgcacctctgacccctaaagaagaggagtacctgcaggcccaggtgcggagcagaagcaagctggacgcccctaaggtggatctgctggtgaagaattgcctcctgcccctgagagagtacttcaagtatttcagccagaatagtctgcccctgggaggcagcggcggcggcccccagaagagcgtgaccttcgaggacgtggccgtgtacttcacccaggccgagtgggacggcctgagccccgcccagaggaccctgtacagggacgtgatgctggagaactacggcaacgtggccagcctgggcttccccctgctgaagcccgccgtgatcagccagctggagggcggcagcgagctgggcggcagcagccccctggccgccggcaccggcctgcagggcctgcagaccgtgggcggcccaagcagcggcgcccctcctcccagcggcggcagcccagccggctccccaacctctaccgaggagggcacctctgagtccgccacccccgagagcggccctggcacctccaccgagcccagcgagggcagcgcacccggcagccctgccggcagccccacctccacagaggagggaaccagcaccgagcccagcgaaggcagcgccccaggcaccagcaccgagcctagtgagcaggagattaaacggatcaacaagatcagaagaagacttgtgaaagacagcaacaccaagaaggccggcaagacaggccccatgaaaaccctgctggttagagtgatgacacccgatctgagagagcggctggaaaacctgagaaagaagcctgaaaatatcccccagcccatcagcaatacatctagagccaacctgaataagctgctgaccgattacaccgaaatgaagaaggcgatcctgcatgtgtactgggaagagttccagaaggaccctgtgggcctgatgagccgggtggcccagcctgccagcaagaagatcgatcagaacaagctgaaacctgagatggacgagaagggcaacctgaccaccgccggctttgcctgctctcagtgtggccagcccctgttcgtgtacaagctggagcaggtgtctgagaagggcaaggcttacaccaactacttcggacggtgcaatgtggccgagcacgaaaagctgatcctgctggcccagctgaagcccgagaaggatagcgacgaagccgtgacatatagcctgggaaagtttgggcagagggccctggatttctacagcattcatgtgaccaaggagtccacccaccccgtgaagcccctggcccagatcgccggaaacagatacgcctccggacctgtgggaaaggccctgagcgacgcatgtatgggcacaatcgcctccttcctgtctaagtaccaggacatcatcatcgaacaccagaaggtggtgaagggcaaccagaagagactggagagcctgcgggagctggccggcaaggaaaacctggaataccctagcgtgaccctgccacctcagcctcacaccaaggagggcgttgatgcctacaacgaagtgatcgcccgggtgcgaatgtgggtgaacctgaacctgtggcagaagctgaagctaagcagagatgatgccaagcctctgctgagactgaagggattcccttcctttcctctggtcgagagacaggccaacgaagtggactggtgggacatggtgtgtaacgtgaagaagctgatcaacgagaaaaaggaggatggcaaggtgttttggcagaatctggctggctacaagagacaggaagccctgagaccatacctgagcagcgaggaagatcggaagaagggaaagaaattcgctcggtaccagctgggcgacctgctgctgcacctggaaaagaagcacggcgaggactggggaaaggtgtacgacgaggcctgggagcggattgacaagaaagtggaaggcctgagcaagcacatcaagctggaagaggaacggagaagcgaggacgcccagagcaaggccgccctgaccgactggctgcgggctaaggccagcttcgtgatcgagggcctgaaggaggccgacaaggacgagttctgcagatgcgagctgaagctgcagaagtggtacggggacctgcggggaaagcccttcgccatcgaagccgagaacagcatcctggacatcagcggcttcagcaagcagtacaactgtgccttcatctggcagaaggacggcgtgaagaagctgaacctgtacctgatcatcaactacttcaagggcggcaagctgcggttcaagaagatcaaacctgaagccttcgaagccaacagattctacaccgtgatcaacaaaaagagcggcgagatcgtgcccatggaggtgaacttcaacttcgacgaccccaacctgatcatcctgcctctggcctttggcaagagacagggcagagaattcatctggaacgacctgctgtccctggaaaccggcagcctgaagctggccaacggaagagtgatcgagaagacactgtacaacagaagaacccggcaggatgagcctgccctgttcgtggccctgaccttcgagcggcgggaggtcctggactcctccaatatcaaaccaatgaacctgatcggcgtggcaagaggcgaaaacatccccgccgtgatcgccctgaccgaccccgagggctgcccactgagccggtttaaggatagcctgggaaacccaacccacatcctgagaatcggcgagagctataaggagaagcagcggaccatccaggccaagaaggaggtggagcagcggagagccggcggctacagccggaagtacgccagcaaagccaagaatctggcagacgatatggtgagaaacaccgctagagatctgctgtactacgccgtgacccaggatgccatgctgatcttcgccaacctgagccggggcttcggccggcagggcaagcggaccttcatggccgagagacagtacacacggatggaggactggctgaccgccaagctggcctacgagggcctgagcaagacctacctgtccaagacactggcccagtacacctccaagacatgcagcaactgtgggtttaccatcaccagcgccgactacgacagggtgctggagaagctgaagaagacagcaacaggctggatgaccacaattaacggcaaggagctgaaggtggagggccagattacctactacaacagatacaagagacagaacgtagtcaaggacctgtccgtcgagctggatagactgagcgaagaatctgtgaacaacgacatctcctcctggacaaagggcagaagcggagaagctctgagcctcctgaagaaaagattctcccatagacccgtgcaggagaagttcgtgtgcctgaactgcggcttcgagacacacgcagccgagcaagccgccctgaacatcgccagatcctggctgttcctgcggagccaggagtacaagaaataccagacaaacaagacaaccggcaacaccgataagagagccttcgtcgagacctggcagtccttttaccggaagaagcttaaggaggtgtggaaacctgccgtgcggtctggcggatctggcggaggctccaccagccccaagaaaaagagaaaagtctaagctgccttctgcggggcttgccttctggccatgcccttcttctctcccttgcacctgtacctcttggtctttgaataaagcctgagtaggaaggctagcaaaaaaaaaaaaaaaaaaaaaaaaaaaaaaaaaaaaaaaaaaaaaaaaaaaaaaaaaaaaaaaaaaaaaaaaaaaaaaaa

SEQ ID NO: 12658 - RNA, 5785 nt, synthetic construct
  source 1..5785: mol_type = other RNA
aggaaataagagagaaaagaagagtaagaagaaatataagagccaccatggcccctaagaagaagcgtaaagtgagccggatggaacgcctcgtctacgaggtgcggcagaagtgcagaaacatcgaggacatctgcatctcctgcggatctctgaacgtgaccctggagcacccactgttcatcggcggcatgtgccagaactgtaaaaactgttttctggagtgtgcctatcaatacgacgatgacggctaccagagctactgcaccatctgttgcggcggaagagaggtgctgatgtgtggaaataacaactgctgccggtgcttctgcgtggaatgcgtggacctgctggtgggccccggcgccgcccaggccgctattaaggaagatccttggaactgctacatgtgcggccacaagggcacatacggcctgctgagacggagagaggactggcctagcagactgcagatgttcttcgccaataaccacgaccaggagttcgacccccctaaggtgtaccctcccgtccccgccgagaagagaaagcccatccgggtcctgagcctgttcgatggcatcgccaccggtctgctggtgctgaaggacctgggcatccaggtggataggtacattgcctccgaggtgtgcgaggactccatcaccgtgggaatggtgcgtcatcagggcaagatcatgtacgtgggcgacgtgcggagcgtgacacagaagcatatccaggagtggggccctttcgacctggtgatcggcggcagcccttgcaatgacctgagcatcgtgaacccagcccggaagggcctgtacgagggaaccggcagactgttcttcgagttttacagactgctgcacgacgcccggcctaaggaaggcgacgaccggcccttcttttggctgttcgagaatgtggtggccatgggagtcagcgacaagcgggatattagccggttcctggagagcaaccccgtgatgatcgatgccaaggaagtgagcgccgcccaccgggccagatacttctggggcaatctgcctggcatgaacagacccctggccagcaccgtgaacgacaagctggagctgcaggagtgcctggagcacggccggatcgccaagttcagcaaggtgagaaccatcaccacccgaagcaacagcatcaaacaaggcaaggaccagcactttcctgtgttcatgaacgagaaggaggacatcctgtggtgtaccgagatggagagagtgttcgggttcccagtccactacacagatgtcagcaacatgtctagactggccagacagagactgctgggaagaagctggtccgtccctgtgatcagacacctgttcgcccctctgaaggagtacttcgcctgcgtgagcagcggcaacagcaacgccaacagccggggccccagcttctctagcggcctggtgccactgtccctgagagggagccacatgggccccatggagatctacaaaaccgtgagcgcctggaagcggcagcctgtgcgcgtgctgagcctgtttcggaatatcgataaagtcctgaaaagcctgggattcctggagagcggctctggctccggcggtggcaccctgaagtacgtggaggatgtgacaaacgtggtcagacgggatgtggagaagtggggccccttcgatctggtgtacggcagcacccaacccctgggcagctcttgtgaccggtgccctggctggtacatgtttcagttccaccggatcctgcagtacgccctgccgagacaggagtcccagcggccattcttttggattttcatggacaacttgctgctgaccgaggatgaccaggaaactaccactcggttcctgcagaccgaagccgtgaccctgcaggacgtgagaggccgggactaccagaacgccatgcgggtgtggtccaacatccctggactgaaaagcaagcacgcacctctgacccctaaagaagaggagtacctgcaggcccaggtgcggagcagaagcaagctggacgcccctaaggtggatctgctggtgaagaattgcctcctgcccctgagagagtacttcaagtatttcagccagaatagtctgcccctgggaggcagcggcggcggcgcccaggtgctggtgaccttccaggacgtggccgtggacttcacccaggaggagtggaggctgctggaccccggccagaaggagctgtacaaggaggtgatgctggagaacgtgcagaacgtgctgagcctgggcctgcccgtgcccagggaggactggttcttccacttccacgagggcggcgacccctggatgctggagggcaagggccccagcatcagcaggctggacgaggagaggcacggcggcccaagcagcggcgcccctcctcccagcggcggcagcccagccggctccccaacctctaccgaggagggcacctctgagtccgccacccccgagagcggccctggcacctccaccgagcccagcgagggcagcgcacccggcagccctgccggcagccccacctccacagaggagggaaccagcaccgagcccagcgaaggcagcgccccaggcaccagcaccgagcctagtgagcaggagattaaacggatcaacaagatcagaagaagacttgtgaaagacagcaacaccaagaaggccggcaagacaggccccatgaaaaccctgctggttagagtgatgacacccgatctgagagagcggctggaaaacctgagaaagaagcctgaaaatatcccccagcccatcagcaatacatctagagccaacctgaataagctgctgaccgattacaccgaaatgaagaaggcgatcctgcatgtgtactgggaagagttccagaaggaccctgtgggcctgatgagccgggtggcccagcctgccagcaagaagatcgatcagaacaagctgaaacctgagatggacgagaagggcaacctgaccaccgccggctttgcctgctctcagtgtggccagcccctgttcgtgtacaagctggagcaggtgtctgagaagggcaaggcttacaccaactacttcggacggtgcaatgtggccgagcacgaaaagctgatcctgctggcccagctgaagcccgagaaggatagcgacgaagccgtgacatatagcctgggaaagtttgggcagagggccctggatttctacagcattcatgtgaccaaggagtccacccaccccgtgaagcccctggcccagatcgccggaaacagatacgcctccggacctgtgggaaaggccctgagcgacgcatgtatgggcacaatcgcctccttcctgtctaagtaccaggacatcatcatcgaacaccagaaggtggtgaagggcaaccagaagagactggagagcctgcgggagctggccggcaaggaaaacctggaataccctagcgtgaccctgccacctcagcctcacaccaaggagggcgttgatgcctacaacgaagtgatcgcccgggtgcgaatgtgggtgaacctgaacctgtggcagaagctgaagctaagcagagatgatgccaagcctctgctgagactgaagggattcccttcctttcctctggtcgagagacaggccaacgaagtggactggtgggacatggtgtgtaacgtgaagaagctgatcaacgagaaaaaggaggatggcaaggtgttttggcagaatctggctggctacaagagacaggaagccctgagaccatacctgagcagcgaggaagatcggaagaagggaaagaaattcgctcggtaccagctgggcgacctgctgctgcacctggaaaagaagcacggcgaggactggggaaaggtgtacgacgaggcctgggagcggattgacaagaaagtggaaggcctgagcaagcacatcaagctggaagaggaacggagaagcgaggacgcccagagcaaggccgccctgaccgactggctgcgggctaaggccagcttcgtgatcgagggcctgaaggaggccgacaaggacgagttctgcagatgcgagctgaagctgcagaagtggtacggggacctgcggggaaagcccttcgccatcgaagccgagaacagcatcctggacatcagcggcttcagcaagcagtacaactgtgccttcatctggcagaaggacggcgtgaagaagctgaacctgtacctgatcatcaactacttcaagggcggcaagctgcggttcaagaagatcaaacctgaagccttcgaagccaacagattctacaccgtgatcaacaaaaagagcggcgagatcgtgcccatggaggtgaacttcaacttcgacgaccccaacctgatcatcctgcctctggcctttggcaagagacagggcagagaattcatctggaacgacctgctgtccctggaaaccggcagcctgaagctggccaacggaagagtgatcgagaagacactgtacaacagaagaacccggcaggatgagcctgccctgttcgtggccctgaccttcgagcggcgggaggtcctggactcctccaatatcaaaccaatgaacctgatcggcgtggcaagaggcgaaaacatccccgccgtgatcgccctgaccgaccccgagggctgcccactgagccggtttaaggatagcctgggaaacccaacccacatcctgagaatcggcgagagctataaggagaagcagcggaccatccaggccaagaaggaggtggagcagcggagagccggcggctacagccggaagtacgccagcaaagccaagaatctggcagacgatatggtgagaaacaccgctagagatctgctgtactacgccgtgacccaggatgccatgctgatcttcgccaacctgagccggggcttcggccggcagggcaagcggaccttcatggccgagagacagtacacacggatggaggactggctgaccgccaagctggcctacgagggcctgagcaagacctacctgtccaagacactggcccagtacacctccaagacatgcagcaactgtgggtttaccatcaccagcgccgactacgacagggtgctggagaagctgaagaagacagcaacaggctggatgaccacaattaacggcaaggagctgaaggtggagggccagattacctactacaacagatacaagagacagaacgtagtcaaggacctgtccgtcgagctggatagactgagcgaagaatctgtgaacaacgacatctcctcctggacaaagggcagaagcggagaagctctgagcctcctgaagaaaagattctcccatagacccgtgcaggagaagttcgtgtgcctgaactgcggcttcgagacacacgcagccgagcaagccgccctgaacatcgccagatcctggctgttcctgcggagccaggagtacaagaaataccagacaaacaagacaaccggcaacaccgataagagagccttcgtcgagacctggcagtccttttaccggaagaagcttaaggaggtgtggaaacctgccgtgcggtctggcggatctggcggaggctccaccagccccaagaaaaagagaaaagtctaagctgccttctgcggggcttgccttctggccatgcccttcttctctcccttgcacctgtacctcttggtctttgaataaagcctgagtaggaaggctagcaaaaaaaaaaaaaaaaaaaaaaaaaaaaaaaaaaaaaaaaaaaaaaaaaaaaaaaaaaaaaaaaaaaaaaaaaaaaaaaa

SEQ ID NO: 12659 - RNA, 5785 nt, synthetic construct
  source 1..5785: mol_type = other RNA
aggaaataagagagaaaagaagagtaagaagaaatataagagccaccatggcccctaagaagaagcgtaaagtgagccggatggaacgcctcgtctacgaggtgcggcagaagtgcagaaacatcgaggacatctgcatctcctgcggatctctgaacgtgaccctggagcacccactgttcatcggcggcatgtgccagaactgtaaaaactgttttctggagtgtgcctatcaatacgacgatgacggctaccagagctactgcaccatctgttgcggcggaagagaggtgctgatgtgtggaaataacaactgctgccggtgcttctgcgtggaatgcgtggacctgctggtgggccccggcgccgcccaggccgctattaaggaagatccttggaactgctacatgtgcggccacaagggcacatacggcctgctgagacggagagaggactggcctagcagactgcagatgttcttcgccaataaccacgaccaggagttcgacccccctaaggtgtaccctcccgtccccgccgagaagagaaagcccatccgggtcctgagcctgttcgatggcatcgccaccggtctgctggtgctgaaggacctgggcatccaggtggataggtacattgcctccgaggtgtgcgaggactccatcaccgtgggaatggtgcgtcatcagggcaagatcatgtacgtgggcgacgtgcggagcgtgacacagaagcatatccaggagtggggccctttcgacctggtgatcggcggcagcccttgcaatgacctgagcatcgtgaacccagcccggaagggcctgtacgagggaaccggcagactgttcttcgagttttacagactgctgcacgacgcccggcctaaggaaggcgacgaccggcccttcttttggctgttcgagaatgtggtggccatgggagtcagcgacaagcgggatattagccggttcctggagagcaaccccgtgatgatcgatgccaaggaagtgagcgccgcccaccgggccagatacttctggggcaatctgcctggcatgaacagacccctggccagcaccgtgaacgacaagctggagctgcaggagtgcctggagcacggccggatcgccaagttcagcaaggtgagaaccatcaccacccgaagcaacagcatcaaacaaggcaaggaccagcactttcctgtgttcatgaacgagaaggaggacatcctgtggtgtaccgagatggagagagtgttcgggttcccagtccactacacagatgtcagcaacatgtctagactggccagacagagactgctgggaagaagctggtccgtccctgtgatcagacacctgttcgcccctctgaaggagtacttcgcctgcgtgagcagcggcaacagcaacgccaacagccggggccccagcttctctagcggcctggtgccactgtccctgagagggagccacatgggccccatggagatctacaaaaccgtgagcgcctggaagcggcagcctgtgcgcgtgctgagcctgtttcggaatatcgataaagtcctgaaaagcctgggattcctggagagcggctctggctccggcggtggcaccctgaagtacgtggaggatgtgacaaacgtggtcagacgggatgtggagaagtggggccccttcgatctggtgtacggcagcacccaacccctgggcagctcttgtgaccggtgccctggctggtacatgtttcagttccaccggatcctgcagtacgccctgccgagacaggagtcccagcggccattcttttggattttcatggacaacttgctgctgaccgaggatgaccaggaaactaccactcggttcctgcagaccgaagccgtgaccctgcaggacgtgagaggccgggactaccagaacgccatgcgggtgtggtccaacatccctggactgaaaagcaagcacgcacctctgacccctaaagaagaggagtacctgcaggcccaggtgcggagcagaagcaagctggacgcccctaaggtggatctgctggtgaagaattgcctcctgcccctgagagagtacttcaagtatttcagccagaatagtctgcccctgggaggcagcggcggcggcctgcaggagcccgtgagcttcgccgaggtggccgtgtacttcagcagggaggagtgggccctgctggaccccgcccagagggccctgtacagggacgtgatgctggagacctaccagtgcgtggcctggctggcccccctgcccgcccccaagcccggcctgatcagcctgctggagggcggcgaggacccctggatccccgacgtgaggagccccgaggccgtgcccggcgacctgagccccggcggcccaagcagcggcgcccctcctcccagcggcggcagcccagccggctccccaacctctaccgaggagggcacctctgagtccgccacccccgagagcggccctggcacctccaccgagcccagcgagggcagcgcacccggcagccctgccggcagccccacctccacagaggagggaaccagcaccgagcccagcgaaggcagcgccccaggcaccagcaccgagcctagtgagcaggagattaaacggatcaacaagatcagaagaagacttgtgaaagacagcaacaccaagaaggccggcaagacaggccccatgaaaaccctgctggttagagtgatgacacccgatctgagagagcggctggaaaacctgagaaagaagcctgaaaatatcccccagcccatcagcaatacatctagagccaacctgaataagctgctgaccgattacaccgaaatgaagaaggcgatcctgcatgtgtactgggaagagttccagaaggaccctgtgggcctgatgagccgggtggcccagcctgccagcaagaagatcgatcagaacaagctgaaacctgagatggacgagaagggcaacctgaccaccgccggctttgcctgctctcagtgtggccagcccctgttcgtgtacaagctggagcaggtgtctgagaagggcaaggcttacaccaactacttcggacggtgcaatgtggccgagcacgaaaagctgatcctgctggcccagctgaagcccgagaaggatagcgacgaagccgtgacatatagcctgggaaagtttgggcagagggccctggatttctacagcattcatgtgaccaaggagtccacccaccccgtgaagcccctggcccagatcgccggaaacagatacgcctccggacctgtgggaaaggccctgagcgacgcatgtatgggcacaatcgcctccttcctgtctaagtaccaggacatcatcatcgaacaccagaaggtggtgaagggcaaccagaagagactggagagcctgcgggagctggccggcaaggaaaacctggaataccctagcgtgaccctgccacctcagcctcacaccaaggagggcgttgatgcctacaacgaagtgatcgcccgggtgcgaatgtgggtgaacctgaacctgtggcagaagctgaagctaagcagagatgatgccaagcctctgctgagactgaagggattcccttcctttcctctggtcgagagacaggccaacgaagtggactggtgggacatggtgtgtaacgtgaagaagctgatcaacgagaaaaaggaggatggcaaggtgttttggcagaatctggctggctacaagagacaggaagccctgagaccatacctgagcagcgaggaagatcggaagaagggaaagaaattcgctcggtaccagctgggcgacctgctgctgcacctggaaaagaagcacggcgaggactggggaaaggtgtacgacgaggcctgggagcggattgacaagaaagtggaaggcctgagcaagcacatcaagctggaagaggaacggagaagcgaggacgcccagagcaaggccgccctgaccgactggctgcgggctaaggccagcttcgtgatcgagggcctgaaggaggccgacaaggacgagttctgcagatgcgagctgaagctgcagaagtggtacggggacctgcggggaaagcccttcgccatcgaagccgagaacagcatcctggacatcagcggcttcagcaagcagtacaactgtgccttcatctggcagaaggacggcgtgaagaagctgaacctgtacctgatcatcaactacttcaagggcggcaagctgcggttcaagaagatcaaacctgaagccttcgaagccaacagattctacaccgtgatcaacaaaaagagcggcgagatcgtgcccatggaggtgaacttcaacttcgacgaccccaacctgatcatcctgcctctggcctttggcaagagacagggcagagaattcatctggaacgacctgctgtccctggaaaccggcagcctgaagctggccaacggaagagtgatcgagaagacactgtacaacagaagaacccggcaggatgagcctgccctgttcgtggccctgaccttcgagcggcgggaggtcctggactcctccaatatcaaaccaatgaacctgatcggcgtggcaagaggcgaaaacatccccgccgtgatcgccctgaccgaccccgagggctgcccactgagccggtttaaggatagcctgggaaacccaacccacatcctgagaatcggcgagagctataaggagaagcagcggaccatccaggccaagaaggaggtggagcagcggagagccggcggctacagccggaagtacgccagcaaagccaagaatctggcagacgatatggtgagaaacaccgctagagatctgctgtactacgccgtgacccaggatgccatgctgatcttcgccaacctgagccggggcttcggccggcagggcaagcggaccttcatggccgagagacagtacacacggatggaggactggctgaccgccaagctggcctacgagggcctgagcaagacctacctgtccaagacactggcccagtacacctccaagacatgcagcaactgtgggtttaccatcaccagcgccgactacgacagggtgctggagaagctgaagaagacagcaacaggctggatgaccacaattaacggcaaggagctgaaggtggagggccagattacctactacaacagatacaagagacagaacgtagtcaaggacctgtccgtcgagctggatagactgagcgaagaatctgtgaacaacgacatctcctcctggacaaagggcagaagcggagaagctctgagcctcctgaagaaaagattctcccatagacccgtgcaggagaagttcgtgtgcctgaactgcggcttcgagacacacgcagccgagcaagccgccctgaacatcgccagatcctggctgttcctgcggagccaggagtacaagaaataccagacaaacaagacaaccggcaacaccgataagagagccttcgtcgagacctggcagtccttttaccggaagaagcttaaggaggtgtggaaacctgccgtgcggtctggcggatctggcggaggctccaccagccccaagaaaaagagaaaagtctaagctgccttctgcggggcttgccttctggccatgcccttcttctctcccttgcacctgtacctcttggtctttgaataaagcctgagtaggaaggctagcaaaaaaaaaaaaaaaaaaaaaaaaaaaaaaaaaaaaaaaaaaaaaaaaaaaaaaaaaaaaaaaaaaaaaaaaaaaaaaaa

SEQ ID NO: 12660 - RNA, 5785 nt, synthetic construct
  source 1..5785: mol_type = other RNA
aggaaataagagagaaaagaagagtaagaagaaatataagagccaccatggcccctaagaagaagcgtaaagtgagccggatggaacgcctcgtctacgaggtgcggcagaagtgcagaaacatcgaggacatctgcatctcctgcggatctctgaacgtgaccctggagcacccactgttcatcggcggcatgtgccagaactgtaaaaactgttttctggagtgtgcctatcaatacgacgatgacggctaccagagctactgcaccatctgttgcggcggaagagaggtgctgatgtgtggaaataacaactgctgccggtgcttctgcgtggaatgcgtggacctgctggtgggccccggcgccgcccaggccgctattaaggaagatccttggaactgctacatgtgcggccacaagggcacatacggcctgctgagacggagagaggactggcctagcagactgcagatgttcttcgccaataaccacgaccaggagttcgacccccctaaggtgtaccctcccgtccccgccgagaagagaaagcccatccgggtcctgagcctgttcgatggcatcgccaccggtctgctggtgctgaaggacctgggcatccaggtggataggtacattgcctccgaggtgtgcgaggactccatcaccgtgggaatggtgcgtcatcagggcaagatcatgtacgtgggcgacgtgcggagcgtgacacagaagcatatccaggagtggggccctttcgacctggtgatcggcggcagcccttgcaatgacctgagcatcgtgaacccagcccggaagggcctgtacgagggaaccggcagactgttcttcgagttttacagactgctgcacgacgcccggcctaaggaaggcgacgaccggcccttcttttggctgttcgagaatgtggtggccatgggagtcagcgacaagcgggatattagccggttcctggagagcaaccccgtgatgatcgatgccaaggaagtgagcgccgcccaccgggccagatacttctggggcaatctgcctggcatgaacagacccctggccagcaccgtgaacgacaagctggagctgcaggagtgcctggagcacggccggatcgccaagttcagcaaggtgagaaccatcaccacccgaagcaacagcatcaaacaaggcaaggaccagcactttcctgtgttcatgaacgagaaggaggacatcctgtggtgtaccgagatggagagagtgttcgggttcccagtccactacacagatgtcagcaacatgtctagactggccagacagagactgctgggaagaagctggtccgtccctgtgatcagacacctgttcgcccctctgaaggagtacttcgcctgcgtgagcagcggcaacagcaacgccaacagccggggccccagcttctctagcggcctggtgccactgtccctgagagggagccacatgggccccatggagatctacaaaaccgtgagcgcctggaagcggcagcctgtgcgcgtgctgagcctgtttcggaatatcgataaagtcctgaaaagcctgggattcctggagagcggctctggctccggcggtggcaccctgaagtacgtggaggatgtgacaaacgtggtcagacgggatgtggagaagtggggccccttcgatctggtgtacggcagcacccaacccctgggcagctcttgtgaccggtgccctggctggtacatgtttcagttccaccggatcctgcagtacgccctgccgagacaggagtcccagcggccattcttttggattttcatggacaacttgctgctgaccgaggatgaccaggaaactaccactcggttcctgcagaccgaagccgtgaccctgcaggacgtgagaggccgggactaccagaacgccatgcgggtgtggtccaacatccctggactgaaaagcaagcacgcacctctgacccctaaagaagaggagtacctgcaggcccaggtgcggagcagaagcaagctggacgcccctaaggtggatctgctggtgaagaattgcctcctgcccctgagagagtacttcaagtatttcagccagaatagtctgcccctgggaggcagcggcggcggcatggagctgagggaggccttcgaggacgtggccgtgtacttcaccaggaaggagtgggagctgctggaggacgaggacaaggagctgtacagggacctgatgctgaggaactaccaggccctggtgagcctgggctaccagggccccacccccggcctgatctgcaggatcaagcagagggaggtggagctgtgggtgtgcgacgacgagcaccacggcgagagcagcgtgagcgagaacctgggcggcccaagcagcggcgcccctcctcccagcggcggcagcccagccggctccccaacctctaccgaggagggcacctctgagtccgccacccccgagagcggccctggcacctccaccgagcccagcgagggcagcgcacccggcagccctgccggcagccccacctccacagaggagggaaccagcaccgagcccagcgaaggcagcgccccaggcaccagcaccgagcctagtgagcaggagattaaacggatcaacaagatcagaagaagacttgtgaaagacagcaacaccaagaaggccggcaagacaggccccatgaaaaccctgctggttagagtgatgacacccgatctgagagagcggctggaaaacctgagaaagaagcctgaaaatatcccccagcccatcagcaatacatctagagccaacctgaataagctgctgaccgattacaccgaaatgaagaaggcgatcctgcatgtgtactgggaagagttccagaaggaccctgtgggcctgatgagccgggtggcccagcctgccagcaagaagatcgatcagaacaagctgaaacctgagatggacgagaagggcaacctgaccaccgccggctttgcctgctctcagtgtggccagcccctgttcgtgtacaagctggagcaggtgtctgagaagggcaaggcttacaccaactacttcggacggtgcaatgtggccgagcacgaaaagctgatcctgctggcccagctgaagcccgagaaggatagcgacgaagccgtgacatatagcctgggaaagtttgggcagagggccctggatttctacagcattcatgtgaccaaggagtccacccaccccgtgaagcccctggcccagatcgccggaaacagatacgcctccggacctgtgggaaaggccctgagcgacgcatgtatgggcacaatcgcctccttcctgtctaagtaccaggacatcatcatcgaacaccagaaggtggtgaagggcaaccagaagagactggagagcctgcgggagctggccggcaaggaaaacctggaataccctagcgtgaccctgccacctcagcctcacaccaaggagggcgttgatgcctacaacgaagtgatcgcccgggtgcgaatgtgggtgaacctgaacctgtggcagaagctgaagctaagcagagatgatgccaagcctctgctgagactgaagggattcccttcctttcctctggtcgagagacaggccaacgaagtggactggtgggacatggtgtgtaacgtgaagaagctgatcaacgagaaaaaggaggatggcaaggtgttttggcagaatctggctggctacaagagacaggaagccctgagaccatacctgagcagcgaggaagatcggaagaagggaaagaaattcgctcggtaccagctgggcgacctgctgctgcacctggaaaagaagcacggcgaggactggggaaaggtgtacgacgaggcctgggagcggattgacaagaaagtggaaggcctgagcaagcacatcaagctggaagaggaacggagaagcgaggacgcccagagcaaggccgccctgaccgactggctgcgggctaaggccagcttcgtgatcgagggcctgaaggaggccgacaaggacgagttctgcagatgcgagctgaagctgcagaagtggtacggggacctgcggggaaagcccttcgccatcgaagccgagaacagcatcctggacatcagcggcttcagcaagcagtacaactgtgccttcatctggcagaaggacggcgtgaagaagctgaacctgtacctgatcatcaactacttcaagggcggcaagctgcggttcaagaagatcaaacctgaagccttcgaagccaacagattctacaccgtgatcaacaaaaagagcggcgagatcgtgcccatggaggtgaacttcaacttcgacgaccccaacctgatcatcctgcctctggcctttggcaagagacagggcagagaattcatctggaacgacctgctgtccctggaaaccggcagcctgaagctggccaacggaagagtgatcgagaagacactgtacaacagaagaacccggcaggatgagcctgccctgttcgtggccctgaccttcgagcggcgggaggtcctggactcctccaatatcaaaccaatgaacctgatcggcgtggcaagaggcgaaaacatccccgccgtgatcgccctgaccgaccccgagggctgcccactgagccggtttaaggatagcctgggaaacccaacccacatcctgagaatcggcgagagctataaggagaagcagcggaccatccaggccaagaaggaggtggagcagcggagagccggcggctacagccggaagtacgccagcaaagccaagaatctggcagacgatatggtgagaaacaccgctagagatctgctgtactacgccgtgacccaggatgccatgctgatcttcgccaacctgagccggggcttcggccggcagggcaagcggaccttcatggccgagagacagtacacacggatggaggactggctgaccgccaagctggcctacgagggcctgagcaagacctacctgtccaagacactggcccagtacacctccaagacatgcagcaactgtgggtttaccatcaccagcgccgactacgacagggtgctggagaagctgaagaagacagcaacaggctggatgaccacaattaacggcaaggagctgaaggtggagggccagattacctactacaacagatacaagagacagaacgtagtcaaggacctgtccgtcgagctggatagactgagcgaagaatctgtgaacaacgacatctcctcctggacaaagggcagaagcggagaagctctgagcctcctgaagaaaagattctcccatagacccgtgcaggagaagttcgtgtgcctgaactgcggcttcgagacacacgcagccgagcaagccgccctgaacatcgccagatcctggctgttcctgcggagccaggagtacaagaaataccagacaaacaagacaaccggcaacaccgataagagagccttcgtcgagacctggcagtccttttaccggaagaagcttaaggaggtgtggaaacctgccgtgcggtctggcggatctggcggaggctccaccagccccaagaaaaagagaaaagtctaagctgccttctgcggggcttgccttctggccatgcccttcttctctcccttgcacctgtacctcttggtctttgaataaagcctgagtaggaaggctagcaaaaaaaaaaaaaaaaaaaaaaaaaaaaaaaaaaaaaaaaaaaaaaaaaaaaaaaaaaaaaaaaaaaaaaaaaaaaaaaa

SEQ ID NO: 12661 - RNA, 5785 nt, synthetic construct
  source 1..5785: mol_type = other RNA
aggaaataagagagaaaagaagagtaagaagaaatataagagccaccatggcccctaagaagaagcgtaaagtgagccggatggaacgcctcgtctacgaggtgcggcagaagtgcagaaacatcgaggacatctgcatctcctgcggatctctgaacgtgaccctggagcacccactgttcatcggcggcatgtgccagaactgtaaaaactgttttctggagtgtgcctatcaatacgacgatgacggctaccagagctactgcaccatctgttgcggcggaagagaggtgctgatgtgtggaaataacaactgctgccggtgcttctgcgtggaatgcgtggacctgctggtgggccccggcgccgcccaggccgctattaaggaagatccttggaactgctacatgtgcggccacaagggcacatacggcctgctgagacggagagaggactggcctagcagactgcagatgttcttcgccaataaccacgaccaggagttcgacccccctaaggtgtaccctcccgtccccgccgagaagagaaagcccatccgggtcctgagcctgttcgatggcatcgccaccggtctgctggtgctgaaggacctgggcatccaggtggataggtacattgcctccgaggtgtgcgaggactccatcaccgtgggaatggtgcgtcatcagggcaagatcatgtacgtgggcgacgtgcggagcgtgacacagaagcatatccaggagtggggccctttcgacctggtgatcggcggcagcccttgcaatgacctgagcatcgtgaacccagcccggaagggcctgtacgagggaaccggcagactgttcttcgagttttacagactgctgcacgacgcccggcctaaggaaggcgacgaccggcccttcttttggctgttcgagaatgtggtggccatgggagtcagcgacaagcgggatattagccggttcctggagagcaaccccgtgatgatcgatgccaaggaagtgagcgccgcccaccgggccagatacttctggggcaatctgcctggcatgaacagacccctggccagcaccgtgaacgacaagctggagctgcaggagtgcctggagcacggccggatcgccaagttcagcaaggtgagaaccatcaccacccgaagcaacagcatcaaacaaggcaaggaccagcactttcctgtgttcatgaacgagaaggaggacatcctgtggtgtaccgagatggagagagtgttcgggttcccagtccactacacagatgtcagcaacatgtctagactggccagacagagactgctgggaagaagctggtccgtccctgtgatcagacacctgttcgcccctctgaaggagtacttcgcctgcgtgagcagcggcaacagcaacgccaacagccggggccccagcttctctagcggcctggtgccactgtccctgagagggagccacatgggccccatggagatctacaaaaccgtgagcgcctggaagcggcagcctgtgcgcgtgctgagcctgtttcggaatatcgataaagtcctgaaaagcctgggattcctggagagcggctctggctccggcggtggcaccctgaagtacgtggaggatgtgacaaacgtggtcagacgggatgtggagaagtggggccccttcgatctggtgtacggcagcacccaacccctgggcagctcttgtgaccggtgccctggctggtacatgtttcagttccaccggatcctgcagtacgccctgccgagacaggagtcccagcggccattcttttggattttcatggacaacttgctgctgaccgaggatgaccaggaaactaccactcggttcctgcagaccgaagccgtgaccctgcaggacgtgagaggccgggactaccagaacgccatgcgggtgtggtccaacatccctggactgaaaagcaagcacgcacctctgacccctaaagaagaggagtacctgcaggcccaggtgcggagcagaagcaagctggacgcccctaaggtggatctgctggtgaagaattgcctcctgcccctgagagagtacttcaagtatttcagccagaatagtctgcccctgggaggcagcggcggcggcttccaggagaccgtgaccttcaaggacgtggccgtggtgttcagcgaggaggagctgggcctgctggacagcacccagaggaagctgtacagggacgtgatgctggagaacttcaggaacctggtgagcgtgggccacagcagcagcaagcccgacatgatcagccagctggagagggaggagaagctgtgcatgaaggagatccacaccgagaggggcaggcacagcggcggcaggaaccagggcggcccaagcagcggcgcccctcctcccagcggcggcagcccagccggctccccaacctctaccgaggagggcacctctgagtccgccacccccgagagcggccctggcacctccaccgagcccagcgagggcagcgcacccggcagccctgccggcagccccacctccacagaggagggaaccagcaccgagcccagcgaaggcagcgccccaggcaccagcaccgagcctagtgagcaggagattaaacggatcaacaagatcagaagaagacttgtgaaagacagcaacaccaagaaggccggcaagacaggccccatgaaaaccctgctggttagagtgatgacacccgatctgagagagcggctggaaaacctgagaaagaagcctgaaaatatcccccagcccatcagcaatacatctagagccaacctgaataagctgctgaccgattacaccgaaatgaagaaggcgatcctgcatgtgtactgggaagagttccagaaggaccctgtgggcctgatgagccgggtggcccagcctgccagcaagaagatcgatcagaacaagctgaaacctgagatggacgagaagggcaacctgaccaccgccggctttgcctgctctcagtgtggccagcccctgttcgtgtacaagctggagcaggtgtctgagaagggcaaggcttacaccaactacttcggacggtgcaatgtggccgagcacgaaaagctgatcctgctggcccagctgaagcccgagaaggatagcgacgaagccgtgacatatagcctgggaaagtttgggcagagggccctggatttctacagcattcatgtgaccaaggagtccacccaccccgtgaagcccctggcccagatcgccggaaacagatacgcctccggacctgtgggaaaggccctgagcgacgcatgtatgggcacaatcgcctccttcctgtctaagtaccaggacatcatcatcgaacaccagaaggtggtgaagggcaaccagaagagactggagagcctgcgggagctggccggcaaggaaaacctggaataccctagcgtgaccctgccacctcagcctcacaccaaggagggcgttgatgcctacaacgaagtgatcgcccgggtgcgaatgtgggtgaacctgaacctgtggcagaagctgaagctaagcagagatgatgccaagcctctgctgagactgaagggattcccttcctttcctctggtcgagagacaggccaacgaagtggactggtgggacatggtgtgtaacgtgaagaagctgatcaacgagaaaaaggaggatggcaaggtgttttggcagaatctggctggctacaagagacaggaagccctgagaccatacctgagcagcgaggaagatcggaagaagggaaagaaattcgctcggtaccagctgggcgacctgctgctgcacctggaaaagaagcacggcgaggactggggaaaggtgtacgacgaggcctgggagcggattgacaagaaagtggaaggcctgagcaagcacatcaagctggaagaggaacggagaagcgaggacgcccagagcaaggccgccctgaccgactggctgcgggctaaggccagcttcgtgatcgagggcctgaaggaggccgacaaggacgagttctgcagatgcgagctgaagctgcagaagtggtacggggacctgcggggaaagcccttcgccatcgaagccgagaacagcatcctggacatcagcggcttcagcaagcagtacaactgtgccttcatctggcagaaggacggcgtgaagaagctgaacctgtacctgatcatcaactacttcaagggcggcaagctgcggttcaagaagatcaaacctgaagccttcgaagccaacagattctacaccgtgatcaacaaaaagagcggcgagatcgtgcccatggaggtgaacttcaacttcgacgaccccaacctgatcatcctgcctctggcctttggcaagagacagggcagagaattcatctggaacgacctgctgtccctggaaaccggcagcctgaagctggccaacggaagagtgatcgagaagacactgtacaacagaagaacccggcaggatgagcctgccctgttcgtggccctgaccttcgagcggcgggaggtcctggactcctccaatatcaaaccaatgaacctgatcggcgtggcaagaggcgaaaacatccccgccgtgatcgccctgaccgaccccgagggctgcccactgagccggtttaaggatagcctgggaaacccaacccacatcctgagaatcggcgagagctataaggagaagcagcggaccatccaggccaagaaggaggtggagcagcggagagccggcggctacagccggaagtacgccagcaaagccaagaatctggcagacgatatggtgagaaacaccgctagagatctgctgtactacgccgtgacccaggatgccatgctgatcttcgccaacctgagccggggcttcggccggcagggcaagcggaccttcatggccgagagacagtacacacggatggaggactggctgaccgccaagctggcctacgagggcctgagcaagacctacctgtccaagacactggcccagtacacctccaagacatgcagcaactgtgggtttaccatcaccagcgccgactacgacagggtgctggagaagctgaagaagacagcaacaggctggatgaccacaattaacggcaaggagctgaaggtggagggccagattacctactacaacagatacaagagacagaacgtagtcaaggacctgtccgtcgagctggatagactgagcgaagaatctgtgaacaacgacatctcctcctggacaaagggcagaagcggagaagctctgagcctcctgaagaaaagattctcccatagacccgtgcaggagaagttcgtgtgcctgaactgcggcttcgagacacacgcagccgagcaagccgccctgaacatcgccagatcctggctgttcctgcggagccaggagtacaagaaataccagacaaacaagacaaccggcaacaccgataagagagccttcgtcgagacctggcagtccttttaccggaagaagcttaaggaggtgtggaaacctgccgtgcggtctggcggatctggcggaggctccaccagccccaagaaaaagagaaaagtctaagctgccttctgcggggcttgccttctggccatgcccttcttctctcccttgcacctgtacctcttggtctttgaataaagcctgagtaggaaggctagcaaaaaaaaaaaaaaaaaaaaaaaaaaaaaaaaaaaaaaaaaaaaaaaaaaaaaaaaaaaaaaaaaaaaaaaaaaaaaaaa

SEQ ID NO: 12662 - RNA, 5785 nt, synthetic construct
  source 1..5785: mol_type = other RNA
aggaaataagagagaaaagaagagtaagaagaaatataagagccaccatggcccctaagaagaagcgtaaagtgagccggatggaacgcctcgtctacgaggtgcggcagaagtgcagaaacatcgaggacatctgcatctcctgcggatctctgaacgtgaccctggagcacccactgttcatcggcggcatgtgccagaactgtaaaaactgttttctggagtgtgcctatcaatacgacgatgacggctaccagagctactgcaccatctgttgcggcggaagagaggtgctgatgtgtggaaataacaactgctgccggtgcttctgcgtggaatgcgtggacctgctggtgggccccggcgccgcccaggccgctattaaggaagatccttggaactgctacatgtgcggccacaagggcacatacggcctgctgagacggagagaggactggcctagcagactgcagatgttcttcgccaataaccacgaccaggagttcgacccccctaaggtgtaccctcccgtccccgccgagaagagaaagcccatccgggtcctgagcctgttcgatggcatcgccaccggtctgctggtgctgaaggacctgggcatccaggtggataggtacattgcctccgaggtgtgcgaggactccatcaccgtgggaatggtgcgtcatcagggcaagatcatgtacgtgggcgacgtgcggagcgtgacacagaagcatatccaggagtggggccctttcgacctggtgatcggcggcagcccttgcaatgacctgagcatcgtgaacccagcccggaagggcctgtacgagggaaccggcagactgttcttcgagttttacagactgctgcacgacgcccggcctaaggaaggcgacgaccggcccttcttttggctgttcgagaatgtggtggccatgggagtcagcgacaagcgggatattagccggttcctggagagcaaccccgtgatgatcgatgccaaggaagtgagcgccgcccaccgggccagatacttctggggcaatctgcctggcatgaacagacccctggccagcaccgtgaacgacaagctggagctgcaggagtgcctggagcacggccggatcgccaagttcagcaaggtgagaaccatcaccacccgaagcaacagcatcaaacaaggcaaggaccagcactttcctgtgttcatgaacgagaaggaggacatcctgtggtgtaccgagatggagagagtgttcgggttcccagtccactacacagatgtcagcaacatgtctagactggccagacagagactgctgggaagaagctggtccgtccctgtgatcagacacctgttcgcccctctgaaggagtacttcgcctgcgtgagcagcggcaacagcaacgccaacagccggggccccagcttctctagcggcctggtgccactgtccctgagagggagccacatgggccccatggagatctacaaaaccgtgagcgcctggaagcggcagcctgtgcgcgtgctgagcctgtttcggaatatcgataaagtcctgaaaagcctgggattcctggagagcggctctggctccggcggtggcaccctgaagtacgtggaggatgtgacaaacgtggtcagacgggatgtggagaagtggggccccttcgatctggtgtacggcagcacccaacccctgggcagctcttgtgaccggtgccctggctggtacatgtttcagttccaccggatcctgcagtacgccctgccgagacaggagtcccagcggccattcttttggattttcatggacaacttgctgctgaccgaggatgaccaggaaactaccactcggttcctgcagaccgaagccgtgaccctgcaggacgtgagaggccgggactaccagaacgccatgcgggtgtggtccaacatccctggactgaaaagcaagcacgcacctctgacccctaaagaagaggagtacctgcaggcccaggtgcggagcagaagcaagctggacgcccctaaggtggatctgctggtgaagaattgcctcctgcccctgagagagtacttcaagtatttcagccagaatagtctgcccctgggaggcagcggcggcggctaccagatccccgtgagcttcaaggacgtggtggtgggcttcacccaggaggagtggcacaggctgagccccgcccagagggccctgtacagggacgtgatgctggagacctacagcaacctggtgagcgtgggctacgagggcaccaagcccgacgtgatcctgaggctggagcaggaggaggccccctggatcggcgaggccgcctgccccggctgccactgctgggaggacatctggaggggcggcccaagcagcggcgcccctcctcccagcggcggcagcccagccggctccccaacctctaccgaggagggcacctctgagtccgccacccccgagagcggccctggcacctccaccgagcccagcgagggcagcgcacccggcagccctgccggcagccccacctccacagaggagggaaccagcaccgagcccagcgaaggcagcgccccaggcaccagcaccgagcctagtgagcaggagattaaacggatcaacaagatcagaagaagacttgtgaaagacagcaacaccaagaaggccggcaagacaggccccatgaaaaccctgctggttagagtgatgacacccgatctgagagagcggctggaaaacctgagaaagaagcctgaaaatatcccccagcccatcagcaatacatctagagccaacctgaataagctgctgaccgattacaccgaaatgaagaaggcgatcctgcatgtgtactgggaagagttccagaaggaccctgtgggcctgatgagccgggtggcccagcctgccagcaagaagatcgatcagaacaagctgaaacctgagatggacgagaagggcaacctgaccaccgccggctttgcctgctctcagtgtggccagcccctgttcgtgtacaagctggagcaggtgtctgagaagggcaaggcttacaccaactacttcggacggtgcaatgtggccgagcacgaaaagctgatcctgctggcccagctgaagcccgagaaggatagcgacgaagccgtgacatatagcctgggaaagtttgggcagagggccctggatttctacagcattcatgtgaccaaggagtccacccaccccgtgaagcccctggcccagatcgccggaaacagatacgcctccggacctgtgggaaaggccctgagcgacgcatgtatgggcacaatcgcctccttcctgtctaagtaccaggacatcatcatcgaacaccagaaggtggtgaagggcaaccagaagagactggagagcctgcgggagctggccggcaaggaaaacctggaataccctagcgtgaccctgccacctcagcctcacaccaaggagggcgttgatgcctacaacgaagtgatcgcccgggtgcgaatgtgggtgaacctgaacctgtggcagaagctgaagctaagcagagatgatgccaagcctctgctgagactgaagggattcccttcctttcctctggtcgagagacaggccaacgaagtggactggtgggacatggtgtgtaacgtgaagaagctgatcaacgagaaaaaggaggatggcaaggtgttttggcagaatctggctggctacaagagacaggaagccctgagaccatacctgagcagcgaggaagatcggaagaagggaaagaaattcgctcggtaccagctgggcgacctgctgctgcacctggaaaagaagcacggcgaggactggggaaaggtgtacgacgaggcctgggagcggattgacaagaaagtggaaggcctgagcaagcacatcaagctggaagaggaacggagaagcgaggacgcccagagcaaggccgccctgaccgactggctgcgggctaaggccagcttcgtgatcgagggcctgaaggaggccgacaaggacgagttctgcagatgcgagctgaagctgcagaagtggtacggggacctgcggggaaagcccttcgccatcgaagccgagaacagcatcctggacatcagcggcttcagcaagcagtacaactgtgccttcatctggcagaaggacggcgtgaagaagctgaacctgtacctgatcatcaactacttcaagggcggcaagctgcggttcaagaagatcaaacctgaagccttcgaagccaacagattctacaccgtgatcaacaaaaagagcggcgagatcgtgcccatggaggtgaacttcaacttcgacgaccccaacctgatcatcctgcctctggcctttggcaagagacagggcagagaattcatctggaacgacctgctgtccctggaaaccggcagcctgaagctggccaacggaagagtgatcgagaagacactgtacaacagaagaacccggcaggatgagcctgccctgttcgtggccctgaccttcgagcggcgggaggtcctggactcctccaatatcaaaccaatgaacctgatcggcgtggcaagaggcgaaaacatccccgccgtgatcgccctgaccgaccccgagggctgcccactgagccggtttaaggatagcctgggaaacccaacccacatcctgagaatcggcgagagctataaggagaagcagcggaccatccaggccaagaaggaggtggagcagcggagagccggcggctacagccggaagtacgccagcaaagccaagaatctggcagacgatatggtgagaaacaccgctagagatctgctgtactacgccgtgacccaggatgccatgctgatcttcgccaacctgagccggggcttcggccggcagggcaagcggaccttcatggccgagagacagtacacacggatggaggactggctgaccgccaagctggcctacgagggcctgagcaagacctacctgtccaagacactggcccagtacacctccaagacatgcagcaactgtgggtttaccatcaccagcgccgactacgacagggtgctggagaagctgaagaagacagcaacaggctggatgaccacaattaacggcaaggagctgaaggtggagggccagattacctactacaacagatacaagagacagaacgtagtcaaggacctgtccgtcgagctggatagactgagcgaagaatctgtgaacaacgacatctcctcctggacaaagggcagaagcggagaagctctgagcctcctgaagaaaagattctcccatagacccgtgcaggagaagttcgtgtgcctgaactgcggcttcgagacacacgcagccgagcaagccgccctgaacatcgccagatcctggctgttcctgcggagccaggagtacaagaaataccagacaaacaagacaaccggcaacaccgataagagagccttcgtcgagacctggcagtccttttaccggaagaagcttaaggaggtgtggaaacctgccgtgcggtctggcggatctggcggaggctccaccagccccaagaaaaagagaaaagtctaagctgccttctgcggggcttgccttctggccatgcccttcttctctcccttgcacctgtacctcttggtctttgaataaagcctgagtaggaaggctagcaaaaaaaaaaaaaaaaaaaaaaaaaaaaaaaaaaaaaaaaaaaaaaaaaaaaaaaaaaaaaaaaaaaaaaaaaaaaaaaa

SEQ ID NO: 12663 - RNA, 5785 nt, synthetic construct
  source 1..5785: mol_type = other RNA
aggaaataagagagaaaagaagagtaagaagaaatataagagccaccatggcccctaagaagaagcgtaaagtgagccggatggaacgcctcgtctacgaggtgcggcagaagtgcagaaacatcgaggacatctgcatctcctgcggatctctgaacgtgaccctggagcacccactgttcatcggcggcatgtgccagaactgtaaaaactgttttctggagtgtgcctatcaatacgacgatgacggctaccagagctactgcaccatctgttgcggcggaagagaggtgctgatgtgtggaaataacaactgctgccggtgcttctgcgtggaatgcgtggacctgctggtgggccccggcgccgcccaggccgctattaaggaagatccttggaactgctacatgtgcggccacaagggcacatacggcctgctgagacggagagaggactggcctagcagactgcagatgttcttcgccaataaccacgaccaggagttcgacccccctaaggtgtaccctcccgtccccgccgagaagagaaagcccatccgggtcctgagcctgttcgatggcatcgccaccggtctgctggtgctgaaggacctgggcatccaggtggataggtacattgcctccgaggtgtgcgaggactccatcaccgtgggaatggtgcgtcatcagggcaagatcatgtacgtgggcgacgtgcggagcgtgacacagaagcatatccaggagtggggccctttcgacctggtgatcggcggcagcccttgcaatgacctgagcatcgtgaacccagcccggaagggcctgtacgagggaaccggcagactgttcttcgagttttacagactgctgcacgacgcccggcctaaggaaggcgacgaccggcccttcttttggctgttcgagaatgtggtggccatgggagtcagcgacaagcgggatattagccggttcctggagagcaaccccgtgatgatcgatgccaaggaagtgagcgccgcccaccgggccagatacttctggggcaatctgcctggcatgaacagacccctggccagcaccgtgaacgacaagctggagctgcaggagtgcctggagcacggccggatcgccaagttcagcaaggtgagaaccatcaccacccgaagcaacagcatcaaacaaggcaaggaccagcactttcctgtgttcatgaacgagaaggaggacatcctgtggtgtaccgagatggagagagtgttcgggttcccagtccactacacagatgtcagcaacatgtctagactggccagacagagactgctgggaagaagctggtccgtccctgtgatcagacacctgttcgcccctctgaaggagtacttcgcctgcgtgagcagcggcaacagcaacgccaacagccggggccccagcttctctagcggcctggtgccactgtccctgagagggagccacatgggccccatggagatctacaaaaccgtgagcgcctggaagcggcagcctgtgcgcgtgctgagcctgtttcggaatatcgataaagtcctgaaaagcctgggattcctggagagcggctctggctccggcggtggcaccctgaagtacgtggaggatgtgacaaacgtggtcagacgggatgtggagaagtggggccccttcgatctggtgtacggcagcacccaacccctgggcagctcttgtgaccggtgccctggctggtacatgtttcagttccaccggatcctgcagtacgccctgccgagacaggagtcccagcggccattcttttggattttcatggacaacttgctgctgaccgaggatgaccaggaaactaccactcggttcctgcagaccgaagccgtgaccctgcaggacgtgagaggccgggactaccagaacgccatgcgggtgtggtccaacatccctggactgaaaagcaagcacgcacctctgacccctaaagaagaggagtacctgcaggcccaggtgcggagcagaagcaagctggacgcccctaaggtggatctgctggtgaagaattgcctcctgcccctgagagagtacttcaagtatttcagccagaatagtctgcccctgggaggcagcggcggcggcagccagagcctggtgaccttcggcgacgtggccgtggacttcagcagggaggagtgggagtggctgagcagcgcccagaggaccctgtacaggaccgtgatgctggagaactacaggaacctggtgagcctgggcctgtgcatcagcaagcccgacatgatcagcagcctggagcagaggaaggagccctggatggccaagaggaagctgaccaggggcaggtgccccgacctgaagatcgtgggcggcccaagcagcggcgcccctcctcccagcggcggcagcccagccggctccccaacctctaccgaggagggcacctctgagtccgccacccccgagagcggccctggcacctccaccgagcccagcgagggcagcgcacccggcagccctgccggcagccccacctccacagaggagggaaccagcaccgagcccagcgaaggcagcgccccaggcaccagcaccgagcctagtgagcaggagattaaacggatcaacaagatcagaagaagacttgtgaaagacagcaacaccaagaaggccggcaagacaggccccatgaaaaccctgctggttagagtgatgacacccgatctgagagagcggctggaaaacctgagaaagaagcctgaaaatatcccccagcccatcagcaatacatctagagccaacctgaataagctgctgaccgattacaccgaaatgaagaaggcgatcctgcatgtgtactgggaagagttccagaaggaccctgtgggcctgatgagccgggtggcccagcctgccagcaagaagatcgatcagaacaagctgaaacctgagatggacgagaagggcaacctgaccaccgccggctttgcctgctctcagtgtggccagcccctgttcgtgtacaagctggagcaggtgtctgagaagggcaaggcttacaccaactacttcggacggtgcaatgtggccgagcacgaaaagctgatcctgctggcccagctgaagcccgagaaggatagcgacgaagccgtgacatatagcctgggaaagtttgggcagagggccctggatttctacagcattcatgtgaccaaggagtccacccaccccgtgaagcccctggcccagatcgccggaaacagatacgcctccggacctgtgggaaaggccctgagcgacgcatgtatgggcacaatcgcctccttcctgtctaagtaccaggacatcatcatcgaacaccagaaggtggtgaagggcaaccagaagagactggagagcctgcgggagctggccggcaaggaaaacctggaataccctagcgtgaccctgccacctcagcctcacaccaaggagggcgttgatgcctacaacgaagtgatcgcccgggtgcgaatgtgggtgaacctgaacctgtggcagaagctgaagctaagcagagatgatgccaagcctctgctgagactgaagggattcccttcctttcctctggtcgagagacaggccaacgaagtggactggtgggacatggtgtgtaacgtgaagaagctgatcaacgagaaaaaggaggatggcaaggtgttttggcagaatctggctggctacaagagacaggaagccctgagaccatacctgagcagcgaggaagatcggaagaagggaaagaaattcgctcggtaccagctgggcgacctgctgctgcacctggaaaagaagcacggcgaggactggggaaaggtgtacgacgaggcctgggagcggattgacaagaaagtggaaggcctgagcaagcacatcaagctggaagaggaacggagaagcgaggacgcccagagcaaggccgccctgaccgactggctgcgggctaaggccagcttcgtgatcgagggcctgaaggaggccgacaaggacgagttctgcagatgcgagctgaagctgcagaagtggtacggggacctgcggggaaagcccttcgccatcgaagccgagaacagcatcctggacatcagcggcttcagcaagcagtacaactgtgccttcatctggcagaaggacggcgtgaagaagctgaacctgtacctgatcatcaactacttcaagggcggcaagctgcggttcaagaagatcaaacctgaagccttcgaagccaacagattctacaccgtgatcaacaaaaagagcggcgagatcgtgcccatggaggtgaacttcaacttcgacgaccccaacctgatcatcctgcctctggcctttggcaagagacagggcagagaattcatctggaacgacctgctgtccctggaaaccggcagcctgaagctggccaacggaagagtgatcgagaagacactgtacaacagaagaacccggcaggatgagcctgccctgttcgtggccctgaccttcgagcggcgggaggtcctggactcctccaatatcaaaccaatgaacctgatcggcgtggcaagaggcgaaaacatccccgccgtgatcgccctgaccgaccccgagggctgcccactgagccggtttaaggatagcctgggaaacccaacccacatcctgagaatcggcgagagctataaggagaagcagcggaccatccaggccaagaaggaggtggagcagcggagagccggcggctacagccggaagtacgccagcaaagccaagaatctggcagacgatatggtgagaaacaccgctagagatctgctgtactacgccgtgacccaggatgccatgctgatcttcgccaacctgagccggggcttcggccggcagggcaagcggaccttcatggccgagagacagtacacacggatggaggactggctgaccgccaagctggcctacgagggcctgagcaagacctacctgtccaagacactggcccagtacacctccaagacatgcagcaactgtgggtttaccatcaccagcgccgactacgacagggtgctggagaagctgaagaagacagcaacaggctggatgaccacaattaacggcaaggagctgaaggtggagggccagattacctactacaacagatacaagagacagaacgtagtcaaggacctgtccgtcgagctggatagactgagcgaagaatctgtgaacaacgacatctcctcctggacaaagggcagaagcggagaagctctgagcctcctgaagaaaagattctcccatagacccgtgcaggagaagttcgtgtgcctgaactgcggcttcgagacacacgcagccgagcaagccgccctgaacatcgccagatcctggctgttcctgcggagccaggagtacaagaaataccagacaaacaagacaaccggcaacaccgataagagagccttcgtcgagacctggcagtccttttaccggaagaagcttaaggaggtgtggaaacctgccgtgcggtctggcggatctggcggaggctccaccagccccaagaaaaagagaaaagtctaagctgccttctgcggggcttgccttctggccatgcccttcttctctcccttgcacctgtacctcttggtctttgaataaagcctgagtaggaaggctagcaaaaaaaaaaaaaaaaaaaaaaaaaaaaaaaaaaaaaaaaaaaaaaaaaaaaaaaaaaaaaaaaaaaaaaaaaaaaaaaa

SEQ ID NO: 12664 - RNA, 5785 nt, synthetic construct
  source 1..5785: mol_type = other RNA
aggaaataagagagaaaagaagagtaagaagaaatataagagccaccatggcccctaagaagaagcgtaaagtgagccggatggaacgcctcgtctacgaggtgcggcagaagtgcagaaacatcgaggacatctgcatctcctgcggatctctgaacgtgaccctggagcacccactgttcatcggcggcatgtgccagaactgtaaaaactgttttctggagtgtgcctatcaatacgacgatgacggctaccagagctactgcaccatctgttgcggcggaagagaggtgctgatgtgtggaaataacaactgctgccggtgcttctgcgtggaatgcgtggacctgctggtgggccccggcgccgcccaggccgctattaaggaagatccttggaactgctacatgtgcggccacaagggcacatacggcctgctgagacggagagaggactggcctagcagactgcagatgttcttcgccaataaccacgaccaggagttcgacccccctaaggtgtaccctcccgtccccgccgagaagagaaagcccatccgggtcctgagcctgttcgatggcatcgccaccggtctgctggtgctgaaggacctgggcatccaggtggataggtacattgcctccgaggtgtgcgaggactccatcaccgtgggaatggtgcgtcatcagggcaagatcatgtacgtgggcgacgtgcggagcgtgacacagaagcatatccaggagtggggccctttcgacctggtgatcggcggcagcccttgcaatgacctgagcatcgtgaacccagcccggaagggcctgtacgagggaaccggcagactgttcttcgagttttacagactgctgcacgacgcccggcctaaggaaggcgacgaccggcccttcttttggctgttcgagaatgtggtggccatgggagtcagcgacaagcgggatattagccggttcctggagagcaaccccgtgatgatcgatgccaaggaagtgagcgccgcccaccgggccagatacttctggggcaatctgcctggcatgaacagacccctggccagcaccgtgaacgacaagctggagctgcaggagtgcctggagcacggccggatcgccaagttcagcaaggtgagaaccatcaccacccgaagcaacagcatcaaacaaggcaaggaccagcactttcctgtgttcatgaacgagaaggaggacatcctgtggtgtaccgagatggagagagtgttcgggttcccagtccactacacagatgtcagcaacatgtctagactggccagacagagactgctgggaagaagctggtccgtccctgtgatcagacacctgttcgcccctctgaaggagtacttcgcctgcgtgagcagcggcaacagcaacgccaacagccggggccccagcttctctagcggcctggtgccactgtccctgagagggagccacatgggccccatggagatctacaaaaccgtgagcgcctggaagcggcagcctgtgcgcgtgctgagcctgtttcggaatatcgataaagtcctgaaaagcctgggattcctggagagcggctctggctccggcggtggcaccctgaagtacgtggaggatgtgacaaacgtggtcagacgggatgtggagaagtggggccccttcgatctggtgtacggcagcacccaacccctgggcagctcttgtgaccggtgccctggctggtacatgtttcagttccaccggatcctgcagtacgccctgccgagacaggagtcccagcggccattcttttggattttcatggacaacttgctgctgaccgaggatgaccaggaaactaccactcggttcctgcagaccgaagccgtgaccctgcaggacgtgagaggccgggactaccagaacgccatgcgggtgtggtccaacatccctggactgaaaagcaagcacgcacctctgacccctaaagaagaggagtacctgcaggcccaggtgcggagcagaagcaagctggacgcccctaaggtggatctgctggtgaagaattgcctcctgcccctgagagagtacttcaagtatttcagccagaatagtctgcccctgggaggcagcggcggcggcatgatgcaggcccaggagagcctgaccctggaggacgtggccgtggacttcacctgggaggagtggcagctgctgagccccgcccagaaggacctgtacagggacgtgatgctggagaactacagcaacctggtgagcgtgggctaccaggccagcaagcccgacgccttcagcaagctggagaggggcgaggagacctgcaccaccgaggacgagatctacagcaggatctgcagcgagatcggcggcccaagcagcggcgcccctcctcccagcggcggcagcccagccggctccccaacctctaccgaggagggcacctctgagtccgccacccccgagagcggccctggcacctccaccgagcccagcgagggcagcgcacccggcagccctgccggcagccccacctccacagaggagggaaccagcaccgagcccagcgaaggcagcgccccaggcaccagcaccgagcctagtgagcaggagattaaacggatcaacaagatcagaagaagacttgtgaaagacagcaacaccaagaaggccggcaagacaggccccatgaaaaccctgctggttagagtgatgacacccgatctgagagagcggctggaaaacctgagaaagaagcctgaaaatatcccccagcccatcagcaatacatctagagccaacctgaataagctgctgaccgattacaccgaaatgaagaaggcgatcctgcatgtgtactgggaagagttccagaaggaccctgtgggcctgatgagccgggtggcccagcctgccagcaagaagatcgatcagaacaagctgaaacctgagatggacgagaagggcaacctgaccaccgccggctttgcctgctctcagtgtggccagcccctgttcgtgtacaagctggagcaggtgtctgagaagggcaaggcttacaccaactacttcggacggtgcaatgtggccgagcacgaaaagctgatcctgctggcccagctgaagcccgagaaggatagcgacgaagccgtgacatatagcctgggaaagtttgggcagagggccctggatttctacagcattcatgtgaccaaggagtccacccaccccgtgaagcccctggcccagatcgccggaaacagatacgcctccggacctgtgggaaaggccctgagcgacgcatgtatgggcacaatcgcctccttcctgtctaagtaccaggacatcatcatcgaacaccagaaggtggtgaagggcaaccagaagagactggagagcctgcgggagctggccggcaaggaaaacctggaataccctagcgtgaccctgccacctcagcctcacaccaaggagggcgttgatgcctacaacgaagtgatcgcccgggtgcgaatgtgggtgaacctgaacctgtggcagaagctgaagctaagcagagatgatgccaagcctctgctgagactgaagggattcccttcctttcctctggtcgagagacaggccaacgaagtggactggtgggacatggtgtgtaacgtgaagaagctgatcaacgagaaaaaggaggatggcaaggtgttttggcagaatctggctggctacaagagacaggaagccctgagaccatacctgagcagcgaggaagatcggaagaagggaaagaaattcgctcggtaccagctgggcgacctgctgctgcacctggaaaagaagcacggcgaggactggggaaaggtgtacgacgaggcctgggagcggattgacaagaaagtggaaggcctgagcaagcacatcaagctggaagaggaacggagaagcgaggacgcccagagcaaggccgccctgaccgactggctgcgggctaaggccagcttcgtgatcgagggcctgaaggaggccgacaaggacgagttctgcagatgcgagctgaagctgcagaagtggtacggggacctgcggggaaagcccttcgccatcgaagccgagaacagcatcctggacatcagcggcttcagcaagcagtacaactgtgccttcatctggcagaaggacggcgtgaagaagctgaacctgtacctgatcatcaactacttcaagggcggcaagctgcggttcaagaagatcaaacctgaagccttcgaagccaacagattctacaccgtgatcaacaaaaagagcggcgagatcgtgcccatggaggtgaacttcaacttcgacgaccccaacctgatcatcctgcctctggcctttggcaagagacagggcagagaattcatctggaacgacctgctgtccctggaaaccggcagcctgaagctggccaacggaagagtgatcgagaagacactgtacaacagaagaacccggcaggatgagcctgccctgttcgtggccctgaccttcgagcggcgggaggtcctggactcctccaatatcaaaccaatgaacctgatcggcgtggcaagaggcgaaaacatccccgccgtgatcgccctgaccgaccccgagggctgcccactgagccggtttaaggatagcctgggaaacccaacccacatcctgagaatcggcgagagctataaggagaagcagcggaccatccaggccaagaaggaggtggagcagcggagagccggcggctacagccggaagtacgccagcaaagccaagaatctggcagacgatatggtgagaaacaccgctagagatctgctgtactacgccgtgacccaggatgccatgctgatcttcgccaacctgagccggggcttcggccggcagggcaagcggaccttcatggccgagagacagtacacacggatggaggactggctgaccgccaagctggcctacgagggcctgagcaagacctacctgtccaagacactggcccagtacacctccaagacatgcagcaactgtgggtttaccatcaccagcgccgactacgacagggtgctggagaagctgaagaagacagcaacaggctggatgaccacaattaacggcaaggagctgaaggtggagggccagattacctactacaacagatacaagagacagaacgtagtcaaggacctgtccgtcgagctggatagactgagcgaagaatctgtgaacaacgacatctcctcctggacaaagggcagaagcggagaagctctgagcctcctgaagaaaagattctcccatagacccgtgcaggagaagttcgtgtgcctgaactgcggcttcgagacacacgcagccgagcaagccgccctgaacatcgccagatcctggctgttcctgcggagccaggagtacaagaaataccagacaaacaagacaaccggcaacaccgataagagagccttcgtcgagacctggcagtccttttaccggaagaagcttaaggaggtgtggaaacctgccgtgcggtctggcggatctggcggaggctccaccagccccaagaaaaagagaaaagtctaagctgccttctgcggggcttgccttctggccatgcccttcttctctcccttgcacctgtacctcttggtctttgaataaagcctgagtaggaaggctagcaaaaaaaaaaaaaaaaaaaaaaaaaaaaaaaaaaaaaaaaaaaaaaaaaaaaaaaaaaaaaaaaaaaaaaaaaaaaaaaa

SEQ ID NO: 12665 - RNA, 5785 nt, synthetic construct
  source 1..5785: mol_type = other RNA
aggaaataagagagaaaagaagagtaagaagaaatataagagccaccatggcccctaagaagaagcgtaaagtgagccggatggaacgcctcgtctacgaggtgcggcagaagtgcagaaacatcgaggacatctgcatctcctgcggatctctgaacgtgaccctggagcacccactgttcatcggcggcatgtgccagaactgtaaaaactgttttctggagtgtgcctatcaatacgacgatgacggctaccagagctactgcaccatctgttgcggcggaagagaggtgctgatgtgtggaaataacaactgctgccggtgcttctgcgtggaatgcgtggacctgctggtgggccccggcgccgcccaggccgctattaaggaagatccttggaactgctacatgtgcggccacaagggcacatacggcctgctgagacggagagaggactggcctagcagactgcagatgttcttcgccaataaccacgaccaggagttcgacccccctaaggtgtaccctcccgtccccgccgagaagagaaagcccatccgggtcctgagcctgttcgatggcatcgccaccggtctgctggtgctgaaggacctgggcatccaggtggataggtacattgcctccgaggtgtgcgaggactccatcaccgtgggaatggtgcgtcatcagggcaagatcatgtacgtgggcgacgtgcggagcgtgacacagaagcatatccaggagtggggccctttcgacctggtgatcggcggcagcccttgcaatgacctgagcatcgtgaacccagcccggaagggcctgtacgagggaaccggcagactgttcttcgagttttacagactgctgcacgacgcccggcctaaggaaggcgacgaccggcccttcttttggctgttcgagaatgtggtggccatgggagtcagcgacaagcgggatattagccggttcctggagagcaaccccgtgatgatcgatgccaaggaagtgagcgccgcccaccgggccagatacttctggggcaatctgcctggcatgaacagacccctggccagcaccgtgaacgacaagctggagctgcaggagtgcctggagcacggccggatcgccaagttcagcaaggtgagaaccatcaccacccgaagcaacagcatcaaacaaggcaaggaccagcactttcctgtgttcatgaacgagaaggaggacatcctgtggtgtaccgagatggagagagtgttcgggttcccagtccactacacagatgtcagcaacatgtctagactggccagacagagactgctgggaagaagctggtccgtccctgtgatcagacacctgttcgcccctctgaaggagtacttcgcctgcgtgagcagcggcaacagcaacgccaacagccggggccccagcttctctagcggcctggtgccactgtccctgagagggagccacatgggccccatggagatctacaaaaccgtgagcgcctggaagcggcagcctgtgcgcgtgctgagcctgtttcggaatatcgataaagtcctgaaaagcctgggattcctggagagcggctctggctccggcggtggcaccctgaagtacgtggaggatgtgacaaacgtggtcagacgggatgtggagaagtggggccccttcgatctggtgtacggcagcacccaacccctgggcagctcttgtgaccggtgccctggctggtacatgtttcagttccaccggatcctgcagtacgccctgccgagacaggagtcccagcggccattcttttggattttcatggacaacttgctgctgaccgaggatgaccaggaaactaccactcggttcctgcagaccgaagccgtgaccctgcaggacgtgagaggccgggactaccagaacgccatgcgggtgtggtccaacatccctggactgaaaagcaagcacgcacctctgacccctaaagaagaggagtacctgcaggcccaggtgcggagcagaagcaagctggacgcccctaaggtggatctgctggtgaagaattgcctcctgcccctgagagagtacttcaagtatttcagccagaatagtctgcccctgggaggcagcggcggcggcagccaggagcccgtgaccttcgaggacgtggccgtgtacttcacccagaaccagtgggccagcctggaccccatgcagagggccctgtacctggaggtgatgctggagaactacgccaacatcaccagcctggccctgcccttccccaagcccgacctgatcctgcagctggagcagggcgaggccccctgggacctggacccctggacccccctggagggcgaggccctggagggcgtgcacggcggcccaagcagcggcgcccctcctcccagcggcggcagcccagccggctccccaacctctaccgaggagggcacctctgagtccgccacccccgagagcggccctggcacctccaccgagcccagcgagggcagcgcacccggcagccctgccggcagccccacctccacagaggagggaaccagcaccgagcccagcgaaggcagcgccccaggcaccagcaccgagcctagtgagcaggagattaaacggatcaacaagatcagaagaagacttgtgaaagacagcaacaccaagaaggccggcaagacaggccccatgaaaaccctgctggttagagtgatgacacccgatctgagagagcggctggaaaacctgagaaagaagcctgaaaatatcccccagcccatcagcaatacatctagagccaacctgaataagctgctgaccgattacaccgaaatgaagaaggcgatcctgcatgtgtactgggaagagttccagaaggaccctgtgggcctgatgagccgggtggcccagcctgccagcaagaagatcgatcagaacaagctgaaacctgagatggacgagaagggcaacctgaccaccgccggctttgcctgctctcagtgtggccagcccctgttcgtgtacaagctggagcaggtgtctgagaagggcaaggcttacaccaactacttcggacggtgcaatgtggccgagcacgaaaagctgatcctgctggcccagctgaagcccgagaaggatagcgacgaagccgtgacatatagcctgggaaagtttgggcagagggccctggatttctacagcattcatgtgaccaaggagtccacccaccccgtgaagcccctggcccagatcgccggaaacagatacgcctccggacctgtgggaaaggccctgagcgacgcatgtatgggcacaatcgcctccttcctgtctaagtaccaggacatcatcatcgaacaccagaaggtggtgaagggcaaccagaagagactggagagcctgcgggagctggccggcaaggaaaacctggaataccctagcgtgaccctgccacctcagcctcacaccaaggagggcgttgatgcctacaacgaagtgatcgcccgggtgcgaatgtgggtgaacctgaacctgtggcagaagctgaagctaagcagagatgatgccaagcctctgctgagactgaagggattcccttcctttcctctggtcgagagacaggccaacgaagtggactggtgggacatggtgtgtaacgtgaagaagctgatcaacgagaaaaaggaggatggcaaggtgttttggcagaatctggctggctacaagagacaggaagccctgagaccatacctgagcagcgaggaagatcggaagaagggaaagaaattcgctcggtaccagctgggcgacctgctgctgcacctggaaaagaagcacggcgaggactggggaaaggtgtacgacgaggcctgggagcggattgacaagaaagtggaaggcctgagcaagcacatcaagctggaagaggaacggagaagcgaggacgcccagagcaaggccgccctgaccgactggctgcgggctaaggccagcttcgtgatcgagggcctgaaggaggccgacaaggacgagttctgcagatgcgagctgaagctgcagaagtggtacggggacctgcggggaaagcccttcgccatcgaagccgagaacagcatcctggacatcagcggcttcagcaagcagtacaactgtgccttcatctggcagaaggacggcgtgaagaagctgaacctgtacctgatcatcaactacttcaagggcggcaagctgcggttcaagaagatcaaacctgaagccttcgaagccaacagattctacaccgtgatcaacaaaaagagcggcgagatcgtgcccatggaggtgaacttcaacttcgacgaccccaacctgatcatcctgcctctggcctttggcaagagacagggcagagaattcatctggaacgacctgctgtccctggaaaccggcagcctgaagctggccaacggaagagtgatcgagaagacactgtacaacagaagaacccggcaggatgagcctgccctgttcgtggccctgaccttcgagcggcgggaggtcctggactcctccaatatcaaaccaatgaacctgatcggcgtggcaagaggcgaaaacatccccgccgtgatcgccctgaccgaccccgagggctgcccactgagccggtttaaggatagcctgggaaacccaacccacatcctgagaatcggcgagagctataaggagaagcagcggaccatccaggccaagaaggaggtggagcagcggagagccggcggctacagccggaagtacgccagcaaagccaagaatctggcagacgatatggtgagaaacaccgctagagatctgctgtactacgccgtgacccaggatgccatgctgatcttcgccaacctgagccggggcttcggccggcagggcaagcggaccttcatggccgagagacagtacacacggatggaggactggctgaccgccaagctggcctacgagggcctgagcaagacctacctgtccaagacactggcccagtacacctccaagacatgcagcaactgtgggtttaccatcaccagcgccgactacgacagggtgctggagaagctgaagaagacagcaacaggctggatgaccacaattaacggcaaggagctgaaggtggagggccagattacctactacaacagatacaagagacagaacgtagtcaaggacctgtccgtcgagctggatagactgagcgaagaatctgtgaacaacgacatctcctcctggacaaagggcagaagcggagaagctctgagcctcctgaagaaaagattctcccatagacccgtgcaggagaagttcgtgtgcctgaactgcggcttcgagacacacgcagccgagcaagccgccctgaacatcgccagatcctggctgttcctgcggagccaggagtacaagaaataccagacaaacaagacaaccggcaacaccgataagagagccttcgtcgagacctggcagtccttttaccggaagaagcttaaggaggtgtggaaacctgccgtgcggtctggcggatctggcggaggctccaccagccccaagaaaaagagaaaagtctaagctgccttctgcggggcttgccttctggccatgcccttcttctctcccttgcacctgtacctcttggtctttgaataaagcctgagtaggaaggctagcaaaaaaaaaaaaaaaaaaaaaaaaaaaaaaaaaaaaaaaaaaaaaaaaaaaaaaaaaaaaaaaaaaaaaaaaaaaaaaaa

SEQ ID NO: 12666 - RNA, 5785 nt, synthetic construct
  source 1..5785: mol_type = other RNA
aggaaataagagagaaaagaagagtaagaagaaatataagagccaccatggcccctaagaagaagcgtaaagtgagccggatggaacgcctcgtctacgaggtgcggcagaagtgcagaaacatcgaggacatctgcatctcctgcggatctctgaacgtgaccctggagcacccactgttcatcggcggcatgtgccagaactgtaaaaactgttttctggagtgtgcctatcaatacgacgatgacggctaccagagctactgcaccatctgttgcggcggaagagaggtgctgatgtgtggaaataacaactgctgccggtgcttctgcgtggaatgcgtggacctgctggtgggccccggcgccgcccaggccgctattaaggaagatccttggaactgctacatgtgcggccacaagggcacatacggcctgctgagacggagagaggactggcctagcagactgcagatgttcttcgccaataaccacgaccaggagttcgacccccctaaggtgtaccctcccgtccccgccgagaagagaaagcccatccgggtcctgagcctgttcgatggcatcgccaccggtctgctggtgctgaaggacctgggcatccaggtggataggtacattgcctccgaggtgtgcgaggactccatcaccgtgggaatggtgcgtcatcagggcaagatcatgtacgtgggcgacgtgcggagcgtgacacagaagcatatccaggagtggggccctttcgacctggtgatcggcggcagcccttgcaatgacctgagcatcgtgaacccagcccggaagggcctgtacgagggaaccggcagactgttcttcgagttttacagactgctgcacgacgcccggcctaaggaaggcgacgaccggcccttcttttggctgttcgagaatgtggtggccatgggagtcagcgacaagcgggatattagccggttcctggagagcaaccccgtgatgatcgatgccaaggaagtgagcgccgcccaccgggccagatacttctggggcaatctgcctggcatgaacagacccctggccagcaccgtgaacgacaagctggagctgcaggagtgcctggagcacggccggatcgccaagttcagcaaggtgagaaccatcaccacccgaagcaacagcatcaaacaaggcaaggaccagcactttcctgtgttcatgaacgagaaggaggacatcctgtggtgtaccgagatggagagagtgttcgggttcccagtccactacacagatgtcagcaacatgtctagactggccagacagagactgctgggaagaagctggtccgtccctgtgatcagacacctgttcgcccctctgaaggagtacttcgcctgcgtgagcagcggcaacagcaacgccaacagccggggccccagcttctctagcggcctggtgccactgtccctgagagggagccacatgggccccatggagatctacaaaaccgtgagcgcctggaagcggcagcctgtgcgcgtgctgagcctgtttcggaatatcgataaagtcctgaaaagcctgggattcctggagagcggctctggctccggcggtggcaccctgaagtacgtggaggatgtgacaaacgtggtcagacgggatgtggagaagtggggccccttcgatctggtgtacggcagcacccaacccctgggcagctcttgtgaccggtgccctggctggtacatgtttcagttccaccggatcctgcagtacgccctgccgagacaggagtcccagcggccattcttttggattttcatggacaacttgctgctgaccgaggatgaccaggaaactaccactcggttcctgcagaccgaagccgtgaccctgcaggacgtgagaggccgggactaccagaacgccatgcgggtgtggtccaacatccctggactgaaaagcaagcacgcacctctgacccctaaagaagaggagtacctgcaggcccaggtgcggagcagaagcaagctggacgcccctaaggtggatctgctggtgaagaattgcctcctgcccctgagagagtacttcaagtatttcagccagaatagtctgcccctgggaggcagcggcggcggcctgcaggagagcgtgaccttcaaggacgtggccgtgctgttcacccaggacgagtgggcccagctgagccccgcccagagggccctgtacagggacgtgatgctggagaactacagccacctggtgagcctgggcctgctgggccccaagcccgacctgttcgcccagctgggcaagggcgaggagtggacccccgaggacaccagcaggggcttctgcctggactggatgaccatccccgtgggcggcccaagcagcggcgcccctcctcccagcggcggcagcccagccggctccccaacctctaccgaggagggcacctctgagtccgccacccccgagagcggccctggcacctccaccgagcccagcgagggcagcgcacccggcagccctgccggcagccccacctccacagaggagggaaccagcaccgagcccagcgaaggcagcgccccaggcaccagcaccgagcctagtgagcaggagattaaacggatcaacaagatcagaagaagacttgtgaaagacagcaacaccaagaaggccggcaagacaggccccatgaaaaccctgctggttagagtgatgacacccgatctgagagagcggctggaaaacctgagaaagaagcctgaaaatatcccccagcccatcagcaatacatctagagccaacctgaataagctgctgaccgattacaccgaaatgaagaaggcgatcctgcatgtgtactgggaagagttccagaaggaccctgtgggcctgatgagccgggtggcccagcctgccagcaagaagatcgatcagaacaagctgaaacctgagatggacgagaagggcaacctgaccaccgccggctttgcctgctctcagtgtggccagcccctgttcgtgtacaagctggagcaggtgtctgagaagggcaaggcttacaccaactacttcggacggtgcaatgtggccgagcacgaaaagctgatcctgctggcccagctgaagcccgagaaggatagcgacgaagccgtgacatatagcctgggaaagtttgggcagagggccctggatttctacagcattcatgtgaccaaggagtccacccaccccgtgaagcccctggcccagatcgccggaaacagatacgcctccggacctgtgggaaaggccctgagcgacgcatgtatgggcacaatcgcctccttcctgtctaagtaccaggacatcatcatcgaacaccagaaggtggtgaagggcaaccagaagagactggagagcctgcgggagctggccggcaaggaaaacctggaataccctagcgtgaccctgccacctcagcctcacaccaaggagggcgttgatgcctacaacgaagtgatcgcccgggtgcgaatgtgggtgaacctgaacctgtggcagaagctgaagctaagcagagatgatgccaagcctctgctgagactgaagggattcccttcctttcctctggtcgagagacaggccaacgaagtggactggtgggacatggtgtgtaacgtgaagaagctgatcaacgagaaaaaggaggatggcaaggtgttttggcagaatctggctggctacaagagacaggaagccctgagaccatacctgagcagcgaggaagatcggaagaagggaaagaaattcgctcggtaccagctgggcgacctgctgctgcacctggaaaagaagcacggcgaggactggggaaaggtgtacgacgaggcctgggagcggattgacaagaaagtggaaggcctgagcaagcacatcaagctggaagaggaacggagaagcgaggacgcccagagcaaggccgccctgaccgactggctgcgggctaaggccagcttcgtgatcgagggcctgaaggaggccgacaaggacgagttctgcagatgcgagctgaagctgcagaagtggtacggggacctgcggggaaagcccttcgccatcgaagccgagaacagcatcctggacatcagcggcttcagcaagcagtacaactgtgccttcatctggcagaaggacggcgtgaagaagctgaacctgtacctgatcatcaactacttcaagggcggcaagctgcggttcaagaagatcaaacctgaagccttcgaagccaacagattctacaccgtgatcaacaaaaagagcggcgagatcgtgcccatggaggtgaacttcaacttcgacgaccccaacctgatcatcctgcctctggcctttggcaagagacagggcagagaattcatctggaacgacctgctgtccctggaaaccggcagcctgaagctggccaacggaagagtgatcgagaagacactgtacaacagaagaacccggcaggatgagcctgccctgttcgtggccctgaccttcgagcggcgggaggtcctggactcctccaatatcaaaccaatgaacctgatcggcgtggcaagaggcgaaaacatccccgccgtgatcgccctgaccgaccccgagggctgcccactgagccggtttaaggatagcctgggaaacccaacccacatcctgagaatcggcgagagctataaggagaagcagcggaccatccaggccaagaaggaggtggagcagcggagagccggcggctacagccggaagtacgccagcaaagccaagaatctggcagacgatatggtgagaaacaccgctagagatctgctgtactacgccgtgacccaggatgccatgctgatcttcgccaacctgagccggggcttcggccggcagggcaagcggaccttcatggccgagagacagtacacacggatggaggactggctgaccgccaagctggcctacgagggcctgagcaagacctacctgtccaagacactggcccagtacacctccaagacatgcagcaactgtgggtttaccatcaccagcgccgactacgacagggtgctggagaagctgaagaagacagcaacaggctggatgaccacaattaacggcaaggagctgaaggtggagggccagattacctactacaacagatacaagagacagaacgtagtcaaggacctgtccgtcgagctggatagactgagcgaagaatctgtgaacaacgacatctcctcctggacaaagggcagaagcggagaagctctgagcctcctgaagaaaagattctcccatagacccgtgcaggagaagttcgtgtgcctgaactgcggcttcgagacacacgcagccgagcaagccgccctgaacatcgccagatcctggctgttcctgcggagccaggagtacaagaaataccagacaaacaagacaaccggcaacaccgataagagagccttcgtcgagacctggcagtccttttaccggaagaagcttaaggaggtgtggaaacctgccgtgcggtctggcggatctggcggaggctccaccagccccaagaaaaagagaaaagtctaagctgccttctgcggggcttgccttctggccatgcccttcttctctcccttgcacctgtacctcttggtctttgaataaagcctgagtaggaaggctagcaaaaaaaaaaaaaaaaaaaaaaaaaaaaaaaaaaaaaaaaaaaaaaaaaaaaaaaaaaaaaaaaaaaaaaaaaaaaaaaa

SEQ ID NO: 12667 - RNA, 5785 nt, synthetic construct
  source 1..5785: mol_type = other RNA
aggaaataagagagaaaagaagagtaagaagaaatataagagccaccatggcccctaagaagaagcgtaaagtgagccggatggaacgcctcgtctacgaggtgcggcagaagtgcagaaacatcgaggacatctgcatctcctgcggatctctgaacgtgaccctggagcacccactgttcatcggcggcatgtgccagaactgtaaaaactgttttctggagtgtgcctatcaatacgacgatgacggctaccagagctactgcaccatctgttgcggcggaagagaggtgctgatgtgtggaaataacaactgctgccggtgcttctgcgtggaatgcgtggacctgctggtgggccccggcgccgcccaggccgctattaaggaagatccttggaactgctacatgtgcggccacaagggcacatacggcctgctgagacggagagaggactggcctagcagactgcagatgttcttcgccaataaccacgaccaggagttcgacccccctaaggtgtaccctcccgtccccgccgagaagagaaagcccatccgggtcctgagcctgttcgatggcatcgccaccggtctgctggtgctgaaggacctgggcatccaggtggataggtacattgcctccgaggtgtgcgaggactccatcaccgtgggaatggtgcgtcatcagggcaagatcatgtacgtgggcgacgtgcggagcgtgacacagaagcatatccaggagtggggccctttcgacctggtgatcggcggcagcccttgcaatgacctgagcatcgtgaacccagcccggaagggcctgtacgagggaaccggcagactgttcttcgagttttacagactgctgcacgacgcccggcctaaggaaggcgacgaccggcccttcttttggctgttcgagaatgtggtggccatgggagtcagcgacaagcgggatattagccggttcctggagagcaaccccgtgatgatcgatgccaaggaagtgagcgccgcccaccgggccagatacttctggggcaatctgcctggcatgaacagacccctggccagcaccgtgaacgacaagctggagctgcaggagtgcctggagcacggccggatcgccaagttcagcaaggtgagaaccatcaccacccgaagcaacagcatcaaacaaggcaaggaccagcactttcctgtgttcatgaacgagaaggaggacatcctgtggtgtaccgagatggagagagtgttcgggttcccagtccactacacagatgtcagcaacatgtctagactggccagacagagactgctgggaagaagctggtccgtccctgtgatcagacacctgttcgcccctctgaaggagtacttcgcctgcgtgagcagcggcaacagcaacgccaacagccggggccccagcttctctagcggcctggtgccactgtccctgagagggagccacatgggccccatggagatctacaaaaccgtgagcgcctggaagcggcagcctgtgcgcgtgctgagcctgtttcggaatatcgataaagtcctgaaaagcctgggattcctggagagcggctctggctccggcggtggcaccctgaagtacgtggaggatgtgacaaacgtggtcagacgggatgtggagaagtggggccccttcgatctggtgtacggcagcacccaacccctgggcagctcttgtgaccggtgccctggctggtacatgtttcagttccaccggatcctgcagtacgccctgccgagacaggagtcccagcggccattcttttggattttcatggacaacttgctgctgaccgaggatgaccaggaaactaccactcggttcctgcagaccgaagccgtgaccctgcaggacgtgagaggccgggactaccagaacgccatgcgggtgtggtccaacatccctggactgaaaagcaagcacgcacctctgacccctaaagaagaggagtacctgcaggcccaggtgcggagcagaagcaagctggacgcccctaaggtggatctgctggtgaagaattgcctcctgcccctgagagagtacttcaagtatttcagccagaatagtctgcccctgggaggcagcggcggcggcagcctgggcagcgtgagcttcaaggacgtgaccgtggacttcagcagggaggagtggcagcagctggacctggcccagaagagcctgtacagggacgtgaccctggagaactacttcaacctgatcagcgtgggctgccaggtgcccaagcccgaggtgatcttcaacctggagcagggcggcgagctgtgcgtgctggacggcggcctgagctgccagaactgcagcgacggcgacatcggcggcggcccaagcagcggcgcccctcctcccagcggcggcagcccagccggctccccaacctctaccgaggagggcacctctgagtccgccacccccgagagcggccctggcacctccaccgagcccagcgagggcagcgcacccggcagccctgccggcagccccacctccacagaggagggaaccagcaccgagcccagcgaaggcagcgccccaggcaccagcaccgagcctagtgagcaggagattaaacggatcaacaagatcagaagaagacttgtgaaagacagcaacaccaagaaggccggcaagacaggccccatgaaaaccctgctggttagagtgatgacacccgatctgagagagcggctggaaaacctgagaaagaagcctgaaaatatcccccagcccatcagcaatacatctagagccaacctgaataagctgctgaccgattacaccgaaatgaagaaggcgatcctgcatgtgtactgggaagagttccagaaggaccctgtgggcctgatgagccgggtggcccagcctgccagcaagaagatcgatcagaacaagctgaaacctgagatggacgagaagggcaacctgaccaccgccggctttgcctgctctcagtgtggccagcccctgttcgtgtacaagctggagcaggtgtctgagaagggcaaggcttacaccaactacttcggacggtgcaatgtggccgagcacgaaaagctgatcctgctggcccagctgaagcccgagaaggatagcgacgaagccgtgacatatagcctgggaaagtttgggcagagggccctggatttctacagcattcatgtgaccaaggagtccacccaccccgtgaagcccctggcccagatcgccggaaacagatacgcctccggacctgtgggaaaggccctgagcgacgcatgtatgggcacaatcgcctccttcctgtctaagtaccaggacatcatcatcgaacaccagaaggtggtgaagggcaaccagaagagactggagagcctgcgggagctggccggcaaggaaaacctggaataccctagcgtgaccctgccacctcagcctcacaccaaggagggcgttgatgcctacaacgaagtgatcgcccgggtgcgaatgtgggtgaacctgaacctgtggcagaagctgaagctaagcagagatgatgccaagcctctgctgagactgaagggattcccttcctttcctctggtcgagagacaggccaacgaagtggactggtgggacatggtgtgtaacgtgaagaagctgatcaacgagaaaaaggaggatggcaaggtgttttggcagaatctggctggctacaagagacaggaagccctgagaccatacctgagcagcgaggaagatcggaagaagggaaagaaattcgctcggtaccagctgggcgacctgctgctgcacctggaaaagaagcacggcgaggactggggaaaggtgtacgacgaggcctgggagcggattgacaagaaagtggaaggcctgagcaagcacatcaagctggaagaggaacggagaagcgaggacgcccagagcaaggccgccctgaccgactggctgcgggctaaggccagcttcgtgatcgagggcctgaaggaggccgacaaggacgagttctgcagatgcgagctgaagctgcagaagtggtacggggacctgcggggaaagcccttcgccatcgaagccgagaacagcatcctggacatcagcggcttcagcaagcagtacaactgtgccttcatctggcagaaggacggcgtgaagaagctgaacctgtacctgatcatcaactacttcaagggcggcaagctgcggttcaagaagatcaaacctgaagccttcgaagccaacagattctacaccgtgatcaacaaaaagagcggcgagatcgtgcccatggaggtgaacttcaacttcgacgaccccaacctgatcatcctgcctctggcctttggcaagagacagggcagagaattcatctggaacgacctgctgtccctggaaaccggcagcctgaagctggccaacggaagagtgatcgagaagacactgtacaacagaagaacccggcaggatgagcctgccctgttcgtggccctgaccttcgagcggcgggaggtcctggactcctccaatatcaaaccaatgaacctgatcggcgtggcaagaggcgaaaacatccccgccgtgatcgccctgaccgaccccgagggctgcccactgagccggtttaaggatagcctgggaaacccaacccacatcctgagaatcggcgagagctataaggagaagcagcggaccatccaggccaagaaggaggtggagcagcggagagccggcggctacagccggaagtacgccagcaaagccaagaatctggcagacgatatggtgagaaacaccgctagagatctgctgtactacgccgtgacccaggatgccatgctgatcttcgccaacctgagccggggcttcggccggcagggcaagcggaccttcatggccgagagacagtacacacggatggaggactggctgaccgccaagctggcctacgagggcctgagcaagacctacctgtccaagacactggcccagtacacctccaagacatgcagcaactgtgggtttaccatcaccagcgccgactacgacagggtgctggagaagctgaagaagacagcaacaggctggatgaccacaattaacggcaaggagctgaaggtggagggccagattacctactacaacagatacaagagacagaacgtagtcaaggacctgtccgtcgagctggatagactgagcgaagaatctgtgaacaacgacatctcctcctggacaaagggcagaagcggagaagctctgagcctcctgaagaaaagattctcccatagacccgtgcaggagaagttcgtgtgcctgaactgcggcttcgagacacacgcagccgagcaagccgccctgaacatcgccagatcctggctgttcctgcggagccaggagtacaagaaataccagacaaacaagacaaccggcaacaccgataagagagccttcgtcgagacctggcagtccttttaccggaagaagcttaaggaggtgtggaaacctgccgtgcggtctggcggatctggcggaggctccaccagccccaagaaaaagagaaaagtctaagctgccttctgcggggcttgccttctggccatgcccttcttctctcccttgcacctgtacctcttggtctttgaataaagcctgagtaggaaggctagcaaaaaaaaaaaaaaaaaaaaaaaaaaaaaaaaaaaaaaaaaaaaaaaaaaaaaaaaaaaaaaaaaaaaaaaaaaaaaaaa

SEQ ID NO: 12668 - RNA, 5785 nt, synthetic construct
  source 1..5785: mol_type = other RNA
aggaaataagagagaaaagaagagtaagaagaaatataagagccaccatggcccctaagaagaagcgtaaagtgagccggatggaacgcctcgtctacgaggtgcggcagaagtgcagaaacatcgaggacatctgcatctcctgcggatctctgaacgtgaccctggagcacccactgttcatcggcggcatgtgccagaactgtaaaaactgttttctggagtgtgcctatcaatacgacgatgacggctaccagagctactgcaccatctgttgcggcggaagagaggtgctgatgtgtggaaataacaactgctgccggtgcttctgcgtggaatgcgtggacctgctggtgggccccggcgccgcccaggccgctattaaggaagatccttggaactgctacatgtgcggccacaagggcacatacggcctgctgagacggagagaggactggcctagcagactgcagatgttcttcgccaataaccacgaccaggagttcgacccccctaaggtgtaccctcccgtccccgccgagaagagaaagcccatccgggtcctgagcctgttcgatggcatcgccaccggtctgctggtgctgaaggacctgggcatccaggtggataggtacattgcctccgaggtgtgcgaggactccatcaccgtgggaatggtgcgtcatcagggcaagatcatgtacgtgggcgacgtgcggagcgtgacacagaagcatatccaggagtggggccctttcgacctggtgatcggcggcagcccttgcaatgacctgagcatcgtgaacccagcccggaagggcctgtacgagggaaccggcagactgttcttcgagttttacagactgctgcacgacgcccggcctaaggaaggcgacgaccggcccttcttttggctgttcgagaatgtggtggccatgggagtcagcgacaagcgggatattagccggttcctggagagcaaccccgtgatgatcgatgccaaggaagtgagcgccgcccaccgggccagatacttctggggcaatctgcctggcatgaacagacccctggccagcaccgtgaacgacaagctggagctgcaggagtgcctggagcacggccggatcgccaagttcagcaaggtgagaaccatcaccacccgaagcaacagcatcaaacaaggcaaggaccagcactttcctgtgttcatgaacgagaaggaggacatcctgtggtgtaccgagatggagagagtgttcgggttcccagtccactacacagatgtcagcaacatgtctagactggccagacagagactgctgggaagaagctggtccgtccctgtgatcagacacctgttcgcccctctgaaggagtacttcgcctgcgtgagcagcggcaacagcaacgccaacagccggggccccagcttctctagcggcctggtgccactgtccctgagagggagccacatgggccccatggagatctacaaaaccgtgagcgcctggaagcggcagcctgtgcgcgtgctgagcctgtttcggaatatcgataaagtcctgaaaagcctgggattcctggagagcggctctggctccggcggtggcaccctgaagtacgtggaggatgtgacaaacgtggtcagacgggatgtggagaagtggggccccttcgatctggtgtacggcagcacccaacccctgggcagctcttgtgaccggtgccctggctggtacatgtttcagttccaccggatcctgcagtacgccctgccgagacaggagtcccagcggccattcttttggattttcatggacaacttgctgctgaccgaggatgaccaggaaactaccactcggttcctgcagaccgaagccgtgaccctgcaggacgtgagaggccgggactaccagaacgccatgcgggtgtggtccaacatccctggactgaaaagcaagcacgcacctctgacccctaaagaagaggagtacctgcaggcccaggtgcggagcagaagcaagctggacgcccctaaggtggatctgctggtgaagaattgcctcctgcccctgagagagtacttcaagtatttcagccagaatagtctgcccctgggaggcagcggcggcggccccgcccagggccccggcgaggccaggcccagcaggaagaggggcaggaggcccagggccctgaagttcgtggacgtggccgtgtacttcagccccgaggagtggggctgcctgaggcccgcccagagggccctgtacagggacgtgatgagggagacctacggccacctgggcgccctgggctgcgccggccccaagcccgccctgatcagctggctggagaggaacaccgacgactgggagggcggcccaagcagcggcgcccctcctcccagcggcggcagcccagccggctccccaacctctaccgaggagggcacctctgagtccgccacccccgagagcggccctggcacctccaccgagcccagcgagggcagcgcacccggcagccctgccggcagccccacctccacagaggagggaaccagcaccgagcccagcgaaggcagcgccccaggcaccagcaccgagcctagtgagcaggagattaaacggatcaacaagatcagaagaagacttgtgaaagacagcaacaccaagaaggccggcaagacaggccccatgaaaaccctgctggttagagtgatgacacccgatctgagagagcggctggaaaacctgagaaagaagcctgaaaatatcccccagcccatcagcaatacatctagagccaacctgaataagctgctgaccgattacaccgaaatgaagaaggcgatcctgcatgtgtactgggaagagttccagaaggaccctgtgggcctgatgagccgggtggcccagcctgccagcaagaagatcgatcagaacaagctgaaacctgagatggacgagaagggcaacctgaccaccgccggctttgcctgctctcagtgtggccagcccctgttcgtgtacaagctggagcaggtgtctgagaagggcaaggcttacaccaactacttcggacggtgcaatgtggccgagcacgaaaagctgatcctgctggcccagctgaagcccgagaaggatagcgacgaagccgtgacatatagcctgggaaagtttgggcagagggccctggatttctacagcattcatgtgaccaaggagtccacccaccccgtgaagcccctggcccagatcgccggaaacagatacgcctccggacctgtgggaaaggccctgagcgacgcatgtatgggcacaatcgcctccttcctgtctaagtaccaggacatcatcatcgaacaccagaaggtggtgaagggcaaccagaagagactggagagcctgcgggagctggccggcaaggaaaacctggaataccctagcgtgaccctgccacctcagcctcacaccaaggagggcgttgatgcctacaacgaagtgatcgcccgggtgcgaatgtgggtgaacctgaacctgtggcagaagctgaagctaagcagagatgatgccaagcctctgctgagactgaagggattcccttcctttcctctggtcgagagacaggccaacgaagtggactggtgggacatggtgtgtaacgtgaagaagctgatcaacgagaaaaaggaggatggcaaggtgttttggcagaatctggctggctacaagagacaggaagccctgagaccatacctgagcagcgaggaagatcggaagaagggaaagaaattcgctcggtaccagctgggcgacctgctgctgcacctggaaaagaagcacggcgaggactggggaaaggtgtacgacgaggcctgggagcggattgacaagaaagtggaaggcctgagcaagcacatcaagctggaagaggaacggagaagcgaggacgcccagagcaaggccgccctgaccgactggctgcgggctaaggccagcttcgtgatcgagggcctgaaggaggccgacaaggacgagttctgcagatgcgagctgaagctgcagaagtggtacggggacctgcggggaaagcccttcgccatcgaagccgagaacagcatcctggacatcagcggcttcagcaagcagtacaactgtgccttcatctggcagaaggacggcgtgaagaagctgaacctgtacctgatcatcaactacttcaagggcggcaagctgcggttcaagaagatcaaacctgaagccttcgaagccaacagattctacaccgtgatcaacaaaaagagcggcgagatcgtgcccatggaggtgaacttcaacttcgacgaccccaacctgatcatcctgcctctggcctttggcaagagacagggcagagaattcatctggaacgacctgctgtccctggaaaccggcagcctgaagctggccaacggaagagtgatcgagaagacactgtacaacagaagaacccggcaggatgagcctgccctgttcgtggccctgaccttcgagcggcgggaggtcctggactcctccaatatcaaaccaatgaacctgatcggcgtggcaagaggcgaaaacatccccgccgtgatcgccctgaccgaccccgagggctgcccactgagccggtttaaggatagcctgggaaacccaacccacatcctgagaatcggcgagagctataaggagaagcagcggaccatccaggccaagaaggaggtggagcagcggagagccggcggctacagccggaagtacgccagcaaagccaagaatctggcagacgatatggtgagaaacaccgctagagatctgctgtactacgccgtgacccaggatgccatgctgatcttcgccaacctgagccggggcttcggccggcagggcaagcggaccttcatggccgagagacagtacacacggatggaggactggctgaccgccaagctggcctacgagggcctgagcaagacctacctgtccaagacactggcccagtacacctccaagacatgcagcaactgtgggtttaccatcaccagcgccgactacgacagggtgctggagaagctgaagaagacagcaacaggctggatgaccacaattaacggcaaggagctgaaggtggagggccagattacctactacaacagatacaagagacagaacgtagtcaaggacctgtccgtcgagctggatagactgagcgaagaatctgtgaacaacgacatctcctcctggacaaagggcagaagcggagaagctctgagcctcctgaagaaaagattctcccatagacccgtgcaggagaagttcgtgtgcctgaactgcggcttcgagacacacgcagccgagcaagccgccctgaacatcgccagatcctggctgttcctgcggagccaggagtacaagaaataccagacaaacaagacaaccggcaacaccgataagagagccttcgtcgagacctggcagtccttttaccggaagaagcttaaggaggtgtggaaacctgccgtgcggtctggcggatctggcggaggctccaccagccccaagaaaaagagaaaagtctaagctgccttctgcggggcttgccttctggccatgcccttcttctctcccttgcacctgtacctcttggtctttgaataaagcctgagtaggaaggctagcaaaaaaaaaaaaaaaaaaaaaaaaaaaaaaaaaaaaaaaaaaaaaaaaaaaaaaaaaaaaaaaaaaaaaaaaaaaaaaaa

SEQ ID NO: 12669 - RNA, 5785 nt, synthetic construct
  source 1..5785: mol_type = other RNA
aggaaataagagagaaaagaagagtaagaagaaatataagagccaccatggcccctaagaagaagcgtaaagtgagccggatggaacgcctcgtctacgaggtgcggcagaagtgcagaaacatcgaggacatctgcatctcctgcggatctctgaacgtgaccctggagcacccactgttcatcggcggcatgtgccagaactgtaaaaactgttttctggagtgtgcctatcaatacgacgatgacggctaccagagctactgcaccatctgttgcggcggaagagaggtgctgatgtgtggaaataacaactgctgccggtgcttctgcgtggaatgcgtggacctgctggtgggccccggcgccgcccaggccgctattaaggaagatccttggaactgctacatgtgcggccacaagggcacatacggcctgctgagacggagagaggactggcctagcagactgcagatgttcttcgccaataaccacgaccaggagttcgacccccctaaggtgtaccctcccgtccccgccgagaagagaaagcccatccgggtcctgagcctgttcgatggcatcgccaccggtctgctggtgctgaaggacctgggcatccaggtggataggtacattgcctccgaggtgtgcgaggactccatcaccgtgggaatggtgcgtcatcagggcaagatcatgtacgtgggcgacgtgcggagcgtgacacagaagcatatccaggagtggggccctttcgacctggtgatcggcggcagcccttgcaatgacctgagcatcgtgaacccagcccggaagggcctgtacgagggaaccggcagactgttcttcgagttttacagactgctgcacgacgcccggcctaaggaaggcgacgaccggcccttcttttggctgttcgagaatgtggtggccatgggagtcagcgacaagcgggatattagccggttcctggagagcaaccccgtgatgatcgatgccaaggaagtgagcgccgcccaccgggccagatacttctggggcaatctgcctggcatgaacagacccctggccagcaccgtgaacgacaagctggagctgcaggagtgcctggagcacggccggatcgccaagttcagcaaggtgagaaccatcaccacccgaagcaacagcatcaaacaaggcaaggaccagcactttcctgtgttcatgaacgagaaggaggacatcctgtggtgtaccgagatggagagagtgttcgggttcccagtccactacacagatgtcagcaacatgtctagactggccagacagagactgctgggaagaagctggtccgtccctgtgatcagacacctgttcgcccctctgaaggagtacttcgcctgcgtgagcagcggcaacagcaacgccaacagccggggccccagcttctctagcggcctggtgccactgtccctgagagggagccacatgggccccatggagatctacaaaaccgtgagcgcctggaagcggcagcctgtgcgcgtgctgagcctgtttcggaatatcgataaagtcctgaaaagcctgggattcctggagagcggctctggctccggcggtggcaccctgaagtacgtggaggatgtgacaaacgtggtcagacgggatgtggagaagtggggccccttcgatctggtgtacggcagcacccaacccctgggcagctcttgtgaccggtgccctggctggtacatgtttcagttccaccggatcctgcagtacgccctgccgagacaggagtcccagcggccattcttttggattttcatggacaacttgctgctgaccgaggatgaccaggaaactaccactcggttcctgcagaccgaagccgtgaccctgcaggacgtgagaggccgggactaccagaacgccatgcgggtgtggtccaacatccctggactgaaaagcaagcacgcacctctgacccctaaagaagaggagtacctgcaggcccaggtgcggagcagaagcaagctggacgcccctaaggtggatctgctggtgaagaattgcctcctgcccctgagagagtacttcaagtatttcagccagaatagtctgcccctgggaggcagcggcggcggcatgaacatggagggcctggtgatgttccaggacctgagcatcgacttcagccaggaggagtgggagtgcctgaaccccacccagaaggacctgtacagggacgtgatgatggagaactacagcagcctgctgagcctgggcctgagcatccccaagcccgacgtgatcagcctgctggagcagggcaaggagccctggatggtgagcagggacgtgctgggcggctggtgccccgacaggctgggcggcccaagcagcggcgcccctcctcccagcggcggcagcccagccggctccccaacctctaccgaggagggcacctctgagtccgccacccccgagagcggccctggcacctccaccgagcccagcgagggcagcgcacccggcagccctgccggcagccccacctccacagaggagggaaccagcaccgagcccagcgaaggcagcgccccaggcaccagcaccgagcctagtgagcaggagattaaacggatcaacaagatcagaagaagacttgtgaaagacagcaacaccaagaaggccggcaagacaggccccatgaaaaccctgctggttagagtgatgacacccgatctgagagagcggctggaaaacctgagaaagaagcctgaaaatatcccccagcccatcagcaatacatctagagccaacctgaataagctgctgaccgattacaccgaaatgaagaaggcgatcctgcatgtgtactgggaagagttccagaaggaccctgtgggcctgatgagccgggtggcccagcctgccagcaagaagatcgatcagaacaagctgaaacctgagatggacgagaagggcaacctgaccaccgccggctttgcctgctctcagtgtggccagcccctgttcgtgtacaagctggagcaggtgtctgagaagggcaaggcttacaccaactacttcggacggtgcaatgtggccgagcacgaaaagctgatcctgctggcccagctgaagcccgagaaggatagcgacgaagccgtgacatatagcctgggaaagtttgggcagagggccctggatttctacagcattcatgtgaccaaggagtccacccaccccgtgaagcccctggcccagatcgccggaaacagatacgcctccggacctgtgggaaaggccctgagcgacgcatgtatgggcacaatcgcctccttcctgtctaagtaccaggacatcatcatcgaacaccagaaggtggtgaagggcaaccagaagagactggagagcctgcgggagctggccggcaaggaaaacctggaataccctagcgtgaccctgccacctcagcctcacaccaaggagggcgttgatgcctacaacgaagtgatcgcccgggtgcgaatgtgggtgaacctgaacctgtggcagaagctgaagctaagcagagatgatgccaagcctctgctgagactgaagggattcccttcctttcctctggtcgagagacaggccaacgaagtggactggtgggacatggtgtgtaacgtgaagaagctgatcaacgagaaaaaggaggatggcaaggtgttttggcagaatctggctggctacaagagacaggaagccctgagaccatacctgagcagcgaggaagatcggaagaagggaaagaaattcgctcggtaccagctgggcgacctgctgctgcacctggaaaagaagcacggcgaggactggggaaaggtgtacgacgaggcctgggagcggattgacaagaaagtggaaggcctgagcaagcacatcaagctggaagaggaacggagaagcgaggacgcccagagcaaggccgccctgaccgactggctgcgggctaaggccagcttcgtgatcgagggcctgaaggaggccgacaaggacgagttctgcagatgcgagctgaagctgcagaagtggtacggggacctgcggggaaagcccttcgccatcgaagccgagaacagcatcctggacatcagcggcttcagcaagcagtacaactgtgccttcatctggcagaaggacggcgtgaagaagctgaacctgtacctgatcatcaactacttcaagggcggcaagctgcggttcaagaagatcaaacctgaagccttcgaagccaacagattctacaccgtgatcaacaaaaagagcggcgagatcgtgcccatggaggtgaacttcaacttcgacgaccccaacctgatcatcctgcctctggcctttggcaagagacagggcagagaattcatctggaacgacctgctgtccctggaaaccggcagcctgaagctggccaacggaagagtgatcgagaagacactgtacaacagaagaacccggcaggatgagcctgccctgttcgtggccctgaccttcgagcggcgggaggtcctggactcctccaatatcaaaccaatgaacctgatcggcgtggcaagaggcgaaaacatccccgccgtgatcgccctgaccgaccccgagggctgcccactgagccggtttaaggatagcctgggaaacccaacccacatcctgagaatcggcgagagctataaggagaagcagcggaccatccaggccaagaaggaggtggagcagcggagagccggcggctacagccggaagtacgccagcaaagccaagaatctggcagacgatatggtgagaaacaccgctagagatctgctgtactacgccgtgacccaggatgccatgctgatcttcgccaacctgagccggggcttcggccggcagggcaagcggaccttcatggccgagagacagtacacacggatggaggactggctgaccgccaagctggcctacgagggcctgagcaagacctacctgtccaagacactggcccagtacacctccaagacatgcagcaactgtgggtttaccatcaccagcgccgactacgacagggtgctggagaagctgaagaagacagcaacaggctggatgaccacaattaacggcaaggagctgaaggtggagggccagattacctactacaacagatacaagagacagaacgtagtcaaggacctgtccgtcgagctggatagactgagcgaagaatctgtgaacaacgacatctcctcctggacaaagggcagaagcggagaagctctgagcctcctgaagaaaagattctcccatagacccgtgcaggagaagttcgtgtgcctgaactgcggcttcgagacacacgcagccgagcaagccgccctgaacatcgccagatcctggctgttcctgcggagccaggagtacaagaaataccagacaaacaagacaaccggcaacaccgataagagagccttcgtcgagacctggcagtccttttaccggaagaagcttaaggaggtgtggaaacctgccgtgcggtctggcggatctggcggaggctccaccagccccaagaaaaagagaaaagtctaagctgccttctgcggggcttgccttctggccatgcccttcttctctcccttgcacctgtacctcttggtctttgaataaagcctgagtaggaaggctagcaaaaaaaaaaaaaaaaaaaaaaaaaaaaaaaaaaaaaaaaaaaaaaaaaaaaaaaaaaaaaaaaaaaaaaaaaaaaaaaa

SEQ ID NO: 12670 - RNA, 5785 nt, synthetic construct
  source 1..5785: mol_type = other RNA
aggaaataagagagaaaagaagagtaagaagaaatataagagccaccatggcccctaagaagaagcgtaaagtgagccggatggaacgcctcgtctacgaggtgcggcagaagtgcagaaacatcgaggacatctgcatctcctgcggatctctgaacgtgaccctggagcacccactgttcatcggcggcatgtgccagaactgtaaaaactgttttctggagtgtgcctatcaatacgacgatgacggctaccagagctactgcaccatctgttgcggcggaagagaggtgctgatgtgtggaaataacaactgctgccggtgcttctgcgtggaatgcgtggacctgctggtgggccccggcgccgcccaggccgctattaaggaagatccttggaactgctacatgtgcggccacaagggcacatacggcctgctgagacggagagaggactggcctagcagactgcagatgttcttcgccaataaccacgaccaggagttcgacccccctaaggtgtaccctcccgtccccgccgagaagagaaagcccatccgggtcctgagcctgttcgatggcatcgccaccggtctgctggtgctgaaggacctgggcatccaggtggataggtacattgcctccgaggtgtgcgaggactccatcaccgtgggaatggtgcgtcatcagggcaagatcatgtacgtgggcgacgtgcggagcgtgacacagaagcatatccaggagtggggccctttcgacctggtgatcggcggcagcccttgcaatgacctgagcatcgtgaacccagcccggaagggcctgtacgagggaaccggcagactgttcttcgagttttacagactgctgcacgacgcccggcctaaggaaggcgacgaccggcccttcttttggctgttcgagaatgtggtggccatgggagtcagcgacaagcgggatattagccggttcctggagagcaaccccgtgatgatcgatgccaaggaagtgagcgccgcccaccgggccagatacttctggggcaatctgcctggcatgaacagacccctggccagcaccgtgaacgacaagctggagctgcaggagtgcctggagcacggccggatcgccaagttcagcaaggtgagaaccatcaccacccgaagcaacagcatcaaacaaggcaaggaccagcactttcctgtgttcatgaacgagaaggaggacatcctgtggtgtaccgagatggagagagtgttcgggttcccagtccactacacagatgtcagcaacatgtctagactggccagacagagactgctgggaagaagctggtccgtccctgtgatcagacacctgttcgcccctctgaaggagtacttcgcctgcgtgagcagcggcaacagcaacgccaacagccggggccccagcttctctagcggcctggtgccactgtccctgagagggagccacatgggccccatggagatctacaaaaccgtgagcgcctggaagcggcagcctgtgcgcgtgctgagcctgtttcggaatatcgataaagtcctgaaaagcctgggattcctggagagcggctctggctccggcggtggcaccctgaagtacgtggaggatgtgacaaacgtggtcagacgggatgtggagaagtggggccccttcgatctggtgtacggcagcacccaacccctgggcagctcttgtgaccggtgccctggctggtacatgtttcagttccaccggatcctgcagtacgccctgccgagacaggagtcccagcggccattcttttggattttcatggacaacttgctgctgaccgaggatgaccaggaaactaccactcggttcctgcagaccgaagccgtgaccctgcaggacgtgagaggccgggactaccagaacgccatgcgggtgtggtccaacatccctggactgaaaagcaagcacgcacctctgacccctaaagaagaggagtacctgcaggcccaggtgcggagcagaagcaagctggacgcccctaaggtggatctgctggtgaagaattgcctcctgcccctgagagagtacttcaagtatttcagccagaatagtctgcccctgggaggcagcggcggcggcatgaccttcgaggacgtgagcgtggagttcacccagggcgagtggggccagctgaaccccgcccagaaggacctgtacagggaggtgatgctggagaacttcaggaacctggccttcctgggcctgcccgtgagcaagccctacgtgatctgccagctggaggagggcggcgagcccttcatcgtggagagggaggtgagcaccggcgcctacagcgactgggagaggaggagcaagagcaagggcggcccaagcagcggcgcccctcctcccagcggcggcagcccagccggctccccaacctctaccgaggagggcacctctgagtccgccacccccgagagcggccctggcacctccaccgagcccagcgagggcagcgcacccggcagccctgccggcagccccacctccacagaggagggaaccagcaccgagcccagcgaaggcagcgccccaggcaccagcaccgagcctagtgagcaggagattaaacggatcaacaagatcagaagaagacttgtgaaagacagcaacaccaagaaggccggcaagacaggccccatgaaaaccctgctggttagagtgatgacacccgatctgagagagcggctggaaaacctgagaaagaagcctgaaaatatcccccagcccatcagcaatacatctagagccaacctgaataagctgctgaccgattacaccgaaatgaagaaggcgatcctgcatgtgtactgggaagagttccagaaggaccctgtgggcctgatgagccgggtggcccagcctgccagcaagaagatcgatcagaacaagctgaaacctgagatggacgagaagggcaacctgaccaccgccggctttgcctgctctcagtgtggccagcccctgttcgtgtacaagctggagcaggtgtctgagaagggcaaggcttacaccaactacttcggacggtgcaatgtggccgagcacgaaaagctgatcctgctggcccagctgaagcccgagaaggatagcgacgaagccgtgacatatagcctgggaaagtttgggcagagggccctggatttctacagcattcatgtgaccaaggagtccacccaccccgtgaagcccctggcccagatcgccggaaacagatacgcctccggacctgtgggaaaggccctgagcgacgcatgtatgggcacaatcgcctccttcctgtctaagtaccaggacatcatcatcgaacaccagaaggtggtgaagggcaaccagaagagactggagagcctgcgggagctggccggcaaggaaaacctggaataccctagcgtgaccctgccacctcagcctcacaccaaggagggcgttgatgcctacaacgaagtgatcgcccgggtgcgaatgtgggtgaacctgaacctgtggcagaagctgaagctaagcagagatgatgccaagcctctgctgagactgaagggattcccttcctttcctctggtcgagagacaggccaacgaagtggactggtgggacatggtgtgtaacgtgaagaagctgatcaacgagaaaaaggaggatggcaaggtgttttggcagaatctggctggctacaagagacaggaagccctgagaccatacctgagcagcgaggaagatcggaagaagggaaagaaattcgctcggtaccagctgggcgacctgctgctgcacctggaaaagaagcacggcgaggactggggaaaggtgtacgacgaggcctgggagcggattgacaagaaagtggaaggcctgagcaagcacatcaagctggaagaggaacggagaagcgaggacgcccagagcaaggccgccctgaccgactggctgcgggctaaggccagcttcgtgatcgagggcctgaaggaggccgacaaggacgagttctgcagatgcgagctgaagctgcagaagtggtacggggacctgcggggaaagcccttcgccatcgaagccgagaacagcatcctggacatcagcggcttcagcaagcagtacaactgtgccttcatctggcagaaggacggcgtgaagaagctgaacctgtacctgatcatcaactacttcaagggcggcaagctgcggttcaagaagatcaaacctgaagccttcgaagccaacagattctacaccgtgatcaacaaaaagagcggcgagatcgtgcccatggaggtgaacttcaacttcgacgaccccaacctgatcatcctgcctctggcctttggcaagagacagggcagagaattcatctggaacgacctgctgtccctggaaaccggcagcctgaagctggccaacggaagagtgatcgagaagacactgtacaacagaagaacccggcaggatgagcctgccctgttcgtggccctgaccttcgagcggcgggaggtcctggactcctccaatatcaaaccaatgaacctgatcggcgtggcaagaggcgaaaacatccccgccgtgatcgccctgaccgaccccgagggctgcccactgagccggtttaaggatagcctgggaaacccaacccacatcctgagaatcggcgagagctataaggagaagcagcggaccatccaggccaagaaggaggtggagcagcggagagccggcggctacagccggaagtacgccagcaaagccaagaatctggcagacgatatggtgagaaacaccgctagagatctgctgtactacgccgtgacccaggatgccatgctgatcttcgccaacctgagccggggcttcggccggcagggcaagcggaccttcatggccgagagacagtacacacggatggaggactggctgaccgccaagctggcctacgagggcctgagcaagacctacctgtccaagacactggcccagtacacctccaagacatgcagcaactgtgggtttaccatcaccagcgccgactacgacagggtgctggagaagctgaagaagacagcaacaggctggatgaccacaattaacggcaaggagctgaaggtggagggccagattacctactacaacagatacaagagacagaacgtagtcaaggacctgtccgtcgagctggatagactgagcgaagaatctgtgaacaacgacatctcctcctggacaaagggcagaagcggagaagctctgagcctcctgaagaaaagattctcccatagacccgtgcaggagaagttcgtgtgcctgaactgcggcttcgagacacacgcagccgagcaagccgccctgaacatcgccagatcctggctgttcctgcggagccaggagtacaagaaataccagacaaacaagacaaccggcaacaccgataagagagccttcgtcgagacctggcagtccttttaccggaagaagcttaaggaggtgtggaaacctgccgtgcggtctggcggatctggcggaggctccaccagccccaagaaaaagagaaaagtctaagctgccttctgcggggcttgccttctggccatgcccttcttctctcccttgcacctgtacctcttggtctttgaataaagcctgagtaggaaggctagcaaaaaaaaaaaaaaaaaaaaaaaaaaaaaaaaaaaaaaaaaaaaaaaaaaaaaaaaaaaaaaaaaaaaaaaaaaaaaaaa

SEQ ID NO: 12671 - RNA, 5785 nt, synthetic construct
  source 1..5785: mol_type = other RNA
aggaaataagagagaaaagaagagtaagaagaaatataagagccaccatggcccctaagaagaagcgtaaagtgagccggatggaacgcctcgtctacgaggtgcggcagaagtgcagaaacatcgaggacatctgcatctcctgcggatctctgaacgtgaccctggagcacccactgttcatcggcggcatgtgccagaactgtaaaaactgttttctggagtgtgcctatcaatacgacgatgacggctaccagagctactgcaccatctgttgcggcggaagagaggtgctgatgtgtggaaataacaactgctgccggtgcttctgcgtggaatgcgtggacctgctggtgggccccggcgccgcccaggccgctattaaggaagatccttggaactgctacatgtgcggccacaagggcacatacggcctgctgagacggagagaggactggcctagcagactgcagatgttcttcgccaataaccacgaccaggagttcgacccccctaaggtgtaccctcccgtccccgccgagaagagaaagcccatccgggtcctgagcctgttcgatggcatcgccaccggtctgctggtgctgaaggacctgggcatccaggtggataggtacattgcctccgaggtgtgcgaggactccatcaccgtgggaatggtgcgtcatcagggcaagatcatgtacgtgggcgacgtgcggagcgtgacacagaagcatatccaggagtggggccctttcgacctggtgatcggcggcagcccttgcaatgacctgagcatcgtgaacccagcccggaagggcctgtacgagggaaccggcagactgttcttcgagttttacagactgctgcacgacgcccggcctaaggaaggcgacgaccggcccttcttttggctgttcgagaatgtggtggccatgggagtcagcgacaagcgggatattagccggttcctggagagcaaccccgtgatgatcgatgccaaggaagtgagcgccgcccaccgggccagatacttctggggcaatctgcctggcatgaacagacccctggccagcaccgtgaacgacaagctggagctgcaggagtgcctggagcacggccggatcgccaagttcagcaaggtgagaaccatcaccacccgaagcaacagcatcaaacaaggcaaggaccagcactttcctgtgttcatgaacgagaaggaggacatcctgtggtgtaccgagatggagagagtgttcgggttcccagtccactacacagatgtcagcaacatgtctagactggccagacagagactgctgggaagaagctggtccgtccctgtgatcagacacctgttcgcccctctgaaggagtacttcgcctgcgtgagcagcggcaacagcaacgccaacagccggggccccagcttctctagcggcctggtgccactgtccctgagagggagccacatgggccccatggagatctacaaaaccgtgagcgcctggaagcggcagcctgtgcgcgtgctgagcctgtttcggaatatcgataaagtcctgaaaagcctgggattcctggagagcggctctggctccggcggtggcaccctgaagtacgtggaggatgtgacaaacgtggtcagacgggatgtggagaagtggggccccttcgatctggtgtacggcagcacccaacccctgggcagctcttgtgaccggtgccctggctggtacatgtttcagttccaccggatcctgcagtacgccctgccgagacaggagtcccagcggccattcttttggattttcatggacaacttgctgctgaccgaggatgaccaggaaactaccactcggttcctgcagaccgaagccgtgaccctgcaggacgtgagaggccgggactaccagaacgccatgcgggtgtggtccaacatccctggactgaaaagcaagcacgcacctctgacccctaaagaagaggagtacctgcaggcccaggtgcggagcagaagcaagctggacgcccctaaggtggatctgctggtgaagaattgcctcctgcccctgagagagtacttcaagtatttcagccagaatagtctgcccctgggaggcagcggcggcggcctgcagaagagcgtgaccttcgaggacgtggccgtgtacttcacccagaccgagtgggacggcctgagccccgcccagagggccctgtacagggacgtgatgctggagaactacggcaacgtggccagcctgggcttcagcctgttcaagcccgccgtgatcagccagctggagggcgccggcgagctgggcggccccagccccctggtggacggcaccgagaccggcccccagggcctgtggggcggcccaagcagcggcgcccctcctcccagcggcggcagcccagccggctccccaacctctaccgaggagggcacctctgagtccgccacccccgagagcggccctggcacctccaccgagcccagcgagggcagcgcacccggcagccctgccggcagccccacctccacagaggagggaaccagcaccgagcccagcgaaggcagcgccccaggcaccagcaccgagcctagtgagcaggagattaaacggatcaacaagatcagaagaagacttgtgaaagacagcaacaccaagaaggccggcaagacaggccccatgaaaaccctgctggttagagtgatgacacccgatctgagagagcggctggaaaacctgagaaagaagcctgaaaatatcccccagcccatcagcaatacatctagagccaacctgaataagctgctgaccgattacaccgaaatgaagaaggcgatcctgcatgtgtactgggaagagttccagaaggaccctgtgggcctgatgagccgggtggcccagcctgccagcaagaagatcgatcagaacaagctgaaacctgagatggacgagaagggcaacctgaccaccgccggctttgcctgctctcagtgtggccagcccctgttcgtgtacaagctggagcaggtgtctgagaagggcaaggcttacaccaactacttcggacggtgcaatgtggccgagcacgaaaagctgatcctgctggcccagctgaagcccgagaaggatagcgacgaagccgtgacatatagcctgggaaagtttgggcagagggccctggatttctacagcattcatgtgaccaaggagtccacccaccccgtgaagcccctggcccagatcgccggaaacagatacgcctccggacctgtgggaaaggccctgagcgacgcatgtatgggcacaatcgcctccttcctgtctaagtaccaggacatcatcatcgaacaccagaaggtggtgaagggcaaccagaagagactggagagcctgcgggagctggccggcaaggaaaacctggaataccctagcgtgaccctgccacctcagcctcacaccaaggagggcgttgatgcctacaacgaagtgatcgcccgggtgcgaatgtgggtgaacctgaacctgtggcagaagctgaagctaagcagagatgatgccaagcctctgctgagactgaagggattcccttcctttcctctggtcgagagacaggccaacgaagtggactggtgggacatggtgtgtaacgtgaagaagctgatcaacgagaaaaaggaggatggcaaggtgttttggcagaatctggctggctacaagagacaggaagccctgagaccatacctgagcagcgaggaagatcggaagaagggaaagaaattcgctcggtaccagctgggcgacctgctgctgcacctggaaaagaagcacggcgaggactggggaaaggtgtacgacgaggcctgggagcggattgacaagaaagtggaaggcctgagcaagcacatcaagctggaagaggaacggagaagcgaggacgcccagagcaaggccgccctgaccgactggctgcgggctaaggccagcttcgtgatcgagggcctgaaggaggccgacaaggacgagttctgcagatgcgagctgaagctgcagaagtggtacggggacctgcggggaaagcccttcgccatcgaagccgagaacagcatcctggacatcagcggcttcagcaagcagtacaactgtgccttcatctggcagaaggacggcgtgaagaagctgaacctgtacctgatcatcaactacttcaagggcggcaagctgcggttcaagaagatcaaacctgaagccttcgaagccaacagattctacaccgtgatcaacaaaaagagcggcgagatcgtgcccatggaggtgaacttcaacttcgacgaccccaacctgatcatcctgcctctggcctttggcaagagacagggcagagaattcatctggaacgacctgctgtccctggaaaccggcagcctgaagctggccaacggaagagtgatcgagaagacactgtacaacagaagaacccggcaggatgagcctgccctgttcgtggccctgaccttcgagcggcgggaggtcctggactcctccaatatcaaaccaatgaacctgatcggcgtggcaagaggcgaaaacatccccgccgtgatcgccctgaccgaccccgagggctgcccactgagccggtttaaggatagcctgggaaacccaacccacatcctgagaatcggcgagagctataaggagaagcagcggaccatccaggccaagaaggaggtggagcagcggagagccggcggctacagccggaagtacgccagcaaagccaagaatctggcagacgatatggtgagaaacaccgctagagatctgctgtactacgccgtgacccaggatgccatgctgatcttcgccaacctgagccggggcttcggccggcagggcaagcggaccttcatggccgagagacagtacacacggatggaggactggctgaccgccaagctggcctacgagggcctgagcaagacctacctgtccaagacactggcccagtacacctccaagacatgcagcaactgtgggtttaccatcaccagcgccgactacgacagggtgctggagaagctgaagaagacagcaacaggctggatgaccacaattaacggcaaggagctgaaggtggagggccagattacctactacaacagatacaagagacagaacgtagtcaaggacctgtccgtcgagctggatagactgagcgaagaatctgtgaacaacgacatctcctcctggacaaagggcagaagcggagaagctctgagcctcctgaagaaaagattctcccatagacccgtgcaggagaagttcgtgtgcctgaactgcggcttcgagacacacgcagccgagcaagccgccctgaacatcgccagatcctggctgttcctgcggagccaggagtacaagaaataccagacaaacaagacaaccggcaacaccgataagagagccttcgtcgagacctggcagtccttttaccggaagaagcttaaggaggtgtggaaacctgccgtgcggtctggcggatctggcggaggctccaccagccccaagaaaaagagaaaagtctaagctgccttctgcggggcttgccttctggccatgcccttcttctctcccttgcacctgtacctcttggtctttgaataaagcctgagtaggaaggctagcaaaaaaaaaaaaaaaaaaaaaaaaaaaaaaaaaaaaaaaaaaaaaaaaaaaaaaaaaaaaaaaaaaaaaaaaaaaaaaaa

SEQ ID NO: 12672 - RNA, 5785 nt, synthetic construct
  source 1..5785: mol_type = other RNA
aggaaataagagagaaaagaagagtaagaagaaatataagagccaccatggcccctaagaagaagcgtaaagtgagccggatggaacgcctcgtctacgaggtgcggcagaagtgcagaaacatcgaggacatctgcatctcctgcggatctctgaacgtgaccctggagcacccactgttcatcggcggcatgtgccagaactgtaaaaactgttttctggagtgtgcctatcaatacgacgatgacggctaccagagctactgcaccatctgttgcggcggaagagaggtgctgatgtgtggaaataacaactgctgccggtgcttctgcgtggaatgcgtggacctgctggtgggccccggcgccgcccaggccgctattaaggaagatccttggaactgctacatgtgcggccacaagggcacatacggcctgctgagacggagagaggactggcctagcagactgcagatgttcttcgccaataaccacgaccaggagttcgacccccctaaggtgtaccctcccgtccccgccgagaagagaaagcccatccgggtcctgagcctgttcgatggcatcgccaccggtctgctggtgctgaaggacctgggcatccaggtggataggtacattgcctccgaggtgtgcgaggactccatcaccgtgggaatggtgcgtcatcagggcaagatcatgtacgtgggcgacgtgcggagcgtgacacagaagcatatccaggagtggggccctttcgacctggtgatcggcggcagcccttgcaatgacctgagcatcgtgaacccagcccggaagggcctgtacgagggaaccggcagactgttcttcgagttttacagactgctgcacgacgcccggcctaaggaaggcgacgaccggcccttcttttggctgttcgagaatgtggtggccatgggagtcagcgacaagcgggatattagccggttcctggagagcaaccccgtgatgatcgatgccaaggaagtgagcgccgcccaccgggccagatacttctggggcaatctgcctggcatgaacagacccctggccagcaccgtgaacgacaagctggagctgcaggagtgcctggagcacggccggatcgccaagttcagcaaggtgagaaccatcaccacccgaagcaacagcatcaaacaaggcaaggaccagcactttcctgtgttcatgaacgagaaggaggacatcctgtggtgtaccgagatggagagagtgttcgggttcccagtccactacacagatgtcagcaacatgtctagactggccagacagagactgctgggaagaagctggtccgtccctgtgatcagacacctgttcgcccctctgaaggagtacttcgcctgcgtgagcagcggcaacagcaacgccaacagccggggccccagcttctctagcggcctggtgccactgtccctgagagggagccacatgggccccatggagatctacaaaaccgtgagcgcctggaagcggcagcctgtgcgcgtgctgagcctgtttcggaatatcgataaagtcctgaaaagcctgggattcctggagagcggctctggctccggcggtggcaccctgaagtacgtggaggatgtgacaaacgtggtcagacgggatgtggagaagtggggccccttcgatctggtgtacggcagcacccaacccctgggcagctcttgtgaccggtgccctggctggtacatgtttcagttccaccggatcctgcagtacgccctgccgagacaggagtcccagcggccattcttttggattttcatggacaacttgctgctgaccgaggatgaccaggaaactaccactcggttcctgcagaccgaagccgtgaccctgcaggacgtgagaggccgggactaccagaacgccatgcgggtgtggtccaacatccctggactgaaaagcaagcacgcacctctgacccctaaagaagaggagtacctgcaggcccaggtgcggagcagaagcaagctggacgcccctaaggtggatctgctggtgaagaattgcctcctgcccctgagagagtacttcaagtatttcagccagaatagtctgcccctgggaggcagcggcggcggcatccagggcagcctgaccttcaaggacgtggccgtggacttcacccaggacgagtggtgcctgctggacaacagccagaaggagctgtacctggaggtgatgctggagaacgtgcagaacctgctgagcgtgggcctgcccgtgcccagggagtacctgaccagctgcttccagcagggcgaggccccctggctgctggagcaggaggtgcccaggagcagctgccccgaggccgagaccaacggcggcccaagcagcggcgcccctcctcccagcggcggcagcccagccggctccccaacctctaccgaggagggcacctctgagtccgccacccccgagagcggccctggcacctccaccgagcccagcgagggcagcgcacccggcagccctgccggcagccccacctccacagaggagggaaccagcaccgagcccagcgaaggcagcgccccaggcaccagcaccgagcctagtgagcaggagattaaacggatcaacaagatcagaagaagacttgtgaaagacagcaacaccaagaaggccggcaagacaggccccatgaaaaccctgctggttagagtgatgacacccgatctgagagagcggctggaaaacctgagaaagaagcctgaaaatatcccccagcccatcagcaatacatctagagccaacctgaataagctgctgaccgattacaccgaaatgaagaaggcgatcctgcatgtgtactgggaagagttccagaaggaccctgtgggcctgatgagccgggtggcccagcctgccagcaagaagatcgatcagaacaagctgaaacctgagatggacgagaagggcaacctgaccaccgccggctttgcctgctctcagtgtggccagcccctgttcgtgtacaagctggagcaggtgtctgagaagggcaaggcttacaccaactacttcggacggtgcaatgtggccgagcacgaaaagctgatcctgctggcccagctgaagcccgagaaggatagcgacgaagccgtgacatatagcctgggaaagtttgggcagagggccctggatttctacagcattcatgtgaccaaggagtccacccaccccgtgaagcccctggcccagatcgccggaaacagatacgcctccggacctgtgggaaaggccctgagcgacgcatgtatgggcacaatcgcctccttcctgtctaagtaccaggacatcatcatcgaacaccagaaggtggtgaagggcaaccagaagagactggagagcctgcgggagctggccggcaaggaaaacctggaataccctagcgtgaccctgccacctcagcctcacaccaaggagggcgttgatgcctacaacgaagtgatcgcccgggtgcgaatgtgggtgaacctgaacctgtggcagaagctgaagctaagcagagatgatgccaagcctctgctgagactgaagggattcccttcctttcctctggtcgagagacaggccaacgaagtggactggtgggacatggtgtgtaacgtgaagaagctgatcaacgagaaaaaggaggatggcaaggtgttttggcagaatctggctggctacaagagacaggaagccctgagaccatacctgagcagcgaggaagatcggaagaagggaaagaaattcgctcggtaccagctgggcgacctgctgctgcacctggaaaagaagcacggcgaggactggggaaaggtgtacgacgaggcctgggagcggattgacaagaaagtggaaggcctgagcaagcacatcaagctggaagaggaacggagaagcgaggacgcccagagcaaggccgccctgaccgactggctgcgggctaaggccagcttcgtgatcgagggcctgaaggaggccgacaaggacgagttctgcagatgcgagctgaagctgcagaagtggtacggggacctgcggggaaagcccttcgccatcgaagccgagaacagcatcctggacatcagcggcttcagcaagcagtacaactgtgccttcatctggcagaaggacggcgtgaagaagctgaacctgtacctgatcatcaactacttcaagggcggcaagctgcggttcaagaagatcaaacctgaagccttcgaagccaacagattctacaccgtgatcaacaaaaagagcggcgagatcgtgcccatggaggtgaacttcaacttcgacgaccccaacctgatcatcctgcctctggcctttggcaagagacagggcagagaattcatctggaacgacctgctgtccctggaaaccggcagcctgaagctggccaacggaagagtgatcgagaagacactgtacaacagaagaacccggcaggatgagcctgccctgttcgtggccctgaccttcgagcggcgggaggtcctggactcctccaatatcaaaccaatgaacctgatcggcgtggcaagaggcgaaaacatccccgccgtgatcgccctgaccgaccccgagggctgcccactgagccggtttaaggatagcctgggaaacccaacccacatcctgagaatcggcgagagctataaggagaagcagcggaccatccaggccaagaaggaggtggagcagcggagagccggcggctacagccggaagtacgccagcaaagccaagaatctggcagacgatatggtgagaaacaccgctagagatctgctgtactacgccgtgacccaggatgccatgctgatcttcgccaacctgagccggggcttcggccggcagggcaagcggaccttcatggccgagagacagtacacacggatggaggactggctgaccgccaagctggcctacgagggcctgagcaagacctacctgtccaagacactggcccagtacacctccaagacatgcagcaactgtgggtttaccatcaccagcgccgactacgacagggtgctggagaagctgaagaagacagcaacaggctggatgaccacaattaacggcaaggagctgaaggtggagggccagattacctactacaacagatacaagagacagaacgtagtcaaggacctgtccgtcgagctggatagactgagcgaagaatctgtgaacaacgacatctcctcctggacaaagggcagaagcggagaagctctgagcctcctgaagaaaagattctcccatagacccgtgcaggagaagttcgtgtgcctgaactgcggcttcgagacacacgcagccgagcaagccgccctgaacatcgccagatcctggctgttcctgcggagccaggagtacaagaaataccagacaaacaagacaaccggcaacaccgataagagagccttcgtcgagacctggcagtccttttaccggaagaagcttaaggaggtgtggaaacctgccgtgcggtctggcggatctggcggaggctccaccagccccaagaaaaagagaaaagtctaagctgccttctgcggggcttgccttctggccatgcccttcttctctcccttgcacctgtacctcttggtctttgaataaagcctgagtaggaaggctagcaaaaaaaaaaaaaaaaaaaaaaaaaaaaaaaaaaaaaaaaaaaaaaaaaaaaaaaaaaaaaaaaaaaaaaaaaaaaaaaa

SEQ ID NO: 12673 - RNA, 5785 nt, synthetic construct
  source 1..5785: mol_type = other RNA
aggaaataagagagaaaagaagagtaagaagaaatataagagccaccatggcccctaagaagaagcgtaaagtgagccggatggaacgcctcgtctacgaggtgcggcagaagtgcagaaacatcgaggacatctgcatctcctgcggatctctgaacgtgaccctggagcacccactgttcatcggcggcatgtgccagaactgtaaaaactgttttctggagtgtgcctatcaatacgacgatgacggctaccagagctactgcaccatctgttgcggcggaagagaggtgctgatgtgtggaaataacaactgctgccggtgcttctgcgtggaatgcgtggacctgctggtgggccccggcgccgcccaggccgctattaaggaagatccttggaactgctacatgtgcggccacaagggcacatacggcctgctgagacggagagaggactggcctagcagactgcagatgttcttcgccaataaccacgaccaggagttcgacccccctaaggtgtaccctcccgtccccgccgagaagagaaagcccatccgggtcctgagcctgttcgatggcatcgccaccggtctgctggtgctgaaggacctgggcatccaggtggataggtacattgcctccgaggtgtgcgaggactccatcaccgtgggaatggtgcgtcatcagggcaagatcatgtacgtgggcgacgtgcggagcgtgacacagaagcatatccaggagtggggccctttcgacctggtgatcggcggcagcccttgcaatgacctgagcatcgtgaacccagcccggaagggcctgtacgagggaaccggcagactgttcttcgagttttacagactgctgcacgacgcccggcctaaggaaggcgacgaccggcccttcttttggctgttcgagaatgtggtggccatgggagtcagcgacaagcgggatattagccggttcctggagagcaaccccgtgatgatcgatgccaaggaagtgagcgccgcccaccgggccagatacttctggggcaatctgcctggcatgaacagacccctggccagcaccgtgaacgacaagctggagctgcaggagtgcctggagcacggccggatcgccaagttcagcaaggtgagaaccatcaccacccgaagcaacagcatcaaacaaggcaaggaccagcactttcctgtgttcatgaacgagaaggaggacatcctgtggtgtaccgagatggagagagtgttcgggttcccagtccactacacagatgtcagcaacatgtctagactggccagacagagactgctgggaagaagctggtccgtccctgtgatcagacacctgttcgcccctctgaaggagtacttcgcctgcgtgagcagcggcaacagcaacgccaacagccggggccccagcttctctagcggcctggtgccactgtccctgagagggagccacatgggccccatggagatctacaaaaccgtgagcgcctggaagcggcagcctgtgcgcgtgctgagcctgtttcggaatatcgataaagtcctgaaaagcctgggattcctggagagcggctctggctccggcggtggcaccctgaagtacgtggaggatgtgacaaacgtggtcagacgggatgtggagaagtggggccccttcgatctggtgtacggcagcacccaacccctgggcagctcttgtgaccggtgccctggctggtacatgtttcagttccaccggatcctgcagtacgccctgccgagacaggagtcccagcggccattcttttggattttcatggacaacttgctgctgaccgaggatgaccaggaaactaccactcggttcctgcagaccgaagccgtgaccctgcaggacgtgagaggccgggactaccagaacgccatgcgggtgtggtccaacatccctggactgaaaagcaagcacgcacctctgacccctaaagaagaggagtacctgcaggcccaggtgcggagcagaagcaagctggacgcccctaaggtggatctgctggtgaagaattgcctcctgcccctgagagagtacttcaagtatttcagccagaatagtctgcccctgggaggcagcggcggcggcttccagggcagcgtgaccttcagggacgtggccatcgacttcagccaggaggagtggaagtggctgcagcccgcccagagggacctgtacaggtgcgtgatgctggagaactacggccacctggtgagcctgggcctgagcatcagcaagcccgacgtggtgagcctgctggagcagggcaaggagccctggctgggcaagaggaacgtgaacagggacctgcaggccctgtgcatccccatcggcggcccaagcagcggcgcccctcctcccagcggcggcagcccagccggctccccaacctctaccgaggagggcacctctgagtccgccacccccgagagcggccctggcacctccaccgagcccagcgagggcagcgcacccggcagccctgccggcagccccacctccacagaggagggaaccagcaccgagcccagcgaaggcagcgccccaggcaccagcaccgagcctagtgagcaggagattaaacggatcaacaagatcagaagaagacttgtgaaagacagcaacaccaagaaggccggcaagacaggccccatgaaaaccctgctggttagagtgatgacacccgatctgagagagcggctggaaaacctgagaaagaagcctgaaaatatcccccagcccatcagcaatacatctagagccaacctgaataagctgctgaccgattacaccgaaatgaagaaggcgatcctgcatgtgtactgggaagagttccagaaggaccctgtgggcctgatgagccgggtggcccagcctgccagcaagaagatcgatcagaacaagctgaaacctgagatggacgagaagggcaacctgaccaccgccggctttgcctgctctcagtgtggccagcccctgttcgtgtacaagctggagcaggtgtctgagaagggcaaggcttacaccaactacttcggacggtgcaatgtggccgagcacgaaaagctgatcctgctggcccagctgaagcccgagaaggatagcgacgaagccgtgacatatagcctgggaaagtttgggcagagggccctggatttctacagcattcatgtgaccaaggagtccacccaccccgtgaagcccctggcccagatcgccggaaacagatacgcctccggacctgtgggaaaggccctgagcgacgcatgtatgggcacaatcgcctccttcctgtctaagtaccaggacatcatcatcgaacaccagaaggtggtgaagggcaaccagaagagactggagagcctgcgggagctggccggcaaggaaaacctggaataccctagcgtgaccctgccacctcagcctcacaccaaggagggcgttgatgcctacaacgaagtgatcgcccgggtgcgaatgtgggtgaacctgaacctgtggcagaagctgaagctaagcagagatgatgccaagcctctgctgagactgaagggattcccttcctttcctctggtcgagagacaggccaacgaagtggactggtgggacatggtgtgtaacgtgaagaagctgatcaacgagaaaaaggaggatggcaaggtgttttggcagaatctggctggctacaagagacaggaagccctgagaccatacctgagcagcgaggaagatcggaagaagggaaagaaattcgctcggtaccagctgggcgacctgctgctgcacctggaaaagaagcacggcgaggactggggaaaggtgtacgacgaggcctgggagcggattgacaagaaagtggaaggcctgagcaagcacatcaagctggaagaggaacggagaagcgaggacgcccagagcaaggccgccctgaccgactggctgcgggctaaggccagcttcgtgatcgagggcctgaaggaggccgacaaggacgagttctgcagatgcgagctgaagctgcagaagtggtacggggacctgcggggaaagcccttcgccatcgaagccgagaacagcatcctggacatcagcggcttcagcaagcagtacaactgtgccttcatctggcagaaggacggcgtgaagaagctgaacctgtacctgatcatcaactacttcaagggcggcaagctgcggttcaagaagatcaaacctgaagccttcgaagccaacagattctacaccgtgatcaacaaaaagagcggcgagatcgtgcccatggaggtgaacttcaacttcgacgaccccaacctgatcatcctgcctctggcctttggcaagagacagggcagagaattcatctggaacgacctgctgtccctggaaaccggcagcctgaagctggccaacggaagagtgatcgagaagacactgtacaacagaagaacccggcaggatgagcctgccctgttcgtggccctgaccttcgagcggcgggaggtcctggactcctccaatatcaaaccaatgaacctgatcggcgtggcaagaggcgaaaacatccccgccgtgatcgccctgaccgaccccgagggctgcccactgagccggtttaaggatagcctgggaaacccaacccacatcctgagaatcggcgagagctataaggagaagcagcggaccatccaggccaagaaggaggtggagcagcggagagccggcggctacagccggaagtacgccagcaaagccaagaatctggcagacgatatggtgagaaacaccgctagagatctgctgtactacgccgtgacccaggatgccatgctgatcttcgccaacctgagccggggcttcggccggcagggcaagcggaccttcatggccgagagacagtacacacggatggaggactggctgaccgccaagctggcctacgagggcctgagcaagacctacctgtccaagacactggcccagtacacctccaagacatgcagcaactgtgggtttaccatcaccagcgccgactacgacagggtgctggagaagctgaagaagacagcaacaggctggatgaccacaattaacggcaaggagctgaaggtggagggccagattacctactacaacagatacaagagacagaacgtagtcaaggacctgtccgtcgagctggatagactgagcgaagaatctgtgaacaacgacatctcctcctggacaaagggcagaagcggagaagctctgagcctcctgaagaaaagattctcccatagacccgtgcaggagaagttcgtgtgcctgaactgcggcttcgagacacacgcagccgagcaagccgccctgaacatcgccagatcctggctgttcctgcggagccaggagtacaagaaataccagacaaacaagacaaccggcaacaccgataagagagccttcgtcgagacctggcagtccttttaccggaagaagcttaaggaggtgtggaaacctgccgtgcggtctggcggatctggcggaggctccaccagccccaagaaaaagagaaaagtctaagctgccttctgcggggcttgccttctggccatgcccttcttctctcccttgcacctgtacctcttggtctttgaataaagcctgagtaggaaggctagcaaaaaaaaaaaaaaaaaaaaaaaaaaaaaaaaaaaaaaaaaaaaaaaaaaaaaaaaaaaaaaaaaaaaaaaaaaaaaaaa

SEQ ID NO: 12674 - RNA, 5785 nt, synthetic construct
  source 1..5785: mol_type = other RNA
aggaaataagagagaaaagaagagtaagaagaaatataagagccaccatggcccctaagaagaagcgtaaagtgagccggatggaacgcctcgtctacgaggtgcggcagaagtgcagaaacatcgaggacatctgcatctcctgcggatctctgaacgtgaccctggagcacccactgttcatcggcggcatgtgccagaactgtaaaaactgttttctggagtgtgcctatcaatacgacgatgacggctaccagagctactgcaccatctgttgcggcggaagagaggtgctgatgtgtggaaataacaactgctgccggtgcttctgcgtggaatgcgtggacctgctggtgggccccggcgccgcccaggccgctattaaggaagatccttggaactgctacatgtgcggccacaagggcacatacggcctgctgagacggagagaggactggcctagcagactgcagatgttcttcgccaataaccacgaccaggagttcgacccccctaaggtgtaccctcccgtccccgccgagaagagaaagcccatccgggtcctgagcctgttcgatggcatcgccaccggtctgctggtgctgaaggacctgggcatccaggtggataggtacattgcctccgaggtgtgcgaggactccatcaccgtgggaatggtgcgtcatcagggcaagatcatgtacgtgggcgacgtgcggagcgtgacacagaagcatatccaggagtggggccctttcgacctggtgatcggcggcagcccttgcaatgacctgagcatcgtgaacccagcccggaagggcctgtacgagggaaccggcagactgttcttcgagttttacagactgctgcacgacgcccggcctaaggaaggcgacgaccggcccttcttttggctgttcgagaatgtggtggccatgggagtcagcgacaagcgggatattagccggttcctggagagcaaccccgtgatgatcgatgccaaggaagtgagcgccgcccaccgggccagatacttctggggcaatctgcctggcatgaacagacccctggccagcaccgtgaacgacaagctggagctgcaggagtgcctggagcacggccggatcgccaagttcagcaaggtgagaaccatcaccacccgaagcaacagcatcaaacaaggcaaggaccagcactttcctgtgttcatgaacgagaaggaggacatcctgtggtgtaccgagatggagagagtgttcgggttcccagtccactacacagatgtcagcaacatgtctagactggccagacagagactgctgggaagaagctggtccgtccctgtgatcagacacctgttcgcccctctgaaggagtacttcgcctgcgtgagcagcggcaacagcaacgccaacagccggggccccagcttctctagcggcctggtgccactgtccctgagagggagccacatgggccccatggagatctacaaaaccgtgagcgcctggaagcggcagcctgtgcgcgtgctgagcctgtttcggaatatcgataaagtcctgaaaagcctgggattcctggagagcggctctggctccggcggtggcaccctgaagtacgtggaggatgtgacaaacgtggtcagacgggatgtggagaagtggggccccttcgatctggtgtacggcagcacccaacccctgggcagctcttgtgaccggtgccctggctggtacatgtttcagttccaccggatcctgcagtacgccctgccgagacaggagtcccagcggccattcttttggattttcatggacaacttgctgctgaccgaggatgaccaggaaactaccactcggttcctgcagaccgaagccgtgaccctgcaggacgtgagaggccgggactaccagaacgccatgcgggtgtggtccaacatccctggactgaaaagcaagcacgcacctctgacccctaaagaagaggagtacctgcaggcccaggtgcggagcagaagcaagctggacgcccctaaggtggatctgctggtgaagaattgcctcctgcccctgagagagtacttcaagtatttcagccagaatagtctgcccctgggaggcagcggcggcggcaacctggaggccgtgaccttccaggacgtggccgtggagttcacctgcgaggagtggaggcacctggcccccccccagaaggagctgtacagggacgtgatgctggagaactacaagaacctggtgaggctgggcctggccgtgagcaagcccgacgtgatcagccagctggagaggagggaggccccctggatgcccggcggcatccagaggagcaggtgccccgactgggaggccagctgcggcggcccaagcagcggcgcccctcctcccagcggcggcagcccagccggctccccaacctctaccgaggagggcacctctgagtccgccacccccgagagcggccctggcacctccaccgagcccagcgagggcagcgcacccggcagccctgccggcagccccacctccacagaggagggaaccagcaccgagcccagcgaaggcagcgccccaggcaccagcaccgagcctagtgagcaggagattaaacggatcaacaagatcagaagaagacttgtgaaagacagcaacaccaagaaggccggcaagacaggccccatgaaaaccctgctggttagagtgatgacacccgatctgagagagcggctggaaaacctgagaaagaagcctgaaaatatcccccagcccatcagcaatacatctagagccaacctgaataagctgctgaccgattacaccgaaatgaagaaggcgatcctgcatgtgtactgggaagagttccagaaggaccctgtgggcctgatgagccgggtggcccagcctgccagcaagaagatcgatcagaacaagctgaaacctgagatggacgagaagggcaacctgaccaccgccggctttgcctgctctcagtgtggccagcccctgttcgtgtacaagctggagcaggtgtctgagaagggcaaggcttacaccaactacttcggacggtgcaatgtggccgagcacgaaaagctgatcctgctggcccagctgaagcccgagaaggatagcgacgaagccgtgacatatagcctgggaaagtttgggcagagggccctggatttctacagcattcatgtgaccaaggagtccacccaccccgtgaagcccctggcccagatcgccggaaacagatacgcctccggacctgtgggaaaggccctgagcgacgcatgtatgggcacaatcgcctccttcctgtctaagtaccaggacatcatcatcgaacaccagaaggtggtgaagggcaaccagaagagactggagagcctgcgggagctggccggcaaggaaaacctggaataccctagcgtgaccctgccacctcagcctcacaccaaggagggcgttgatgcctacaacgaagtgatcgcccgggtgcgaatgtgggtgaacctgaacctgtggcagaagctgaagctaagcagagatgatgccaagcctctgctgagactgaagggattcccttcctttcctctggtcgagagacaggccaacgaagtggactggtgggacatggtgtgtaacgtgaagaagctgatcaacgagaaaaaggaggatggcaaggtgttttggcagaatctggctggctacaagagacaggaagccctgagaccatacctgagcagcgaggaagatcggaagaagggaaagaaattcgctcggtaccagctgggcgacctgctgctgcacctggaaaagaagcacggcgaggactggggaaaggtgtacgacgaggcctgggagcggattgacaagaaagtggaaggcctgagcaagcacatcaagctggaagaggaacggagaagcgaggacgcccagagcaaggccgccctgaccgactggctgcgggctaaggccagcttcgtgatcgagggcctgaaggaggccgacaaggacgagttctgcagatgcgagctgaagctgcagaagtggtacggggacctgcggggaaagcccttcgccatcgaagccgagaacagcatcctggacatcagcggcttcagcaagcagtacaactgtgccttcatctggcagaaggacggcgtgaagaagctgaacctgtacctgatcatcaactacttcaagggcggcaagctgcggttcaagaagatcaaacctgaagccttcgaagccaacagattctacaccgtgatcaacaaaaagagcggcgagatcgtgcccatggaggtgaacttcaacttcgacgaccccaacctgatcatcctgcctctggcctttggcaagagacagggcagagaattcatctggaacgacctgctgtccctggaaaccggcagcctgaagctggccaacggaagagtgatcgagaagacactgtacaacagaagaacccggcaggatgagcctgccctgttcgtggccctgaccttcgagcggcgggaggtcctggactcctccaatatcaaaccaatgaacctgatcggcgtggcaagaggcgaaaacatccccgccgtgatcgccctgaccgaccccgagggctgcccactgagccggtttaaggatagcctgggaaacccaacccacatcctgagaatcggcgagagctataaggagaagcagcggaccatccaggccaagaaggaggtggagcagcggagagccggcggctacagccggaagtacgccagcaaagccaagaatctggcagacgatatggtgagaaacaccgctagagatctgctgtactacgccgtgacccaggatgccatgctgatcttcgccaacctgagccggggcttcggccggcagggcaagcggaccttcatggccgagagacagtacacacggatggaggactggctgaccgccaagctggcctacgagggcctgagcaagacctacctgtccaagacactggcccagtacacctccaagacatgcagcaactgtgggtttaccatcaccagcgccgactacgacagggtgctggagaagctgaagaagacagcaacaggctggatgaccacaattaacggcaaggagctgaaggtggagggccagattacctactacaacagatacaagagacagaacgtagtcaaggacctgtccgtcgagctggatagactgagcgaagaatctgtgaacaacgacatctcctcctggacaaagggcagaagcggagaagctctgagcctcctgaagaaaagattctcccatagacccgtgcaggagaagttcgtgtgcctgaactgcggcttcgagacacacgcagccgagcaagccgccctgaacatcgccagatcctggctgttcctgcggagccaggagtacaagaaataccagacaaacaagacaaccggcaacaccgataagagagccttcgtcgagacctggcagtccttttaccggaagaagcttaaggaggtgtggaaacctgccgtgcggtctggcggatctggcggaggctccaccagccccaagaaaaagagaaaagtctaagctgccttctgcggggcttgccttctggccatgcccttcttctctcccttgcacctgtacctcttggtctttgaataaagcctgagtaggaaggctagcaaaaaaaaaaaaaaaaaaaaaaaaaaaaaaaaaaaaaaaaaaaaaaaaaaaaaaaaaaaaaaaaaaaaaaaaaaaaaaaa

SEQ ID NO: 12675 - RNA, 5785 nt, synthetic construct
  source 1..5785: mol_type = other RNA
aggaaataagagagaaaagaagagtaagaagaaatataagagccaccatggcccctaagaagaagcgtaaagtgagccggatggaacgcctcgtctacgaggtgcggcagaagtgcagaaacatcgaggacatctgcatctcctgcggatctctgaacgtgaccctggagcacccactgttcatcggcggcatgtgccagaactgtaaaaactgttttctggagtgtgcctatcaatacgacgatgacggctaccagagctactgcaccatctgttgcggcggaagagaggtgctgatgtgtggaaataacaactgctgccggtgcttctgcgtggaatgcgtggacctgctggtgggccccggcgccgcccaggccgctattaaggaagatccttggaactgctacatgtgcggccacaagggcacatacggcctgctgagacggagagaggactggcctagcagactgcagatgttcttcgccaataaccacgaccaggagttcgacccccctaaggtgtaccctcccgtccccgccgagaagagaaagcccatccgggtcctgagcctgttcgatggcatcgccaccggtctgctggtgctgaaggacctgggcatccaggtggataggtacattgcctccgaggtgtgcgaggactccatcaccgtgggaatggtgcgtcatcagggcaagatcatgtacgtgggcgacgtgcggagcgtgacacagaagcatatccaggagtggggccctttcgacctggtgatcggcggcagcccttgcaatgacctgagcatcgtgaacccagcccggaagggcctgtacgagggaaccggcagactgttcttcgagttttacagactgctgcacgacgcccggcctaaggaaggcgacgaccggcccttcttttggctgttcgagaatgtggtggccatgggagtcagcgacaagcgggatattagccggttcctggagagcaaccccgtgatgatcgatgccaaggaagtgagcgccgcccaccgggccagatacttctggggcaatctgcctggcatgaacagacccctggccagcaccgtgaacgacaagctggagctgcaggagtgcctggagcacggccggatcgccaagttcagcaaggtgagaaccatcaccacccgaagcaacagcatcaaacaaggcaaggaccagcactttcctgtgttcatgaacgagaaggaggacatcctgtggtgtaccgagatggagagagtgttcgggttcccagtccactacacagatgtcagcaacatgtctagactggccagacagagactgctgggaagaagctggtccgtccctgtgatcagacacctgttcgcccctctgaaggagtacttcgcctgcgtgagcagcggcaacagcaacgccaacagccggggccccagcttctctagcggcctggtgccactgtccctgagagggagccacatgggccccatggagatctacaaaaccgtgagcgcctggaagcggcagcctgtgcgcgtgctgagcctgtttcggaatatcgataaagtcctgaaaagcctgggattcctggagagcggctctggctccggcggtggcaccctgaagtacgtggaggatgtgacaaacgtggtcagacgggatgtggagaagtggggccccttcgatctggtgtacggcagcacccaacccctgggcagctcttgtgaccggtgccctggctggtacatgtttcagttccaccggatcctgcagtacgccctgccgagacaggagtcccagcggccattcttttggattttcatggacaacttgctgctgaccgaggatgaccaggaaactaccactcggttcctgcagaccgaagccgtgaccctgcaggacgtgagaggccgggactaccagaacgccatgcgggtgtggtccaacatccctggactgaaaagcaagcacgcacctctgacccctaaagaagaggagtacctgcaggcccaggtgcggagcagaagcaagctggacgcccctaaggtggatctgctggtgaagaattgcctcctgcccctgagagagtacttcaagtatttcagccagaatagtctgcccctgggaggcagcggcggcggcaggcccagggccgtgaagttcgccgacgtggccgtgtacttcagccccgaggagtggggctgcctgaggcccgcccagagggccctgtacagggacgtgatgagggagacctacggccacctgagcgccctgggctgcagcggccccaagcccgccctgatcagctggctggagaggaacaccgacgactgggagcccgccgccctggacccccaggagtgccccaggggcctgaccgtgcagggcggcccaagcagcggcgcccctcctcccagcggcggcagcccagccggctccccaacctctaccgaggagggcacctctgagtccgccacccccgagagcggccctggcacctccaccgagcccagcgagggcagcgcacccggcagccctgccggcagccccacctccacagaggagggaaccagcaccgagcccagcgaaggcagcgccccaggcaccagcaccgagcctagtgagcaggagattaaacggatcaacaagatcagaagaagacttgtgaaagacagcaacaccaagaaggccggcaagacaggccccatgaaaaccctgctggttagagtgatgacacccgatctgagagagcggctggaaaacctgagaaagaagcctgaaaatatcccccagcccatcagcaatacatctagagccaacctgaataagctgctgaccgattacaccgaaatgaagaaggcgatcctgcatgtgtactgggaagagttccagaaggaccctgtgggcctgatgagccgggtggcccagcctgccagcaagaagatcgatcagaacaagctgaaacctgagatggacgagaagggcaacctgaccaccgccggctttgcctgctctcagtgtggccagcccctgttcgtgtacaagctggagcaggtgtctgagaagggcaaggcttacaccaactacttcggacggtgcaatgtggccgagcacgaaaagctgatcctgctggcccagctgaagcccgagaaggatagcgacgaagccgtgacatatagcctgggaaagtttgggcagagggccctggatttctacagcattcatgtgaccaaggagtccacccaccccgtgaagcccctggcccagatcgccggaaacagatacgcctccggacctgtgggaaaggccctgagcgacgcatgtatgggcacaatcgcctccttcctgtctaagtaccaggacatcatcatcgaacaccagaaggtggtgaagggcaaccagaagagactggagagcctgcgggagctggccggcaaggaaaacctggaataccctagcgtgaccctgccacctcagcctcacaccaaggagggcgttgatgcctacaacgaagtgatcgcccgggtgcgaatgtgggtgaacctgaacctgtggcagaagctgaagctaagcagagatgatgccaagcctctgctgagactgaagggattcccttcctttcctctggtcgagagacaggccaacgaagtggactggtgggacatggtgtgtaacgtgaagaagctgatcaacgagaaaaaggaggatggcaaggtgttttggcagaatctggctggctacaagagacaggaagccctgagaccatacctgagcagcgaggaagatcggaagaagggaaagaaattcgctcggtaccagctgggcgacctgctgctgcacctggaaaagaagcacggcgaggactggggaaaggtgtacgacgaggcctgggagcggattgacaagaaagtggaaggcctgagcaagcacatcaagctggaagaggaacggagaagcgaggacgcccagagcaaggccgccctgaccgactggctgcgggctaaggccagcttcgtgatcgagggcctgaaggaggccgacaaggacgagttctgcagatgcgagctgaagctgcagaagtggtacggggacctgcggggaaagcccttcgccatcgaagccgagaacagcatcctggacatcagcggcttcagcaagcagtacaactgtgccttcatctggcagaaggacggcgtgaagaagctgaacctgtacctgatcatcaactacttcaagggcggcaagctgcggttcaagaagatcaaacctgaagccttcgaagccaacagattctacaccgtgatcaacaaaaagagcggcgagatcgtgcccatggaggtgaacttcaacttcgacgaccccaacctgatcatcctgcctctggcctttggcaagagacagggcagagaattcatctggaacgacctgctgtccctggaaaccggcagcctgaagctggccaacggaagagtgatcgagaagacactgtacaacagaagaacccggcaggatgagcctgccctgttcgtggccctgaccttcgagcggcgggaggtcctggactcctccaatatcaaaccaatgaacctgatcggcgtggcaagaggcgaaaacatccccgccgtgatcgccctgaccgaccccgagggctgcccactgagccggtttaaggatagcctgggaaacccaacccacatcctgagaatcggcgagagctataaggagaagcagcggaccatccaggccaagaaggaggtggagcagcggagagccggcggctacagccggaagtacgccagcaaagccaagaatctggcagacgatatggtgagaaacaccgctagagatctgctgtactacgccgtgacccaggatgccatgctgatcttcgccaacctgagccggggcttcggccggcagggcaagcggaccttcatggccgagagacagtacacacggatggaggactggctgaccgccaagctggcctacgagggcctgagcaagacctacctgtccaagacactggcccagtacacctccaagacatgcagcaactgtgggtttaccatcaccagcgccgactacgacagggtgctggagaagctgaagaagacagcaacaggctggatgaccacaattaacggcaaggagctgaaggtggagggccagattacctactacaacagatacaagagacagaacgtagtcaaggacctgtccgtcgagctggatagactgagcgaagaatctgtgaacaacgacatctcctcctggacaaagggcagaagcggagaagctctgagcctcctgaagaaaagattctcccatagacccgtgcaggagaagttcgtgtgcctgaactgcggcttcgagacacacgcagccgagcaagccgccctgaacatcgccagatcctggctgttcctgcggagccaggagtacaagaaataccagacaaacaagacaaccggcaacaccgataagagagccttcgtcgagacctggcagtccttttaccggaagaagcttaaggaggtgtggaaacctgccgtgcggtctggcggatctggcggaggctccaccagccccaagaaaaagagaaaagtctaagctgccttctgcggggcttgccttctggccatgcccttcttctctcccttgcacctgtacctcttggtctttgaataaagcctgagtaggaaggctagcaaaaaaaaaaaaaaaaaaaaaaaaaaaaaaaaaaaaaaaaaaaaaaaaaaaaaaaaaaaaaaaaaaaaaaaaaaaaaaaa

SEQ ID NO: 12676 - RNA, 5785 nt, synthetic construct
  source 1..5785: mol_type = other RNA
aggaaataagagagaaaagaagagtaagaagaaatataagagccaccatggcccctaagaagaagcgtaaagtgagccggatggaacgcctcgtctacgaggtgcggcagaagtgcagaaacatcgaggacatctgcatctcctgcggatctctgaacgtgaccctggagcacccactgttcatcggcggcatgtgccagaactgtaaaaactgttttctggagtgtgcctatcaatacgacgatgacggctaccagagctactgcaccatctgttgcggcggaagagaggtgctgatgtgtggaaataacaactgctgccggtgcttctgcgtggaatgcgtggacctgctggtgggccccggcgccgcccaggccgctattaaggaagatccttggaactgctacatgtgcggccacaagggcacatacggcctgctgagacggagagaggactggcctagcagactgcagatgttcttcgccaataaccacgaccaggagttcgacccccctaaggtgtaccctcccgtccccgccgagaagagaaagcccatccgggtcctgagcctgttcgatggcatcgccaccggtctgctggtgctgaaggacctgggcatccaggtggataggtacattgcctccgaggtgtgcgaggactccatcaccgtgggaatggtgcgtcatcagggcaagatcatgtacgtgggcgacgtgcggagcgtgacacagaagcatatccaggagtggggccctttcgacctggtgatcggcggcagcccttgcaatgacctgagcatcgtgaacccagcccggaagggcctgtacgagggaaccggcagactgttcttcgagttttacagactgctgcacgacgcccggcctaaggaaggcgacgaccggcccttcttttggctgttcgagaatgtggtggccatgggagtcagcgacaagcgggatattagccggttcctggagagcaaccccgtgatgatcgatgccaaggaagtgagcgccgcccaccgggccagatacttctggggcaatctgcctggcatgaacagacccctggccagcaccgtgaacgacaagctggagctgcaggagtgcctggagcacggccggatcgccaagttcagcaaggtgagaaccatcaccacccgaagcaacagcatcaaacaaggcaaggaccagcactttcctgtgttcatgaacgagaaggaggacatcctgtggtgtaccgagatggagagagtgttcgggttcccagtccactacacagatgtcagcaacatgtctagactggccagacagagactgctgggaagaagctggtccgtccctgtgatcagacacctgttcgcccctctgaaggagtacttcgcctgcgtgagcagcggcaacagcaacgccaacagccggggccccagcttctctagcggcctggtgccactgtccctgagagggagccacatgggccccatggagatctacaaaaccgtgagcgcctggaagcggcagcctgtgcgcgtgctgagcctgtttcggaatatcgataaagtcctgaaaagcctgggattcctggagagcggctctggctccggcggtggcaccctgaagtacgtggaggatgtgacaaacgtggtcagacgggatgtggagaagtggggccccttcgatctggtgtacggcagcacccaacccctgggcagctcttgtgaccggtgccctggctggtacatgtttcagttccaccggatcctgcagtacgccctgccgagacaggagtcccagcggccattcttttggattttcatggacaacttgctgctgaccgaggatgaccaggaaactaccactcggttcctgcagaccgaagccgtgaccctgcaggacgtgagaggccgggactaccagaacgccatgcgggtgtggtccaacatccctggactgaaaagcaagcacgcacctctgacccctaaagaagaggagtacctgcaggcccaggtgcggagcagaagcaagctggacgcccctaaggtggatctgctggtgaagaattgcctcctgcccctgagagagtacttcaagtatttcagccagaatagtctgcccctgggaggcagcggcggcggcaggcagggcagcgtgaccttccaggacgtggccgtggacttcagctgggaggagtggggcaggctgggccccacccagaaggagctgtacagggaggtgatgctggagaactacaggaacctggtgtgcctgggcctggaggtgagcaagcccgacgtggtgtaccagctggagaggggcgaggccccctggatgcccgagggcgccgtgaggaggagctgcagccagaactggggcgccaggggcggcccaagcagcggcgcccctcctcccagcggcggcagcccagccggctccccaacctctaccgaggagggcacctctgagtccgccacccccgagagcggccctggcacctccaccgagcccagcgagggcagcgcacccggcagccctgccggcagccccacctccacagaggagggaaccagcaccgagcccagcgaaggcagcgccccaggcaccagcaccgagcctagtgagcaggagattaaacggatcaacaagatcagaagaagacttgtgaaagacagcaacaccaagaaggccggcaagacaggccccatgaaaaccctgctggttagagtgatgacacccgatctgagagagcggctggaaaacctgagaaagaagcctgaaaatatcccccagcccatcagcaatacatctagagccaacctgaataagctgctgaccgattacaccgaaatgaagaaggcgatcctgcatgtgtactgggaagagttccagaaggaccctgtgggcctgatgagccgggtggcccagcctgccagcaagaagatcgatcagaacaagctgaaacctgagatggacgagaagggcaacctgaccaccgccggctttgcctgctctcagtgtggccagcccctgttcgtgtacaagctggagcaggtgtctgagaagggcaaggcttacaccaactacttcggacggtgcaatgtggccgagcacgaaaagctgatcctgctggcccagctgaagcccgagaaggatagcgacgaagccgtgacatatagcctgggaaagtttgggcagagggccctggatttctacagcattcatgtgaccaaggagtccacccaccccgtgaagcccctggcccagatcgccggaaacagatacgcctccggacctgtgggaaaggccctgagcgacgcatgtatgggcacaatcgcctccttcctgtctaagtaccaggacatcatcatcgaacaccagaaggtggtgaagggcaaccagaagagactggagagcctgcgggagctggccggcaaggaaaacctggaataccctagcgtgaccctgccacctcagcctcacaccaaggagggcgttgatgcctacaacgaagtgatcgcccgggtgcgaatgtgggtgaacctgaacctgtggcagaagctgaagctaagcagagatgatgccaagcctctgctgagactgaagggattcccttcctttcctctggtcgagagacaggccaacgaagtggactggtgggacatggtgtgtaacgtgaagaagctgatcaacgagaaaaaggaggatggcaaggtgttttggcagaatctggctggctacaagagacaggaagccctgagaccatacctgagcagcgaggaagatcggaagaagggaaagaaattcgctcggtaccagctgggcgacctgctgctgcacctggaaaagaagcacggcgaggactggggaaaggtgtacgacgaggcctgggagcggattgacaagaaagtggaaggcctgagcaagcacatcaagctggaagaggaacggagaagcgaggacgcccagagcaaggccgccctgaccgactggctgcgggctaaggccagcttcgtgatcgagggcctgaaggaggccgacaaggacgagttctgcagatgcgagctgaagctgcagaagtggtacggggacctgcggggaaagcccttcgccatcgaagccgagaacagcatcctggacatcagcggcttcagcaagcagtacaactgtgccttcatctggcagaaggacggcgtgaagaagctgaacctgtacctgatcatcaactacttcaagggcggcaagctgcggttcaagaagatcaaacctgaagccttcgaagccaacagattctacaccgtgatcaacaaaaagagcggcgagatcgtgcccatggaggtgaacttcaacttcgacgaccccaacctgatcatcctgcctctggcctttggcaagagacagggcagagaattcatctggaacgacctgctgtccctggaaaccggcagcctgaagctggccaacggaagagtgatcgagaagacactgtacaacagaagaacccggcaggatgagcctgccctgttcgtggccctgaccttcgagcggcgggaggtcctggactcctccaatatcaaaccaatgaacctgatcggcgtggcaagaggcgaaaacatccccgccgtgatcgccctgaccgaccccgagggctgcccactgagccggtttaaggatagcctgggaaacccaacccacatcctgagaatcggcgagagctataaggagaagcagcggaccatccaggccaagaaggaggtggagcagcggagagccggcggctacagccggaagtacgccagcaaagccaagaatctggcagacgatatggtgagaaacaccgctagagatctgctgtactacgccgtgacccaggatgccatgctgatcttcgccaacctgagccggggcttcggccggcagggcaagcggaccttcatggccgagagacagtacacacggatggaggactggctgaccgccaagctggcctacgagggcctgagcaagacctacctgtccaagacactggcccagtacacctccaagacatgcagcaactgtgggtttaccatcaccagcgccgactacgacagggtgctggagaagctgaagaagacagcaacaggctggatgaccacaattaacggcaaggagctgaaggtggagggccagattacctactacaacagatacaagagacagaacgtagtcaaggacctgtccgtcgagctggatagactgagcgaagaatctgtgaacaacgacatctcctcctggacaaagggcagaagcggagaagctctgagcctcctgaagaaaagattctcccatagacccgtgcaggagaagttcgtgtgcctgaactgcggcttcgagacacacgcagccgagcaagccgccctgaacatcgccagatcctggctgttcctgcggagccaggagtacaagaaataccagacaaacaagacaaccggcaacaccgataagagagccttcgtcgagacctggcagtccttttaccggaagaagcttaaggaggtgtggaaacctgccgtgcggtctggcggatctggcggaggctccaccagccccaagaaaaagagaaaagtctaagctgccttctgcggggcttgccttctggccatgcccttcttctctcccttgcacctgtacctcttggtctttgaataaagcctgagtaggaaggctagcaaaaaaaaaaaaaaaaaaaaaaaaaaaaaaaaaaaaaaaaaaaaaaaaaaaaaaaaaaaaaaaaaaaaaaaaaaaaaaaa

SEQ ID NO: 12677 - RNA, 5785 nt, synthetic construct
  source 1..5785: mol_type = other RNA
aggaaataagagagaaaagaagagtaagaagaaatataagagccaccatggcccctaagaagaagcgtaaagtgagccggatggaacgcctcgtctacgaggtgcggcagaagtgcagaaacatcgaggacatctgcatctcctgcggatctctgaacgtgaccctggagcacccactgttcatcggcggcatgtgccagaactgtaaaaactgttttctggagtgtgcctatcaatacgacgatgacggctaccagagctactgcaccatctgttgcggcggaagagaggtgctgatgtgtggaaataacaactgctgccggtgcttctgcgtggaatgcgtggacctgctggtgggccccggcgccgcccaggccgctattaaggaagatccttggaactgctacatgtgcggccacaagggcacatacggcctgctgagacggagagaggactggcctagcagactgcagatgttcttcgccaataaccacgaccaggagttcgacccccctaaggtgtaccctcccgtccccgccgagaagagaaagcccatccgggtcctgagcctgttcgatggcatcgccaccggtctgctggtgctgaaggacctgggcatccaggtggataggtacattgcctccgaggtgtgcgaggactccatcaccgtgggaatggtgcgtcatcagggcaagatcatgtacgtgggcgacgtgcggagcgtgacacagaagcatatccaggagtggggccctttcgacctggtgatcggcggcagcccttgcaatgacctgagcatcgtgaacccagcccggaagggcctgtacgagggaaccggcagactgttcttcgagttttacagactgctgcacgacgcccggcctaaggaaggcgacgaccggcccttcttttggctgttcgagaatgtggtggccatgggagtcagcgacaagcgggatattagccggttcctggagagcaaccccgtgatgatcgatgccaaggaagtgagcgccgcccaccgggccagatacttctggggcaatctgcctggcatgaacagacccctggccagcaccgtgaacgacaagctggagctgcaggagtgcctggagcacggccggatcgccaagttcagcaaggtgagaaccatcaccacccgaagcaacagcatcaaacaaggcaaggaccagcactttcctgtgttcatgaacgagaaggaggacatcctgtggtgtaccgagatggagagagtgttcgggttcccagtccactacacagatgtcagcaacatgtctagactggccagacagagactgctgggaagaagctggtccgtccctgtgatcagacacctgttcgcccctctgaaggagtacttcgcctgcgtgagcagcggcaacagcaacgccaacagccggggccccagcttctctagcggcctggtgccactgtccctgagagggagccacatgggccccatggagatctacaaaaccgtgagcgcctggaagcggcagcctgtgcgcgtgctgagcctgtttcggaatatcgataaagtcctgaaaagcctgggattcctggagagcggctctggctccggcggtggcaccctgaagtacgtggaggatgtgacaaacgtggtcagacgggatgtggagaagtggggccccttcgatctggtgtacggcagcacccaacccctgggcagctcttgtgaccggtgccctggctggtacatgtttcagttccaccggatcctgcagtacgccctgccgagacaggagtcccagcggccattcttttggattttcatggacaacttgctgctgaccgaggatgaccaggaaactaccactcggttcctgcagaccgaagccgtgaccctgcaggacgtgagaggccgggactaccagaacgccatgcgggtgtggtccaacatccctggactgaaaagcaagcacgcacctctgacccctaaagaagaggagtacctgcaggcccaggtgcggagcagaagcaagctggacgcccctaaggtggatctgctggtgaagaattgcctcctgcccctgagagagtacttcaagtatttcagccagaatagtctgcccctgggaggcagcggcggcggccaggccgaggtgaccttcgaggacgtggccgtgctgctgagcagggaggagtggggcaggctgggccccgcccagaagggcctgtacagggacgtgatgctggagacctacaggaacctggtgagcctgggcgccggccacgccggccccaagcccggcgtgatcgcccagctggagaggggcgacgagccctgggtgctggacatgcagggcagggagcagagcaccatcgacggcagcgccggcggcccaagcagcggcgcccctcctcccagcggcggcagcccagccggctccccaacctctaccgaggagggcacctctgagtccgccacccccgagagcggccctggcacctccaccgagcccagcgagggcagcgcacccggcagccctgccggcagccccacctccacagaggagggaaccagcaccgagcccagcgaaggcagcgccccaggcaccagcaccgagcctagtgagcaggagattaaacggatcaacaagatcagaagaagacttgtgaaagacagcaacaccaagaaggccggcaagacaggccccatgaaaaccctgctggttagagtgatgacacccgatctgagagagcggctggaaaacctgagaaagaagcctgaaaatatcccccagcccatcagcaatacatctagagccaacctgaataagctgctgaccgattacaccgaaatgaagaaggcgatcctgcatgtgtactgggaagagttccagaaggaccctgtgggcctgatgagccgggtggcccagcctgccagcaagaagatcgatcagaacaagctgaaacctgagatggacgagaagggcaacctgaccaccgccggctttgcctgctctcagtgtggccagcccctgttcgtgtacaagctggagcaggtgtctgagaagggcaaggcttacaccaactacttcggacggtgcaatgtggccgagcacgaaaagctgatcctgctggcccagctgaagcccgagaaggatagcgacgaagccgtgacatatagcctgggaaagtttgggcagagggccctggatttctacagcattcatgtgaccaaggagtccacccaccccgtgaagcccctggcccagatcgccggaaacagatacgcctccggacctgtgggaaaggccctgagcgacgcatgtatgggcacaatcgcctccttcctgtctaagtaccaggacatcatcatcgaacaccagaaggtggtgaagggcaaccagaagagactggagagcctgcgggagctggccggcaaggaaaacctggaataccctagcgtgaccctgccacctcagcctcacaccaaggagggcgttgatgcctacaacgaagtgatcgcccgggtgcgaatgtgggtgaacctgaacctgtggcagaagctgaagctaagcagagatgatgccaagcctctgctgagactgaagggattcccttcctttcctctggtcgagagacaggccaacgaagtggactggtgggacatggtgtgtaacgtgaagaagctgatcaacgagaaaaaggaggatggcaaggtgttttggcagaatctggctggctacaagagacaggaagccctgagaccatacctgagcagcgaggaagatcggaagaagggaaagaaattcgctcggtaccagctgggcgacctgctgctgcacctggaaaagaagcacggcgaggactggggaaaggtgtacgacgaggcctgggagcggattgacaagaaagtggaaggcctgagcaagcacatcaagctggaagaggaacggagaagcgaggacgcccagagcaaggccgccctgaccgactggctgcgggctaaggccagcttcgtgatcgagggcctgaaggaggccgacaaggacgagttctgcagatgcgagctgaagctgcagaagtggtacggggacctgcggggaaagcccttcgccatcgaagccgagaacagcatcctggacatcagcggcttcagcaagcagtacaactgtgccttcatctggcagaaggacggcgtgaagaagctgaacctgtacctgatcatcaactacttcaagggcggcaagctgcggttcaagaagatcaaacctgaagccttcgaagccaacagattctacaccgtgatcaacaaaaagagcggcgagatcgtgcccatggaggtgaacttcaacttcgacgaccccaacctgatcatcctgcctctggcctttggcaagagacagggcagagaattcatctggaacgacctgctgtccctggaaaccggcagcctgaagctggccaacggaagagtgatcgagaagacactgtacaacagaagaacccggcaggatgagcctgccctgttcgtggccctgaccttcgagcggcgggaggtcctggactcctccaatatcaaaccaatgaacctgatcggcgtggcaagaggcgaaaacatccccgccgtgatcgccctgaccgaccccgagggctgcccactgagccggtttaaggatagcctgggaaacccaacccacatcctgagaatcggcgagagctataaggagaagcagcggaccatccaggccaagaaggaggtggagcagcggagagccggcggctacagccggaagtacgccagcaaagccaagaatctggcagacgatatggtgagaaacaccgctagagatctgctgtactacgccgtgacccaggatgccatgctgatcttcgccaacctgagccggggcttcggccggcagggcaagcggaccttcatggccgagagacagtacacacggatggaggactggctgaccgccaagctggcctacgagggcctgagcaagacctacctgtccaagacactggcccagtacacctccaagacatgcagcaactgtgggtttaccatcaccagcgccgactacgacagggtgctggagaagctgaagaagacagcaacaggctggatgaccacaattaacggcaaggagctgaaggtggagggccagattacctactacaacagatacaagagacagaacgtagtcaaggacctgtccgtcgagctggatagactgagcgaagaatctgtgaacaacgacatctcctcctggacaaagggcagaagcggagaagctctgagcctcctgaagaaaagattctcccatagacccgtgcaggagaagttcgtgtgcctgaactgcggcttcgagacacacgcagccgagcaagccgccctgaacatcgccagatcctggctgttcctgcggagccaggagtacaagaaataccagacaaacaagacaaccggcaacaccgataagagagccttcgtcgagacctggcagtccttttaccggaagaagcttaaggaggtgtggaaacctgccgtgcggtctggcggatctggcggaggctccaccagccccaagaaaaagagaaaagtctaagctgccttctgcggggcttgccttctggccatgcccttcttctctcccttgcacctgtacctcttggtctttgaataaagcctgagtaggaaggctagcaaaaaaaaaaaaaaaaaaaaaaaaaaaaaaaaaaaaaaaaaaaaaaaaaaaaaaaaaaaaaaaaaaaaaaaaaaaaaaaa

SEQ ID NO: 12678 - RNA, 5785 nt, synthetic construct
  source 1..5785: mol_type = other RNA
aggaaataagagagaaaagaagagtaagaagaaatataagagccaccatggcccctaagaagaagcgtaaagtgagccggatggaacgcctcgtctacgaggtgcggcagaagtgcagaaacatcgaggacatctgcatctcctgcggatctctgaacgtgaccctggagcacccactgttcatcggcggcatgtgccagaactgtaaaaactgttttctggagtgtgcctatcaatacgacgatgacggctaccagagctactgcaccatctgttgcggcggaagagaggtgctgatgtgtggaaataacaactgctgccggtgcttctgcgtggaatgcgtggacctgctggtgggccccggcgccgcccaggccgctattaaggaagatccttggaactgctacatgtgcggccacaagggcacatacggcctgctgagacggagagaggactggcctagcagactgcagatgttcttcgccaataaccacgaccaggagttcgacccccctaaggtgtaccctcccgtccccgccgagaagagaaagcccatccgggtcctgagcctgttcgatggcatcgccaccggtctgctggtgctgaaggacctgggcatccaggtggataggtacattgcctccgaggtgtgcgaggactccatcaccgtgggaatggtgcgtcatcagggcaagatcatgtacgtgggcgacgtgcggagcgtgacacagaagcatatccaggagtggggccctttcgacctggtgatcggcggcagcccttgcaatgacctgagcatcgtgaacccagcccggaagggcctgtacgagggaaccggcagactgttcttcgagttttacagactgctgcacgacgcccggcctaaggaaggcgacgaccggcccttcttttggctgttcgagaatgtggtggccatgggagtcagcgacaagcgggatattagccggttcctggagagcaaccccgtgatgatcgatgccaaggaagtgagcgccgcccaccgggccagatacttctggggcaatctgcctggcatgaacagacccctggccagcaccgtgaacgacaagctggagctgcaggagtgcctggagcacggccggatcgccaagttcagcaaggtgagaaccatcaccacccgaagcaacagcatcaaacaaggcaaggaccagcactttcctgtgttcatgaacgagaaggaggacatcctgtggtgtaccgagatggagagagtgttcgggttcccagtccactacacagatgtcagcaacatgtctagactggccagacagagactgctgggaagaagctggtccgtccctgtgatcagacacctgttcgcccctctgaaggagtacttcgcctgcgtgagcagcggcaacagcaacgccaacagccggggccccagcttctctagcggcctggtgccactgtccctgagagggagccacatgggccccatggagatctacaaaaccgtgagcgcctggaagcggcagcctgtgcgcgtgctgagcctgtttcggaatatcgataaagtcctgaaaagcctgggattcctggagagcggctctggctccggcggtggcaccctgaagtacgtggaggatgtgacaaacgtggtcagacgggatgtggagaagtggggccccttcgatctggtgtacggcagcacccaacccctgggcagctcttgtgaccggtgccctggctggtacatgtttcagttccaccggatcctgcagtacgccctgccgagacaggagtcccagcggccattcttttggattttcatggacaacttgctgctgaccgaggatgaccaggaaactaccactcggttcctgcagaccgaagccgtgaccctgcaggacgtgagaggccgggactaccagaacgccatgcgggtgtggtccaacatccctggactgaaaagcaagcacgcacctctgacccctaaagaagaggagtacctgcaggcccaggtgcggagcagaagcaagctggacgcccctaaggtggatctgctggtgaagaattgcctcctgcccctgagagagtacttcaagtatttcagccagaatagtctgcccctgggaggcagcggcggcggcagcagccaggagctgctgaccttcagggacgtggccatcgagttcagccaggaggagtggaggtgcctgaaccacacccagagggagctgtacagggacgtgatgctggagaactacggccacctgctgttcctgggcctgatcgtgagcaagcccgacctggtgagcttcctggagcagaccaaggacccctgggacggcaagagcaagaagaccgtggccttccaccccggcaggtgggagggcggcccaagcagcggcgcccctcctcccagcggcggcagcccagccggctccccaacctctaccgaggagggcacctctgagtccgccacccccgagagcggccctggcacctccaccgagcccagcgagggcagcgcacccggcagccctgccggcagccccacctccacagaggagggaaccagcaccgagcccagcgaaggcagcgccccaggcaccagcaccgagcctagtgagcaggagattaaacggatcaacaagatcagaagaagacttgtgaaagacagcaacaccaagaaggccggcaagacaggccccatgaaaaccctgctggttagagtgatgacacccgatctgagagagcggctggaaaacctgagaaagaagcctgaaaatatcccccagcccatcagcaatacatctagagccaacctgaataagctgctgaccgattacaccgaaatgaagaaggcgatcctgcatgtgtactgggaagagttccagaaggaccctgtgggcctgatgagccgggtggcccagcctgccagcaagaagatcgatcagaacaagctgaaacctgagatggacgagaagggcaacctgaccaccgccggctttgcctgctctcagtgtggccagcccctgttcgtgtacaagctggagcaggtgtctgagaagggcaaggcttacaccaactacttcggacggtgcaatgtggccgagcacgaaaagctgatcctgctggcccagctgaagcccgagaaggatagcgacgaagccgtgacatatagcctgggaaagtttgggcagagggccctggatttctacagcattcatgtgaccaaggagtccacccaccccgtgaagcccctggcccagatcgccggaaacagatacgcctccggacctgtgggaaaggccctgagcgacgcatgtatgggcacaatcgcctccttcctgtctaagtaccaggacatcatcatcgaacaccagaaggtggtgaagggcaaccagaagagactggagagcctgcgggagctggccggcaaggaaaacctggaataccctagcgtgaccctgccacctcagcctcacaccaaggagggcgttgatgcctacaacgaagtgatcgcccgggtgcgaatgtgggtgaacctgaacctgtggcagaagctgaagctaagcagagatgatgccaagcctctgctgagactgaagggattcccttcctttcctctggtcgagagacaggccaacgaagtggactggtgggacatggtgtgtaacgtgaagaagctgatcaacgagaaaaaggaggatggcaaggtgttttggcagaatctggctggctacaagagacaggaagccctgagaccatacctgagcagcgaggaagatcggaagaagggaaagaaattcgctcggtaccagctgggcgacctgctgctgcacctggaaaagaagcacggcgaggactggggaaaggtgtacgacgaggcctgggagcggattgacaagaaagtggaaggcctgagcaagcacatcaagctggaagaggaacggagaagcgaggacgcccagagcaaggccgccctgaccgactggctgcgggctaaggccagcttcgtgatcgagggcctgaaggaggccgacaaggacgagttctgcagatgcgagctgaagctgcagaagtggtacggggacctgcggggaaagcccttcgccatcgaagccgagaacagcatcctggacatcagcggcttcagcaagcagtacaactgtgccttcatctggcagaaggacggcgtgaagaagctgaacctgtacctgatcatcaactacttcaagggcggcaagctgcggttcaagaagatcaaacctgaagccttcgaagccaacagattctacaccgtgatcaacaaaaagagcggcgagatcgtgcccatggaggtgaacttcaacttcgacgaccccaacctgatcatcctgcctctggcctttggcaagagacagggcagagaattcatctggaacgacctgctgtccctggaaaccggcagcctgaagctggccaacggaagagtgatcgagaagacactgtacaacagaagaacccggcaggatgagcctgccctgttcgtggccctgaccttcgagcggcgggaggtcctggactcctccaatatcaaaccaatgaacctgatcggcgtggcaagaggcgaaaacatccccgccgtgatcgccctgaccgaccccgagggctgcccactgagccggtttaaggatagcctgggaaacccaacccacatcctgagaatcggcgagagctataaggagaagcagcggaccatccaggccaagaaggaggtggagcagcggagagccggcggctacagccggaagtacgccagcaaagccaagaatctggcagacgatatggtgagaaacaccgctagagatctgctgtactacgccgtgacccaggatgccatgctgatcttcgccaacctgagccggggcttcggccggcagggcaagcggaccttcatggccgagagacagtacacacggatggaggactggctgaccgccaagctggcctacgagggcctgagcaagacctacctgtccaagacactggcccagtacacctccaagacatgcagcaactgtgggtttaccatcaccagcgccgactacgacagggtgctggagaagctgaagaagacagcaacaggctggatgaccacaattaacggcaaggagctgaaggtggagggccagattacctactacaacagatacaagagacagaacgtagtcaaggacctgtccgtcgagctggatagactgagcgaagaatctgtgaacaacgacatctcctcctggacaaagggcagaagcggagaagctctgagcctcctgaagaaaagattctcccatagacccgtgcaggagaagttcgtgtgcctgaactgcggcttcgagacacacgcagccgagcaagccgccctgaacatcgccagatcctggctgttcctgcggagccaggagtacaagaaataccagacaaacaagacaaccggcaacaccgataagagagccttcgtcgagacctggcagtccttttaccggaagaagcttaaggaggtgtggaaacctgccgtgcggtctggcggatctggcggaggctccaccagccccaagaaaaagagaaaagtctaagctgccttctgcggggcttgccttctggccatgcccttcttctctcccttgcacctgtacctcttggtctttgaataaagcctgagtaggaaggctagcaaaaaaaaaaaaaaaaaaaaaaaaaaaaaaaaaaaaaaaaaaaaaaaaaaaaaaaaaaaaaaaaaaaaaaaaaaaaaaaa

SEQ ID NO: 12679 - RNA, 5785 nt, synthetic construct
  source 1..5785: mol_type = other RNA
aggaaataagagagaaaagaagagtaagaagaaatataagagccaccatggcccctaagaagaagcgtaaagtgagccggatggaacgcctcgtctacgaggtgcggcagaagtgcagaaacatcgaggacatctgcatctcctgcggatctctgaacgtgaccctggagcacccactgttcatcggcggcatgtgccagaactgtaaaaactgttttctggagtgtgcctatcaatacgacgatgacggctaccagagctactgcaccatctgttgcggcggaagagaggtgctgatgtgtggaaataacaactgctgccggtgcttctgcgtggaatgcgtggacctgctggtgggccccggcgccgcccaggccgctattaaggaagatccttggaactgctacatgtgcggccacaagggcacatacggcctgctgagacggagagaggactggcctagcagactgcagatgttcttcgccaataaccacgaccaggagttcgacccccctaaggtgtaccctcccgtccccgccgagaagagaaagcccatccgggtcctgagcctgttcgatggcatcgccaccggtctgctggtgctgaaggacctgggcatccaggtggataggtacattgcctccgaggtgtgcgaggactccatcaccgtgggaatggtgcgtcatcagggcaagatcatgtacgtgggcgacgtgcggagcgtgacacagaagcatatccaggagtggggccctttcgacctggtgatcggcggcagcccttgcaatgacctgagcatcgtgaacccagcccggaagggcctgtacgagggaaccggcagactgttcttcgagttttacagactgctgcacgacgcccggcctaaggaaggcgacgaccggcccttcttttggctgttcgagaatgtggtggccatgggagtcagcgacaagcgggatattagccggttcctggagagcaaccccgtgatgatcgatgccaaggaagtgagcgccgcccaccgggccagatacttctggggcaatctgcctggcatgaacagacccctggccagcaccgtgaacgacaagctggagctgcaggagtgcctggagcacggccggatcgccaagttcagcaaggtgagaaccatcaccacccgaagcaacagcatcaaacaaggcaaggaccagcactttcctgtgttcatgaacgagaaggaggacatcctgtggtgtaccgagatggagagagtgttcgggttcccagtccactacacagatgtcagcaacatgtctagactggccagacagagactgctgggaagaagctggtccgtccctgtgatcagacacctgttcgcccctctgaaggagtacttcgcctgcgtgagcagcggcaacagcaacgccaacagccggggccccagcttctctagcggcctggtgccactgtccctgagagggagccacatgggccccatggagatctacaaaaccgtgagcgcctggaagcggcagcctgtgcgcgtgctgagcctgtttcggaatatcgataaagtcctgaaaagcctgggattcctggagagcggctctggctccggcggtggcaccctgaagtacgtggaggatgtgacaaacgtggtcagacgggatgtggagaagtggggccccttcgatctggtgtacggcagcacccaacccctgggcagctcttgtgaccggtgccctggctggtacatgtttcagttccaccggatcctgcagtacgccctgccgagacaggagtcccagcggccattcttttggattttcatggacaacttgctgctgaccgaggatgaccaggaaactaccactcggttcctgcagaccgaagccgtgaccctgcaggacgtgagaggccgggactaccagaacgccatgcgggtgtggtccaacatccctggactgaaaagcaagcacgcacctctgacccctaaagaagaggagtacctgcaggcccaggtgcggagcagaagcaagctggacgcccctaaggtggatctgctggtgaagaattgcctcctgcccctgagagagtacttcaagtatttcagccagaatagtctgcccctgggaggcagcggcggcggcctgcaggtgagcgtgagcttcgaggacgtgaccgtgaacttcagcagggaggagtggcagcacctggaccccgcccagaggaggctgtacagggacgtgaccctggagaactacagccacctgaggagcgtgggctaccaggtgcccaagcccgaggtgatcttcaagctggagcagggcgagggcccctggaccctggagggcgagaccccccaccagagctgcagcggcgaggacatcggcggcggcccaagcagcggcgcccctcctcccagcggcggcagcccagccggctccccaacctctaccgaggagggcacctctgagtccgccacccccgagagcggccctggcacctccaccgagcccagcgagggcagcgcacccggcagccctgccggcagccccacctccacagaggagggaaccagcaccgagcccagcgaaggcagcgccccaggcaccagcaccgagcctagtgagcaggagattaaacggatcaacaagatcagaagaagacttgtgaaagacagcaacaccaagaaggccggcaagacaggccccatgaaaaccctgctggttagagtgatgacacccgatctgagagagcggctggaaaacctgagaaagaagcctgaaaatatcccccagcccatcagcaatacatctagagccaacctgaataagctgctgaccgattacaccgaaatgaagaaggcgatcctgcatgtgtactgggaagagttccagaaggaccctgtgggcctgatgagccgggtggcccagcctgccagcaagaagatcgatcagaacaagctgaaacctgagatggacgagaagggcaacctgaccaccgccggctttgcctgctctcagtgtggccagcccctgttcgtgtacaagctggagcaggtgtctgagaagggcaaggcttacaccaactacttcggacggtgcaatgtggccgagcacgaaaagctgatcctgctggcccagctgaagcccgagaaggatagcgacgaagccgtgacatatagcctgggaaagtttgggcagagggccctggatttctacagcattcatgtgaccaaggagtccacccaccccgtgaagcccctggcccagatcgccggaaacagatacgcctccggacctgtgggaaaggccctgagcgacgcatgtatgggcacaatcgcctccttcctgtctaagtaccaggacatcatcatcgaacaccagaaggtggtgaagggcaaccagaagagactggagagcctgcgggagctggccggcaaggaaaacctggaataccctagcgtgaccctgccacctcagcctcacaccaaggagggcgttgatgcctacaacgaagtgatcgcccgggtgcgaatgtgggtgaacctgaacctgtggcagaagctgaagctaagcagagatgatgccaagcctctgctgagactgaagggattcccttcctttcctctggtcgagagacaggccaacgaagtggactggtgggacatggtgtgtaacgtgaagaagctgatcaacgagaaaaaggaggatggcaaggtgttttggcagaatctggctggctacaagagacaggaagccctgagaccatacctgagcagcgaggaagatcggaagaagggaaagaaattcgctcggtaccagctgggcgacctgctgctgcacctggaaaagaagcacggcgaggactggggaaaggtgtacgacgaggcctgggagcggattgacaagaaagtggaaggcctgagcaagcacatcaagctggaagaggaacggagaagcgaggacgcccagagcaaggccgccctgaccgactggctgcgggctaaggccagcttcgtgatcgagggcctgaaggaggccgacaaggacgagttctgcagatgcgagctgaagctgcagaagtggtacggggacctgcggggaaagcccttcgccatcgaagccgagaacagcatcctggacatcagcggcttcagcaagcagtacaactgtgccttcatctggcagaaggacggcgtgaagaagctgaacctgtacctgatcatcaactacttcaagggcggcaagctgcggttcaagaagatcaaacctgaagccttcgaagccaacagattctacaccgtgatcaacaaaaagagcggcgagatcgtgcccatggaggtgaacttcaacttcgacgaccccaacctgatcatcctgcctctggcctttggcaagagacagggcagagaattcatctggaacgacctgctgtccctggaaaccggcagcctgaagctggccaacggaagagtgatcgagaagacactgtacaacagaagaacccggcaggatgagcctgccctgttcgtggccctgaccttcgagcggcgggaggtcctggactcctccaatatcaaaccaatgaacctgatcggcgtggcaagaggcgaaaacatccccgccgtgatcgccctgaccgaccccgagggctgcccactgagccggtttaaggatagcctgggaaacccaacccacatcctgagaatcggcgagagctataaggagaagcagcggaccatccaggccaagaaggaggtggagcagcggagagccggcggctacagccggaagtacgccagcaaagccaagaatctggcagacgatatggtgagaaacaccgctagagatctgctgtactacgccgtgacccaggatgccatgctgatcttcgccaacctgagccggggcttcggccggcagggcaagcggaccttcatggccgagagacagtacacacggatggaggactggctgaccgccaagctggcctacgagggcctgagcaagacctacctgtccaagacactggcccagtacacctccaagacatgcagcaactgtgggtttaccatcaccagcgccgactacgacagggtgctggagaagctgaagaagacagcaacaggctggatgaccacaattaacggcaaggagctgaaggtggagggccagattacctactacaacagatacaagagacagaacgtagtcaaggacctgtccgtcgagctggatagactgagcgaagaatctgtgaacaacgacatctcctcctggacaaagggcagaagcggagaagctctgagcctcctgaagaaaagattctcccatagacccgtgcaggagaagttcgtgtgcctgaactgcggcttcgagacacacgcagccgagcaagccgccctgaacatcgccagatcctggctgttcctgcggagccaggagtacaagaaataccagacaaacaagacaaccggcaacaccgataagagagccttcgtcgagacctggcagtccttttaccggaagaagcttaaggaggtgtggaaacctgccgtgcggtctggcggatctggcggaggctccaccagccccaagaaaaagagaaaagtctaagctgccttctgcggggcttgccttctggccatgcccttcttctctcccttgcacctgtacctcttggtctttgaataaagcctgagtaggaaggctagcaaaaaaaaaaaaaaaaaaaaaaaaaaaaaaaaaaaaaaaaaaaaaaaaaaaaaaaaaaaaaaaaaaaaaaaaaaaaaaaa

SEQ ID NO: 12680 - RNA, 5785 nt, synthetic construct
  source 1..5785: mol_type = other RNA
aggaaataagagagaaaagaagagtaagaagaaatataagagccaccatggcccctaagaagaagcgtaaagtgagccggatggaacgcctcgtctacgaggtgcggcagaagtgcagaaacatcgaggacatctgcatctcctgcggatctctgaacgtgaccctggagcacccactgttcatcggcggcatgtgccagaactgtaaaaactgttttctggagtgtgcctatcaatacgacgatgacggctaccagagctactgcaccatctgttgcggcggaagagaggtgctgatgtgtggaaataacaactgctgccggtgcttctgcgtggaatgcgtggacctgctggtgggccccggcgccgcccaggccgctattaaggaagatccttggaactgctacatgtgcggccacaagggcacatacggcctgctgagacggagagaggactggcctagcagactgcagatgttcttcgccaataaccacgaccaggagttcgacccccctaaggtgtaccctcccgtccccgccgagaagagaaagcccatccgggtcctgagcctgttcgatggcatcgccaccggtctgctggtgctgaaggacctgggcatccaggtggataggtacattgcctccgaggtgtgcgaggactccatcaccgtgggaatggtgcgtcatcagggcaagatcatgtacgtgggcgacgtgcggagcgtgacacagaagcatatccaggagtggggccctttcgacctggtgatcggcggcagcccttgcaatgacctgagcatcgtgaacccagcccggaagggcctgtacgagggaaccggcagactgttcttcgagttttacagactgctgcacgacgcccggcctaaggaaggcgacgaccggcccttcttttggctgttcgagaatgtggtggccatgggagtcagcgacaagcgggatattagccggttcctggagagcaaccccgtgatgatcgatgccaaggaagtgagcgccgcccaccgggccagatacttctggggcaatctgcctggcatgaacagacccctggccagcaccgtgaacgacaagctggagctgcaggagtgcctggagcacggccggatcgccaagttcagcaaggtgagaaccatcaccacccgaagcaacagcatcaaacaaggcaaggaccagcactttcctgtgttcatgaacgagaaggaggacatcctgtggtgtaccgagatggagagagtgttcgggttcccagtccactacacagatgtcagcaacatgtctagactggccagacagagactgctgggaagaagctggtccgtccctgtgatcagacacctgttcgcccctctgaaggagtacttcgcctgcgtgagcagcggcaacagcaacgccaacagccggggccccagcttctctagcggcctggtgccactgtccctgagagggagccacatgggccccatggagatctacaaaaccgtgagcgcctggaagcggcagcctgtgcgcgtgctgagcctgtttcggaatatcgataaagtcctgaaaagcctgggattcctggagagcggctctggctccggcggtggcaccctgaagtacgtggaggatgtgacaaacgtggtcagacgggatgtggagaagtggggccccttcgatctggtgtacggcagcacccaacccctgggcagctcttgtgaccggtgccctggctggtacatgtttcagttccaccggatcctgcagtacgccctgccgagacaggagtcccagcggccattcttttggattttcatggacaacttgctgctgaccgaggatgaccaggaaactaccactcggttcctgcagaccgaagccgtgaccctgcaggacgtgagaggccgggactaccagaacgccatgcgggtgtggtccaacatccctggactgaaaagcaagcacgcacctctgacccctaaagaagaggagtacctgcaggcccaggtgcggagcagaagcaagctggacgcccctaaggtggatctgctggtgaagaattgcctcctgcccctgagagagtacttcaagtatttcagccagaatagtctgcccctgggaggcagcggcggcggcatggccctgaggagcgtgatgttcagcgacgtgagcatcgacttcagccccgaggagtgggagtacctggacctggagcagaaggacctgtacagggacgtgatgctggagaactacagcaacctggtgagcctgggctgcttcatcagcaagcccgacgtgatcagcctgctggagcagggcaaggagccctggaaggtggtgaggaagggcaggaggcagtaccccgacctggagaccaggggcggcccaagcagcggcgcccctcctcccagcggcggcagcccagccggctccccaacctctaccgaggagggcacctctgagtccgccacccccgagagcggccctggcacctccaccgagcccagcgagggcagcgcacccggcagccctgccggcagccccacctccacagaggagggaaccagcaccgagcccagcgaaggcagcgccccaggcaccagcaccgagcctagtgagcaggagattaaacggatcaacaagatcagaagaagacttgtgaaagacagcaacaccaagaaggccggcaagacaggccccatgaaaaccctgctggttagagtgatgacacccgatctgagagagcggctggaaaacctgagaaagaagcctgaaaatatcccccagcccatcagcaatacatctagagccaacctgaataagctgctgaccgattacaccgaaatgaagaaggcgatcctgcatgtgtactgggaagagttccagaaggaccctgtgggcctgatgagccgggtggcccagcctgccagcaagaagatcgatcagaacaagctgaaacctgagatggacgagaagggcaacctgaccaccgccggctttgcctgctctcagtgtggccagcccctgttcgtgtacaagctggagcaggtgtctgagaagggcaaggcttacaccaactacttcggacggtgcaatgtggccgagcacgaaaagctgatcctgctggcccagctgaagcccgagaaggatagcgacgaagccgtgacatatagcctgggaaagtttgggcagagggccctggatttctacagcattcatgtgaccaaggagtccacccaccccgtgaagcccctggcccagatcgccggaaacagatacgcctccggacctgtgggaaaggccctgagcgacgcatgtatgggcacaatcgcctccttcctgtctaagtaccaggacatcatcatcgaacaccagaaggtggtgaagggcaaccagaagagactggagagcctgcgggagctggccggcaaggaaaacctggaataccctagcgtgaccctgccacctcagcctcacaccaaggagggcgttgatgcctacaacgaagtgatcgcccgggtgcgaatgtgggtgaacctgaacctgtggcagaagctgaagctaagcagagatgatgccaagcctctgctgagactgaagggattcccttcctttcctctggtcgagagacaggccaacgaagtggactggtgggacatggtgtgtaacgtgaagaagctgatcaacgagaaaaaggaggatggcaaggtgttttggcagaatctggctggctacaagagacaggaagccctgagaccatacctgagcagcgaggaagatcggaagaagggaaagaaattcgctcggtaccagctgggcgacctgctgctgcacctggaaaagaagcacggcgaggactggggaaaggtgtacgacgaggcctgggagcggattgacaagaaagtggaaggcctgagcaagcacatcaagctggaagaggaacggagaagcgaggacgcccagagcaaggccgccctgaccgactggctgcgggctaaggccagcttcgtgatcgagggcctgaaggaggccgacaaggacgagttctgcagatgcgagctgaagctgcagaagtggtacggggacctgcggggaaagcccttcgccatcgaagccgagaacagcatcctggacatcagcggcttcagcaagcagtacaactgtgccttcatctggcagaaggacggcgtgaagaagctgaacctgtacctgatcatcaactacttcaagggcggcaagctgcggttcaagaagatcaaacctgaagccttcgaagccaacagattctacaccgtgatcaacaaaaagagcggcgagatcgtgcccatggaggtgaacttcaacttcgacgaccccaacctgatcatcctgcctctggcctttggcaagagacagggcagagaattcatctggaacgacctgctgtccctggaaaccggcagcctgaagctggccaacggaagagtgatcgagaagacactgtacaacagaagaacccggcaggatgagcctgccctgttcgtggccctgaccttcgagcggcgggaggtcctggactcctccaatatcaaaccaatgaacctgatcggcgtggcaagaggcgaaaacatccccgccgtgatcgccctgaccgaccccgagggctgcccactgagccggtttaaggatagcctgggaaacccaacccacatcctgagaatcggcgagagctataaggagaagcagcggaccatccaggccaagaaggaggtggagcagcggagagccggcggctacagccggaagtacgccagcaaagccaagaatctggcagacgatatggtgagaaacaccgctagagatctgctgtactacgccgtgacccaggatgccatgctgatcttcgccaacctgagccggggcttcggccggcagggcaagcggaccttcatggccgagagacagtacacacggatggaggactggctgaccgccaagctggcctacgagggcctgagcaagacctacctgtccaagacactggcccagtacacctccaagacatgcagcaactgtgggtttaccatcaccagcgccgactacgacagggtgctggagaagctgaagaagacagcaacaggctggatgaccacaattaacggcaaggagctgaaggtggagggccagattacctactacaacagatacaagagacagaacgtagtcaaggacctgtccgtcgagctggatagactgagcgaagaatctgtgaacaacgacatctcctcctggacaaagggcagaagcggagaagctctgagcctcctgaagaaaagattctcccatagacccgtgcaggagaagttcgtgtgcctgaactgcggcttcgagacacacgcagccgagcaagccgccctgaacatcgccagatcctggctgttcctgcggagccaggagtacaagaaataccagacaaacaagacaaccggcaacaccgataagagagccttcgtcgagacctggcagtccttttaccggaagaagcttaaggaggtgtggaaacctgccgtgcggtctggcggatctggcggaggctccaccagccccaagaaaaagagaaaagtctaagctgccttctgcggggcttgccttctggccatgcccttcttctctcccttgcacctgtacctcttggtctttgaataaagcctgagtaggaaggctagcaaaaaaaaaaaaaaaaaaaaaaaaaaaaaaaaaaaaaaaaaaaaaaaaaaaaaaaaaaaaaaaaaaaaaaaaaaaaaaaa

SEQ ID NO: 12681 - RNA, 5785 nt, synthetic construct
  source 1..5785: mol_type = other RNA
aggaaataagagagaaaagaagagtaagaagaaatataagagccaccatggcccctaagaagaagcgtaaagtgagccggatggaacgcctcgtctacgaggtgcggcagaagtgcagaaacatcgaggacatctgcatctcctgcggatctctgaacgtgaccctggagcacccactgttcatcggcggcatgtgccagaactgtaaaaactgttttctggagtgtgcctatcaatacgacgatgacggctaccagagctactgcaccatctgttgcggcggaagagaggtgctgatgtgtggaaataacaactgctgccggtgcttctgcgtggaatgcgtggacctgctggtgggccccggcgccgcccaggccgctattaaggaagatccttggaactgctacatgtgcggccacaagggcacatacggcctgctgagacggagagaggactggcctagcagactgcagatgttcttcgccaataaccacgaccaggagttcgacccccctaaggtgtaccctcccgtccccgccgagaagagaaagcccatccgggtcctgagcctgttcgatggcatcgccaccggtctgctggtgctgaaggacctgggcatccaggtggataggtacattgcctccgaggtgtgcgaggactccatcaccgtgggaatggtgcgtcatcagggcaagatcatgtacgtgggcgacgtgcggagcgtgacacagaagcatatccaggagtggggccctttcgacctggtgatcggcggcagcccttgcaatgacctgagcatcgtgaacccagcccggaagggcctgtacgagggaaccggcagactgttcttcgagttttacagactgctgcacgacgcccggcctaaggaaggcgacgaccggcccttcttttggctgttcgagaatgtggtggccatgggagtcagcgacaagcgggatattagccggttcctggagagcaaccccgtgatgatcgatgccaaggaagtgagcgccgcccaccgggccagatacttctggggcaatctgcctggcatgaacagacccctggccagcaccgtgaacgacaagctggagctgcaggagtgcctggagcacggccggatcgccaagttcagcaaggtgagaaccatcaccacccgaagcaacagcatcaaacaaggcaaggaccagcactttcctgtgttcatgaacgagaaggaggacatcctgtggtgtaccgagatggagagagtgttcgggttcccagtccactacacagatgtcagcaacatgtctagactggccagacagagactgctgggaagaagctggtccgtccctgtgatcagacacctgttcgcccctctgaaggagtacttcgcctgcgtgagcagcggcaacagcaacgccaacagccggggccccagcttctctagcggcctggtgccactgtccctgagagggagccacatgggccccatggagatctacaaaaccgtgagcgcctggaagcggcagcctgtgcgcgtgctgagcctgtttcggaatatcgataaagtcctgaaaagcctgggattcctggagagcggctctggctccggcggtggcaccctgaagtacgtggaggatgtgacaaacgtggtcagacgggatgtggagaagtggggccccttcgatctggtgtacggcagcacccaacccctgggcagctcttgtgaccggtgccctggctggtacatgtttcagttccaccggatcctgcagtacgccctgccgagacaggagtcccagcggccattcttttggattttcatggacaacttgctgctgaccgaggatgaccaggaaactaccactcggttcctgcagaccgaagccgtgaccctgcaggacgtgagaggccgggactaccagaacgccatgcgggtgtggtccaacatccctggactgaaaagcaagcacgcacctctgacccctaaagaagaggagtacctgcaggcccaggtgcggagcagaagcaagctggacgcccctaaggtggatctgctggtgaagaattgcctcctgcccctgagagagtacttcaagtatttcagccagaatagtctgcccctgggaggcagcggcggcggcttccagggcagcgtgagcttcaaggacgtgaccgtgggcttcagccaggaggagtggcagcacctggaccccagccagagggccctgtacagggacgtgatgctggagaactacagcaacctggtgagcgtgggctactgcgtgcacaagcccgaggtgatcttcaggctggagcagggcgaggagccctggaggctggaggaggagttccccagccagagcttccccgaggtgtggaccgccggcggcccaagcagcggcgcccctcctcccagcggcggcagcccagccggctccccaacctctaccgaggagggcacctctgagtccgccacccccgagagcggccctggcacctccaccgagcccagcgagggcagcgcacccggcagccctgccggcagccccacctccacagaggagggaaccagcaccgagcccagcgaaggcagcgccccaggcaccagcaccgagcctagtgagcaggagattaaacggatcaacaagatcagaagaagacttgtgaaagacagcaacaccaagaaggccggcaagacaggccccatgaaaaccctgctggttagagtgatgacacccgatctgagagagcggctggaaaacctgagaaagaagcctgaaaatatcccccagcccatcagcaatacatctagagccaacctgaataagctgctgaccgattacaccgaaatgaagaaggcgatcctgcatgtgtactgggaagagttccagaaggaccctgtgggcctgatgagccgggtggcccagcctgccagcaagaagatcgatcagaacaagctgaaacctgagatggacgagaagggcaacctgaccaccgccggctttgcctgctctcagtgtggccagcccctgttcgtgtacaagctggagcaggtgtctgagaagggcaaggcttacaccaactacttcggacggtgcaatgtggccgagcacgaaaagctgatcctgctggcccagctgaagcccgagaaggatagcgacgaagccgtgacatatagcctgggaaagtttgggcagagggccctggatttctacagcattcatgtgaccaaggagtccacccaccccgtgaagcccctggcccagatcgccggaaacagatacgcctccggacctgtgggaaaggccctgagcgacgcatgtatgggcacaatcgcctccttcctgtctaagtaccaggacatcatcatcgaacaccagaaggtggtgaagggcaaccagaagagactggagagcctgcgggagctggccggcaaggaaaacctggaataccctagcgtgaccctgccacctcagcctcacaccaaggagggcgttgatgcctacaacgaagtgatcgcccgggtgcgaatgtgggtgaacctgaacctgtggcagaagctgaagctaagcagagatgatgccaagcctctgctgagactgaagggattcccttcctttcctctggtcgagagacaggccaacgaagtggactggtgggacatggtgtgtaacgtgaagaagctgatcaacgagaaaaaggaggatggcaaggtgttttggcagaatctggctggctacaagagacaggaagccctgagaccatacctgagcagcgaggaagatcggaagaagggaaagaaattcgctcggtaccagctgggcgacctgctgctgcacctggaaaagaagcacggcgaggactggggaaaggtgtacgacgaggcctgggagcggattgacaagaaagtggaaggcctgagcaagcacatcaagctggaagaggaacggagaagcgaggacgcccagagcaaggccgccctgaccgactggctgcgggctaaggccagcttcgtgatcgagggcctgaaggaggccgacaaggacgagttctgcagatgcgagctgaagctgcagaagtggtacggggacctgcggggaaagcccttcgccatcgaagccgagaacagcatcctggacatcagcggcttcagcaagcagtacaactgtgccttcatctggcagaaggacggcgtgaagaagctgaacctgtacctgatcatcaactacttcaagggcggcaagctgcggttcaagaagatcaaacctgaagccttcgaagccaacagattctacaccgtgatcaacaaaaagagcggcgagatcgtgcccatggaggtgaacttcaacttcgacgaccccaacctgatcatcctgcctctggcctttggcaagagacagggcagagaattcatctggaacgacctgctgtccctggaaaccggcagcctgaagctggccaacggaagagtgatcgagaagacactgtacaacagaagaacccggcaggatgagcctgccctgttcgtggccctgaccttcgagcggcgggaggtcctggactcctccaatatcaaaccaatgaacctgatcggcgtggcaagaggcgaaaacatccccgccgtgatcgccctgaccgaccccgagggctgcccactgagccggtttaaggatagcctgggaaacccaacccacatcctgagaatcggcgagagctataaggagaagcagcggaccatccaggccaagaaggaggtggagcagcggagagccggcggctacagccggaagtacgccagcaaagccaagaatctggcagacgatatggtgagaaacaccgctagagatctgctgtactacgccgtgacccaggatgccatgctgatcttcgccaacctgagccggggcttcggccggcagggcaagcggaccttcatggccgagagacagtacacacggatggaggactggctgaccgccaagctggcctacgagggcctgagcaagacctacctgtccaagacactggcccagtacacctccaagacatgcagcaactgtgggtttaccatcaccagcgccgactacgacagggtgctggagaagctgaagaagacagcaacaggctggatgaccacaattaacggcaaggagctgaaggtggagggccagattacctactacaacagatacaagagacagaacgtagtcaaggacctgtccgtcgagctggatagactgagcgaagaatctgtgaacaacgacatctcctcctggacaaagggcagaagcggagaagctctgagcctcctgaagaaaagattctcccatagacccgtgcaggagaagttcgtgtgcctgaactgcggcttcgagacacacgcagccgagcaagccgccctgaacatcgccagatcctggctgttcctgcggagccaggagtacaagaaataccagacaaacaagacaaccggcaacaccgataagagagccttcgtcgagacctggcagtccttttaccggaagaagcttaaggaggtgtggaaacctgccgtgcggtctggcggatctggcggaggctccaccagccccaagaaaaagagaaaagtctaagctgccttctgcggggcttgccttctggccatgcccttcttctctcccttgcacctgtacctcttggtctttgaataaagcctgagtaggaaggctagcaaaaaaaaaaaaaaaaaaaaaaaaaaaaaaaaaaaaaaaaaaaaaaaaaaaaaaaaaaaaaaaaaaaaaaaaaaaaaaaa

SEQ ID NO: 12682 - RNA, 5785 nt, synthetic construct
  source 1..5785: mol_type = other RNA
aggaaataagagagaaaagaagagtaagaagaaatataagagccaccatggcccctaagaagaagcgtaaagtgagccggatggaacgcctcgtctacgaggtgcggcagaagtgcagaaacatcgaggacatctgcatctcctgcggatctctgaacgtgaccctggagcacccactgttcatcggcggcatgtgccagaactgtaaaaactgttttctggagtgtgcctatcaatacgacgatgacggctaccagagctactgcaccatctgttgcggcggaagagaggtgctgatgtgtggaaataacaactgctgccggtgcttctgcgtggaatgcgtggacctgctggtgggccccggcgccgcccaggccgctattaaggaagatccttggaactgctacatgtgcggccacaagggcacatacggcctgctgagacggagagaggactggcctagcagactgcagatgttcttcgccaataaccacgaccaggagttcgacccccctaaggtgtaccctcccgtccccgccgagaagagaaagcccatccgggtcctgagcctgttcgatggcatcgccaccggtctgctggtgctgaaggacctgggcatccaggtggataggtacattgcctccgaggtgtgcgaggactccatcaccgtgggaatggtgcgtcatcagggcaagatcatgtacgtgggcgacgtgcggagcgtgacacagaagcatatccaggagtggggccctttcgacctggtgatcggcggcagcccttgcaatgacctgagcatcgtgaacccagcccggaagggcctgtacgagggaaccggcagactgttcttcgagttttacagactgctgcacgacgcccggcctaaggaaggcgacgaccggcccttcttttggctgttcgagaatgtggtggccatgggagtcagcgacaagcgggatattagccggttcctggagagcaaccccgtgatgatcgatgccaaggaagtgagcgccgcccaccgggccagatacttctggggcaatctgcctggcatgaacagacccctggccagcaccgtgaacgacaagctggagctgcaggagtgcctggagcacggccggatcgccaagttcagcaaggtgagaaccatcaccacccgaagcaacagcatcaaacaaggcaaggaccagcactttcctgtgttcatgaacgagaaggaggacatcctgtggtgtaccgagatggagagagtgttcgggttcccagtccactacacagatgtcagcaacatgtctagactggccagacagagactgctgggaagaagctggtccgtccctgtgatcagacacctgttcgcccctctgaaggagtacttcgcctgcgtgagcagcggcaacagcaacgccaacagccggggccccagcttctctagcggcctggtgccactgtccctgagagggagccacatgggccccatggagatctacaaaaccgtgagcgcctggaagcggcagcctgtgcgcgtgctgagcctgtttcggaatatcgataaagtcctgaaaagcctgggattcctggagagcggctctggctccggcggtggcaccctgaagtacgtggaggatgtgacaaacgtggtcagacgggatgtggagaagtggggccccttcgatctggtgtacggcagcacccaacccctgggcagctcttgtgaccggtgccctggctggtacatgtttcagttccaccggatcctgcagtacgccctgccgagacaggagtcccagcggccattcttttggattttcatggacaacttgctgctgaccgaggatgaccaggaaactaccactcggttcctgcagaccgaagccgtgaccctgcaggacgtgagaggccgggactaccagaacgccatgcgggtgtggtccaacatccctggactgaaaagcaagcacgcacctctgacccctaaagaagaggagtacctgcaggcccaggtgcggagcagaagcaagctggacgcccctaaggtggatctgctggtgaagaattgcctcctgcccctgagagagtacttcaagtatttcagccagaatagtctgcccctgggaggcagcggcggcggcctgcaggaggccgtgaccttcaaggacgtggccgtggtgttcagcgaggaggagctgggcctgctggacagcgcccagaggaccctgtacagggacgtgatgctggagaccttccagaacctggtgagcctgggccaccagcccttcaagcccgacgtgatcagccagctggagagggaggagatgctgtggatgaagggcctgcagaccggcaggggcaggtgcagcggcggcaggaaccagggcggcccaagcagcggcgcccctcctcccagcggcggcagcccagccggctccccaacctctaccgaggagggcacctctgagtccgccacccccgagagcggccctggcacctccaccgagcccagcgagggcagcgcacccggcagccctgccggcagccccacctccacagaggagggaaccagcaccgagcccagcgaaggcagcgccccaggcaccagcaccgagcctagtgagcaggagattaaacggatcaacaagatcagaagaagacttgtgaaagacagcaacaccaagaaggccggcaagacaggccccatgaaaaccctgctggttagagtgatgacacccgatctgagagagcggctggaaaacctgagaaagaagcctgaaaatatcccccagcccatcagcaatacatctagagccaacctgaataagctgctgaccgattacaccgaaatgaagaaggcgatcctgcatgtgtactgggaagagttccagaaggaccctgtgggcctgatgagccgggtggcccagcctgccagcaagaagatcgatcagaacaagctgaaacctgagatggacgagaagggcaacctgaccaccgccggctttgcctgctctcagtgtggccagcccctgttcgtgtacaagctggagcaggtgtctgagaagggcaaggcttacaccaactacttcggacggtgcaatgtggccgagcacgaaaagctgatcctgctggcccagctgaagcccgagaaggatagcgacgaagccgtgacatatagcctgggaaagtttgggcagagggccctggatttctacagcattcatgtgaccaaggagtccacccaccccgtgaagcccctggcccagatcgccggaaacagatacgcctccggacctgtgggaaaggccctgagcgacgcatgtatgggcacaatcgcctccttcctgtctaagtaccaggacatcatcatcgaacaccagaaggtggtgaagggcaaccagaagagactggagagcctgcgggagctggccggcaaggaaaacctggaataccctagcgtgaccctgccacctcagcctcacaccaaggagggcgttgatgcctacaacgaagtgatcgcccgggtgcgaatgtgggtgaacctgaacctgtggcagaagctgaagctaagcagagatgatgccaagcctctgctgagactgaagggattcccttcctttcctctggtcgagagacaggccaacgaagtggactggtgggacatggtgtgtaacgtgaagaagctgatcaacgagaaaaaggaggatggcaaggtgttttggcagaatctggctggctacaagagacaggaagccctgagaccatacctgagcagcgaggaagatcggaagaagggaaagaaattcgctcggtaccagctgggcgacctgctgctgcacctggaaaagaagcacggcgaggactggggaaaggtgtacgacgaggcctgggagcggattgacaagaaagtggaaggcctgagcaagcacatcaagctggaagaggaacggagaagcgaggacgcccagagcaaggccgccctgaccgactggctgcgggctaaggccagcttcgtgatcgagggcctgaaggaggccgacaaggacgagttctgcagatgcgagctgaagctgcagaagtggtacggggacctgcggggaaagcccttcgccatcgaagccgagaacagcatcctggacatcagcggcttcagcaagcagtacaactgtgccttcatctggcagaaggacggcgtgaagaagctgaacctgtacctgatcatcaactacttcaagggcggcaagctgcggttcaagaagatcaaacctgaagccttcgaagccaacagattctacaccgtgatcaacaaaaagagcggcgagatcgtgcccatggaggtgaacttcaacttcgacgaccccaacctgatcatcctgcctctggcctttggcaagagacagggcagagaattcatctggaacgacctgctgtccctggaaaccggcagcctgaagctggccaacggaagagtgatcgagaagacactgtacaacagaagaacccggcaggatgagcctgccctgttcgtggccctgaccttcgagcggcgggaggtcctggactcctccaatatcaaaccaatgaacctgatcggcgtggcaagaggcgaaaacatccccgccgtgatcgccctgaccgaccccgagggctgcccactgagccggtttaaggatagcctgggaaacccaacccacatcctgagaatcggcgagagctataaggagaagcagcggaccatccaggccaagaaggaggtggagcagcggagagccggcggctacagccggaagtacgccagcaaagccaagaatctggcagacgatatggtgagaaacaccgctagagatctgctgtactacgccgtgacccaggatgccatgctgatcttcgccaacctgagccggggcttcggccggcagggcaagcggaccttcatggccgagagacagtacacacggatggaggactggctgaccgccaagctggcctacgagggcctgagcaagacctacctgtccaagacactggcccagtacacctccaagacatgcagcaactgtgggtttaccatcaccagcgccgactacgacagggtgctggagaagctgaagaagacagcaacaggctggatgaccacaattaacggcaaggagctgaaggtggagggccagattacctactacaacagatacaagagacagaacgtagtcaaggacctgtccgtcgagctggatagactgagcgaagaatctgtgaacaacgacatctcctcctggacaaagggcagaagcggagaagctctgagcctcctgaagaaaagattctcccatagacccgtgcaggagaagttcgtgtgcctgaactgcggcttcgagacacacgcagccgagcaagccgccctgaacatcgccagatcctggctgttcctgcggagccaggagtacaagaaataccagacaaacaagacaaccggcaacaccgataagagagccttcgtcgagacctggcagtccttttaccggaagaagcttaaggaggtgtggaaacctgccgtgcggtctggcggatctggcggaggctccaccagccccaagaaaaagagaaaagtctaagctgccttctgcggggcttgccttctggccatgcccttcttctctcccttgcacctgtacctcttggtctttgaataaagcctgagtaggaaggctagcaaaaaaaaaaaaaaaaaaaaaaaaaaaaaaaaaaaaaaaaaaaaaaaaaaaaaaaaaaaaaaaaaaaaaaaaaaaaaaaa

SEQ ID NO: 12683 - RNA, 5785 nt, synthetic construct
  source 1..5785: mol_type = other RNA
aggaaataagagagaaaagaagagtaagaagaaatataagagccaccatggcccctaagaagaagcgtaaagtgagccggatggaacgcctcgtctacgaggtgcggcagaagtgcagaaacatcgaggacatctgcatctcctgcggatctctgaacgtgaccctggagcacccactgttcatcggcggcatgtgccagaactgtaaaaactgttttctggagtgtgcctatcaatacgacgatgacggctaccagagctactgcaccatctgttgcggcggaagagaggtgctgatgtgtggaaataacaactgctgccggtgcttctgcgtggaatgcgtggacctgctggtgggccccggcgccgcccaggccgctattaaggaagatccttggaactgctacatgtgcggccacaagggcacatacggcctgctgagacggagagaggactggcctagcagactgcagatgttcttcgccaataaccacgaccaggagttcgacccccctaaggtgtaccctcccgtccccgccgagaagagaaagcccatccgggtcctgagcctgttcgatggcatcgccaccggtctgctggtgctgaaggacctgggcatccaggtggataggtacattgcctccgaggtgtgcgaggactccatcaccgtgggaatggtgcgtcatcagggcaagatcatgtacgtgggcgacgtgcggagcgtgacacagaagcatatccaggagtggggccctttcgacctggtgatcggcggcagcccttgcaatgacctgagcatcgtgaacccagcccggaagggcctgtacgagggaaccggcagactgttcttcgagttttacagactgctgcacgacgcccggcctaaggaaggcgacgaccggcccttcttttggctgttcgagaatgtggtggccatgggagtcagcgacaagcgggatattagccggttcctggagagcaaccccgtgatgatcgatgccaaggaagtgagcgccgcccaccgggccagatacttctggggcaatctgcctggcatgaacagacccctggccagcaccgtgaacgacaagctggagctgcaggagtgcctggagcacggccggatcgccaagttcagcaaggtgagaaccatcaccacccgaagcaacagcatcaaacaaggcaaggaccagcactttcctgtgttcatgaacgagaaggaggacatcctgtggtgtaccgagatggagagagtgttcgggttcccagtccactacacagatgtcagcaacatgtctagactggccagacagagactgctgggaagaagctggtccgtccctgtgatcagacacctgttcgcccctctgaaggagtacttcgcctgcgtgagcagcggcaacagcaacgccaacagccggggccccagcttctctagcggcctggtgccactgtccctgagagggagccacatgggccccatggagatctacaaaaccgtgagcgcctggaagcggcagcctgtgcgcgtgctgagcctgtttcggaatatcgataaagtcctgaaaagcctgggattcctggagagcggctctggctccggcggtggcaccctgaagtacgtggaggatgtgacaaacgtggtcagacgggatgtggagaagtggggccccttcgatctggtgtacggcagcacccaacccctgggcagctcttgtgaccggtgccctggctggtacatgtttcagttccaccggatcctgcagtacgccctgccgagacaggagtcccagcggccattcttttggattttcatggacaacttgctgctgaccgaggatgaccaggaaactaccactcggttcctgcagaccgaagccgtgaccctgcaggacgtgagaggccgggactaccagaacgccatgcgggtgtggtccaacatccctggactgaaaagcaagcacgcacctctgacccctaaagaagaggagtacctgcaggcccaggtgcggagcagaagcaagctggacgcccctaaggtggatctgctggtgaagaattgcctcctgcccctgagagagtacttcaagtatttcagccagaatagtctgcccctgggaggcagcggcggcggcgcccaggtgctggtgaccttccaggacgtggccgtggacttcacccaggaggagtggaggctgctggaccccggccagaaggagctgtacaaggaggtgatgctggacaacgcccagaacatgctgttcctgggcctgcccgtgcccagggaggactggttcagccacttccacgagggcggcgccagctggatgctggagggcgaggaccccagcaacagcggcctggacggcgagaggaggggcggcccaagcagcggcgcccctcctcccagcggcggcagcccagccggctccccaacctctaccgaggagggcacctctgagtccgccacccccgagagcggccctggcacctccaccgagcccagcgagggcagcgcacccggcagccctgccggcagccccacctccacagaggagggaaccagcaccgagcccagcgaaggcagcgccccaggcaccagcaccgagcctagtgagcaggagattaaacggatcaacaagatcagaagaagacttgtgaaagacagcaacaccaagaaggccggcaagacaggccccatgaaaaccctgctggttagagtgatgacacccgatctgagagagcggctggaaaacctgagaaagaagcctgaaaatatcccccagcccatcagcaatacatctagagccaacctgaataagctgctgaccgattacaccgaaatgaagaaggcgatcctgcatgtgtactgggaagagttccagaaggaccctgtgggcctgatgagccgggtggcccagcctgccagcaagaagatcgatcagaacaagctgaaacctgagatggacgagaagggcaacctgaccaccgccggctttgcctgctctcagtgtggccagcccctgttcgtgtacaagctggagcaggtgtctgagaagggcaaggcttacaccaactacttcggacggtgcaatgtggccgagcacgaaaagctgatcctgctggcccagctgaagcccgagaaggatagcgacgaagccgtgacatatagcctgggaaagtttgggcagagggccctggatttctacagcattcatgtgaccaaggagtccacccaccccgtgaagcccctggcccagatcgccggaaacagatacgcctccggacctgtgggaaaggccctgagcgacgcatgtatgggcacaatcgcctccttcctgtctaagtaccaggacatcatcatcgaacaccagaaggtggtgaagggcaaccagaagagactggagagcctgcgggagctggccggcaaggaaaacctggaataccctagcgtgaccctgccacctcagcctcacaccaaggagggcgttgatgcctacaacgaagtgatcgcccgggtgcgaatgtgggtgaacctgaacctgtggcagaagctgaagctaagcagagatgatgccaagcctctgctgagactgaagggattcccttcctttcctctggtcgagagacaggccaacgaagtggactggtgggacatggtgtgtaacgtgaagaagctgatcaacgagaaaaaggaggatggcaaggtgttttggcagaatctggctggctacaagagacaggaagccctgagaccatacctgagcagcgaggaagatcggaagaagggaaagaaattcgctcggtaccagctgggcgacctgctgctgcacctggaaaagaagcacggcgaggactggggaaaggtgtacgacgaggcctgggagcggattgacaagaaagtggaaggcctgagcaagcacatcaagctggaagaggaacggagaagcgaggacgcccagagcaaggccgccctgaccgactggctgcgggctaaggccagcttcgtgatcgagggcctgaaggaggccgacaaggacgagttctgcagatgcgagctgaagctgcagaagtggtacggggacctgcggggaaagcccttcgccatcgaagccgagaacagcatcctggacatcagcggcttcagcaagcagtacaactgtgccttcatctggcagaaggacggcgtgaagaagctgaacctgtacctgatcatcaactacttcaagggcggcaagctgcggttcaagaagatcaaacctgaagccttcgaagccaacagattctacaccgtgatcaacaaaaagagcggcgagatcgtgcccatggaggtgaacttcaacttcgacgaccccaacctgatcatcctgcctctggcctttggcaagagacagggcagagaattcatctggaacgacctgctgtccctggaaaccggcagcctgaagctggccaacggaagagtgatcgagaagacactgtacaacagaagaacccggcaggatgagcctgccctgttcgtggccctgaccttcgagcggcgggaggtcctggactcctccaatatcaaaccaatgaacctgatcggcgtggcaagaggcgaaaacatccccgccgtgatcgccctgaccgaccccgagggctgcccactgagccggtttaaggatagcctgggaaacccaacccacatcctgagaatcggcgagagctataaggagaagcagcggaccatccaggccaagaaggaggtggagcagcggagagccggcggctacagccggaagtacgccagcaaagccaagaatctggcagacgatatggtgagaaacaccgctagagatctgctgtactacgccgtgacccaggatgccatgctgatcttcgccaacctgagccggggcttcggccggcagggcaagcggaccttcatggccgagagacagtacacacggatggaggactggctgaccgccaagctggcctacgagggcctgagcaagacctacctgtccaagacactggcccagtacacctccaagacatgcagcaactgtgggtttaccatcaccagcgccgactacgacagggtgctggagaagctgaagaagacagcaacaggctggatgaccacaattaacggcaaggagctgaaggtggagggccagattacctactacaacagatacaagagacagaacgtagtcaaggacctgtccgtcgagctggatagactgagcgaagaatctgtgaacaacgacatctcctcctggacaaagggcagaagcggagaagctctgagcctcctgaagaaaagattctcccatagacccgtgcaggagaagttcgtgtgcctgaactgcggcttcgagacacacgcagccgagcaagccgccctgaacatcgccagatcctggctgttcctgcggagccaggagtacaagaaataccagacaaacaagacaaccggcaacaccgataagagagccttcgtcgagacctggcagtccttttaccggaagaagcttaaggaggtgtggaaacctgccgtgcggtctggcggatctggcggaggctccaccagccccaagaaaaagagaaaagtctaagctgccttctgcggggcttgccttctggccatgcccttcttctctcccttgcacctgtacctcttggtctttgaataaagcctgagtaggaaggctagcaaaaaaaaaaaaaaaaaaaaaaaaaaaaaaaaaaaaaaaaaaaaaaaaaaaaaaaaaaaaaaaaaaaaaaaaaaaaaaaa

SEQ ID NO: 12684 - RNA, 5785 nt, synthetic construct
  source 1..5785: mol_type = other RNA
aggaaataagagagaaaagaagagtaagaagaaatataagagccaccatggcccctaagaagaagcgtaaagtgagccggatggaacgcctcgtctacgaggtgcggcagaagtgcagaaacatcgaggacatctgcatctcctgcggatctctgaacgtgaccctggagcacccactgttcatcggcggcatgtgccagaactgtaaaaactgttttctggagtgtgcctatcaatacgacgatgacggctaccagagctactgcaccatctgttgcggcggaagagaggtgctgatgtgtggaaataacaactgctgccggtgcttctgcgtggaatgcgtggacctgctggtgggccccggcgccgcccaggccgctattaaggaagatccttggaactgctacatgtgcggccacaagggcacatacggcctgctgagacggagagaggactggcctagcagactgcagatgttcttcgccaataaccacgaccaggagttcgacccccctaaggtgtaccctcccgtccccgccgagaagagaaagcccatccgggtcctgagcctgttcgatggcatcgccaccggtctgctggtgctgaaggacctgggcatccaggtggataggtacattgcctccgaggtgtgcgaggactccatcaccgtgggaatggtgcgtcatcagggcaagatcatgtacgtgggcgacgtgcggagcgtgacacagaagcatatccaggagtggggccctttcgacctggtgatcggcggcagcccttgcaatgacctgagcatcgtgaacccagcccggaagggcctgtacgagggaaccggcagactgttcttcgagttttacagactgctgcacgacgcccggcctaaggaaggcgacgaccggcccttcttttggctgttcgagaatgtggtggccatgggagtcagcgacaagcgggatattagccggttcctggagagcaaccccgtgatgatcgatgccaaggaagtgagcgccgcccaccgggccagatacttctggggcaatctgcctggcatgaacagacccctggccagcaccgtgaacgacaagctggagctgcaggagtgcctggagcacggccggatcgccaagttcagcaaggtgagaaccatcaccacccgaagcaacagcatcaaacaaggcaaggaccagcactttcctgtgttcatgaacgagaaggaggacatcctgtggtgtaccgagatggagagagtgttcgggttcccagtccactacacagatgtcagcaacatgtctagactggccagacagagactgctgggaagaagctggtccgtccctgtgatcagacacctgttcgcccctctgaaggagtacttcgcctgcgtgagcagcggcaacagcaacgccaacagccggggccccagcttctctagcggcctggtgccactgtccctgagagggagccacatgggccccatggagatctacaaaaccgtgagcgcctggaagcggcagcctgtgcgcgtgctgagcctgtttcggaatatcgataaagtcctgaaaagcctgggattcctggagagcggctctggctccggcggtggcaccctgaagtacgtggaggatgtgacaaacgtggtcagacgggatgtggagaagtggggccccttcgatctggtgtacggcagcacccaacccctgggcagctcttgtgaccggtgccctggctggtacatgtttcagttccaccggatcctgcagtacgccctgccgagacaggagtcccagcggccattcttttggattttcatggacaacttgctgctgaccgaggatgaccaggaaactaccactcggttcctgcagaccgaagccgtgaccctgcaggacgtgagaggccgggactaccagaacgccatgcgggtgtggtccaacatccctggactgaaaagcaagcacgcacctctgacccctaaagaagaggagtacctgcaggcccaggtgcggagcagaagcaagctggacgcccctaaggtggatctgctggtgaagaattgcctcctgcccctgagagagtacttcaagtatttcagccagaatagtctgcccctgggaggcagcggcggcggcccccaggtgctggtgagcttcgaggacgtggccgtgttcctgagcagggaggagtggggctgcctgggccccgcccagaggggcctgtacagggacgtgatgctggagacctacaggaacctgatcagcctgggcttccaggacagcaagcccgacgtgatcagcaagctggagaagggcgaggagccctgggccccctacagccccaggatcgaggagggctggatctggagccacggcagcggcggcccaagcagcggcgcccctcctcccagcggcggcagcccagccggctccccaacctctaccgaggagggcacctctgagtccgccacccccgagagcggccctggcacctccaccgagcccagcgagggcagcgcacccggcagccctgccggcagccccacctccacagaggagggaaccagcaccgagcccagcgaaggcagcgccccaggcaccagcaccgagcctagtgagcaggagattaaacggatcaacaagatcagaagaagacttgtgaaagacagcaacaccaagaaggccggcaagacaggccccatgaaaaccctgctggttagagtgatgacacccgatctgagagagcggctggaaaacctgagaaagaagcctgaaaatatcccccagcccatcagcaatacatctagagccaacctgaataagctgctgaccgattacaccgaaatgaagaaggcgatcctgcatgtgtactgggaagagttccagaaggaccctgtgggcctgatgagccgggtggcccagcctgccagcaagaagatcgatcagaacaagctgaaacctgagatggacgagaagggcaacctgaccaccgccggctttgcctgctctcagtgtggccagcccctgttcgtgtacaagctggagcaggtgtctgagaagggcaaggcttacaccaactacttcggacggtgcaatgtggccgagcacgaaaagctgatcctgctggcccagctgaagcccgagaaggatagcgacgaagccgtgacatatagcctgggaaagtttgggcagagggccctggatttctacagcattcatgtgaccaaggagtccacccaccccgtgaagcccctggcccagatcgccggaaacagatacgcctccggacctgtgggaaaggccctgagcgacgcatgtatgggcacaatcgcctccttcctgtctaagtaccaggacatcatcatcgaacaccagaaggtggtgaagggcaaccagaagagactggagagcctgcgggagctggccggcaaggaaaacctggaataccctagcgtgaccctgccacctcagcctcacaccaaggagggcgttgatgcctacaacgaagtgatcgcccgggtgcgaatgtgggtgaacctgaacctgtggcagaagctgaagctaagcagagatgatgccaagcctctgctgagactgaagggattcccttcctttcctctggtcgagagacaggccaacgaagtggactggtgggacatggtgtgtaacgtgaagaagctgatcaacgagaaaaaggaggatggcaaggtgttttggcagaatctggctggctacaagagacaggaagccctgagaccatacctgagcagcgaggaagatcggaagaagggaaagaaattcgctcggtaccagctgggcgacctgctgctgcacctggaaaagaagcacggcgaggactggggaaaggtgtacgacgaggcctgggagcggattgacaagaaagtggaaggcctgagcaagcacatcaagctggaagaggaacggagaagcgaggacgcccagagcaaggccgccctgaccgactggctgcgggctaaggccagcttcgtgatcgagggcctgaaggaggccgacaaggacgagttctgcagatgcgagctgaagctgcagaagtggtacggggacctgcggggaaagcccttcgccatcgaagccgagaacagcatcctggacatcagcggcttcagcaagcagtacaactgtgccttcatctggcagaaggacggcgtgaagaagctgaacctgtacctgatcatcaactacttcaagggcggcaagctgcggttcaagaagatcaaacctgaagccttcgaagccaacagattctacaccgtgatcaacaaaaagagcggcgagatcgtgcccatggaggtgaacttcaacttcgacgaccccaacctgatcatcctgcctctggcctttggcaagagacagggcagagaattcatctggaacgacctgctgtccctggaaaccggcagcctgaagctggccaacggaagagtgatcgagaagacactgtacaacagaagaacccggcaggatgagcctgccctgttcgtggccctgaccttcgagcggcgggaggtcctggactcctccaatatcaaaccaatgaacctgatcggcgtggcaagaggcgaaaacatccccgccgtgatcgccctgaccgaccccgagggctgcccactgagccggtttaaggatagcctgggaaacccaacccacatcctgagaatcggcgagagctataaggagaagcagcggaccatccaggccaagaaggaggtggagcagcggagagccggcggctacagccggaagtacgccagcaaagccaagaatctggcagacgatatggtgagaaacaccgctagagatctgctgtactacgccgtgacccaggatgccatgctgatcttcgccaacctgagccggggcttcggccggcagggcaagcggaccttcatggccgagagacagtacacacggatggaggactggctgaccgccaagctggcctacgagggcctgagcaagacctacctgtccaagacactggcccagtacacctccaagacatgcagcaactgtgggtttaccatcaccagcgccgactacgacagggtgctggagaagctgaagaagacagcaacaggctggatgaccacaattaacggcaaggagctgaaggtggagggccagattacctactacaacagatacaagagacagaacgtagtcaaggacctgtccgtcgagctggatagactgagcgaagaatctgtgaacaacgacatctcctcctggacaaagggcagaagcggagaagctctgagcctcctgaagaaaagattctcccatagacccgtgcaggagaagttcgtgtgcctgaactgcggcttcgagacacacgcagccgagcaagccgccctgaacatcgccagatcctggctgttcctgcggagccaggagtacaagaaataccagacaaacaagacaaccggcaacaccgataagagagccttcgtcgagacctggcagtccttttaccggaagaagcttaaggaggtgtggaaacctgccgtgcggtctggcggatctggcggaggctccaccagccccaagaaaaagagaaaagtctaagctgccttctgcggggcttgccttctggccatgcccttcttctctcccttgcacctgtacctcttggtctttgaataaagcctgagtaggaaggctagcaaaaaaaaaaaaaaaaaaaaaaaaaaaaaaaaaaaaaaaaaaaaaaaaaaaaaaaaaaaaaaaaaaaaaaaaaaaaaaaa

SEQ ID NO: 12685 - RNA, 5785 nt, synthetic construct
  source 1..5785: mol_type = other RNA
aggaaataagagagaaaagaagagtaagaagaaatataagagccaccatggcccctaagaagaagcgtaaagtgagccggatggaacgcctcgtctacgaggtgcggcagaagtgcagaaacatcgaggacatctgcatctcctgcggatctctgaacgtgaccctggagcacccactgttcatcggcggcatgtgccagaactgtaaaaactgttttctggagtgtgcctatcaatacgacgatgacggctaccagagctactgcaccatctgttgcggcggaagagaggtgctgatgtgtggaaataacaactgctgccggtgcttctgcgtggaatgcgtggacctgctggtgggccccggcgccgcccaggccgctattaaggaagatccttggaactgctacatgtgcggccacaagggcacatacggcctgctgagacggagagaggactggcctagcagactgcagatgttcttcgccaataaccacgaccaggagttcgacccccctaaggtgtaccctcccgtccccgccgagaagagaaagcccatccgggtcctgagcctgttcgatggcatcgccaccggtctgctggtgctgaaggacctgggcatccaggtggataggtacattgcctccgaggtgtgcgaggactccatcaccgtgggaatggtgcgtcatcagggcaagatcatgtacgtgggcgacgtgcggagcgtgacacagaagcatatccaggagtggggccctttcgacctggtgatcggcggcagcccttgcaatgacctgagcatcgtgaacccagcccggaagggcctgtacgagggaaccggcagactgttcttcgagttttacagactgctgcacgacgcccggcctaaggaaggcgacgaccggcccttcttttggctgttcgagaatgtggtggccatgggagtcagcgacaagcgggatattagccggttcctggagagcaaccccgtgatgatcgatgccaaggaagtgagcgccgcccaccgggccagatacttctggggcaatctgcctggcatgaacagacccctggccagcaccgtgaacgacaagctggagctgcaggagtgcctggagcacggccggatcgccaagttcagcaaggtgagaaccatcaccacccgaagcaacagcatcaaacaaggcaaggaccagcactttcctgtgttcatgaacgagaaggaggacatcctgtggtgtaccgagatggagagagtgttcgggttcccagtccactacacagatgtcagcaacatgtctagactggccagacagagactgctgggaagaagctggtccgtccctgtgatcagacacctgttcgcccctctgaaggagtacttcgcctgcgtgagcagcggcaacagcaacgccaacagccggggccccagcttctctagcggcctggtgccactgtccctgagagggagccacatgggccccatggagatctacaaaaccgtgagcgcctggaagcggcagcctgtgcgcgtgctgagcctgtttcggaatatcgataaagtcctgaaaagcctgggattcctggagagcggctctggctccggcggtggcaccctgaagtacgtggaggatgtgacaaacgtggtcagacgggatgtggagaagtggggccccttcgatctggtgtacggcagcacccaacccctgggcagctcttgtgaccggtgccctggctggtacatgtttcagttccaccggatcctgcagtacgccctgccgagacaggagtcccagcggccattcttttggattttcatggacaacttgctgctgaccgaggatgaccaggaaactaccactcggttcctgcagaccgaagccgtgaccctgcaggacgtgagaggccgggactaccagaacgccatgcgggtgtggtccaacatccctggactgaaaagcaagcacgcacctctgacccctaaagaagaggagtacctgcaggcccaggtgcggagcagaagcaagctggacgcccctaaggtggatctgctggtgaagaattgcctcctgcccctgagagagtacttcaagtatttcagccagaatagtctgcccctgggaggcagcggcggcggcgcccaggagagcatcaccctggaggacgtggccgtggacttcacctgggaggagtggcagctgctgggcgccgcccagaaggacctgtacagggacgtgatgctggagaactacagcaacctggtggccgtgggctaccaggccagcaagcccgacgccctgttcaagctggagcagggcgagcagccctggaccatcgaggacggcatccacagcggcgcctgcagcgacatctggaaggtgggcggcccaagcagcggcgcccctcctcccagcggcggcagcccagccggctccccaacctctaccgaggagggcacctctgagtccgccacccccgagagcggccctggcacctccaccgagcccagcgagggcagcgcacccggcagccctgccggcagccccacctccacagaggagggaaccagcaccgagcccagcgaaggcagcgccccaggcaccagcaccgagcctagtgagcaggagattaaacggatcaacaagatcagaagaagacttgtgaaagacagcaacaccaagaaggccggcaagacaggccccatgaaaaccctgctggttagagtgatgacacccgatctgagagagcggctggaaaacctgagaaagaagcctgaaaatatcccccagcccatcagcaatacatctagagccaacctgaataagctgctgaccgattacaccgaaatgaagaaggcgatcctgcatgtgtactgggaagagttccagaaggaccctgtgggcctgatgagccgggtggcccagcctgccagcaagaagatcgatcagaacaagctgaaacctgagatggacgagaagggcaacctgaccaccgccggctttgcctgctctcagtgtggccagcccctgttcgtgtacaagctggagcaggtgtctgagaagggcaaggcttacaccaactacttcggacggtgcaatgtggccgagcacgaaaagctgatcctgctggcccagctgaagcccgagaaggatagcgacgaagccgtgacatatagcctgggaaagtttgggcagagggccctggatttctacagcattcatgtgaccaaggagtccacccaccccgtgaagcccctggcccagatcgccggaaacagatacgcctccggacctgtgggaaaggccctgagcgacgcatgtatgggcacaatcgcctccttcctgtctaagtaccaggacatcatcatcgaacaccagaaggtggtgaagggcaaccagaagagactggagagcctgcgggagctggccggcaaggaaaacctggaataccctagcgtgaccctgccacctcagcctcacaccaaggagggcgttgatgcctacaacgaagtgatcgcccgggtgcgaatgtgggtgaacctgaacctgtggcagaagctgaagctaagcagagatgatgccaagcctctgctgagactgaagggattcccttcctttcctctggtcgagagacaggccaacgaagtggactggtgggacatggtgtgtaacgtgaagaagctgatcaacgagaaaaaggaggatggcaaggtgttttggcagaatctggctggctacaagagacaggaagccctgagaccatacctgagcagcgaggaagatcggaagaagggaaagaaattcgctcggtaccagctgggcgacctgctgctgcacctggaaaagaagcacggcgaggactggggaaaggtgtacgacgaggcctgggagcggattgacaagaaagtggaaggcctgagcaagcacatcaagctggaagaggaacggagaagcgaggacgcccagagcaaggccgccctgaccgactggctgcgggctaaggccagcttcgtgatcgagggcctgaaggaggccgacaaggacgagttctgcagatgcgagctgaagctgcagaagtggtacggggacctgcggggaaagcccttcgccatcgaagccgagaacagcatcctggacatcagcggcttcagcaagcagtacaactgtgccttcatctggcagaaggacggcgtgaagaagctgaacctgtacctgatcatcaactacttcaagggcggcaagctgcggttcaagaagatcaaacctgaagccttcgaagccaacagattctacaccgtgatcaacaaaaagagcggcgagatcgtgcccatggaggtgaacttcaacttcgacgaccccaacctgatcatcctgcctctggcctttggcaagagacagggcagagaattcatctggaacgacctgctgtccctggaaaccggcagcctgaagctggccaacggaagagtgatcgagaagacactgtacaacagaagaacccggcaggatgagcctgccctgttcgtggccctgaccttcgagcggcgggaggtcctggactcctccaatatcaaaccaatgaacctgatcggcgtggcaagaggcgaaaacatccccgccgtgatcgccctgaccgaccccgagggctgcccactgagccggtttaaggatagcctgggaaacccaacccacatcctgagaatcggcgagagctataaggagaagcagcggaccatccaggccaagaaggaggtggagcagcggagagccggcggctacagccggaagtacgccagcaaagccaagaatctggcagacgatatggtgagaaacaccgctagagatctgctgtactacgccgtgacccaggatgccatgctgatcttcgccaacctgagccggggcttcggccggcagggcaagcggaccttcatggccgagagacagtacacacggatggaggactggctgaccgccaagctggcctacgagggcctgagcaagacctacctgtccaagacactggcccagtacacctccaagacatgcagcaactgtgggtttaccatcaccagcgccgactacgacagggtgctggagaagctgaagaagacagcaacaggctggatgaccacaattaacggcaaggagctgaaggtggagggccagattacctactacaacagatacaagagacagaacgtagtcaaggacctgtccgtcgagctggatagactgagcgaagaatctgtgaacaacgacatctcctcctggacaaagggcagaagcggagaagctctgagcctcctgaagaaaagattctcccatagacccgtgcaggagaagttcgtgtgcctgaactgcggcttcgagacacacgcagccgagcaagccgccctgaacatcgccagatcctggctgttcctgcggagccaggagtacaagaaataccagacaaacaagacaaccggcaacaccgataagagagccttcgtcgagacctggcagtccttttaccggaagaagcttaaggaggtgtggaaacctgccgtgcggtctggcggatctggcggaggctccaccagccccaagaaaaagagaaaagtctaagctgccttctgcggggcttgccttctggccatgcccttcttctctcccttgcacctgtacctcttggtctttgaataaagcctgagtaggaaggctagcaaaaaaaaaaaaaaaaaaaaaaaaaaaaaaaaaaaaaaaaaaaaaaaaaaaaaaaaaaaaaaaaaaaaaaaaaaaaaaaa

SEQ ID NO: 12686 - RNA, 5785 nt, synthetic construct
  source 1..5785: mol_type = other RNA
aggaaataagagagaaaagaagagtaagaagaaatataagagccaccatggcccctaagaagaagcgtaaagtgagccggatggaacgcctcgtctacgaggtgcggcagaagtgcagaaacatcgaggacatctgcatctcctgcggatctctgaacgtgaccctggagcacccactgttcatcggcggcatgtgccagaactgtaaaaactgttttctggagtgtgcctatcaatacgacgatgacggctaccagagctactgcaccatctgttgcggcggaagagaggtgctgatgtgtggaaataacaactgctgccggtgcttctgcgtggaatgcgtggacctgctggtgggccccggcgccgcccaggccgctattaaggaagatccttggaactgctacatgtgcggccacaagggcacatacggcctgctgagacggagagaggactggcctagcagactgcagatgttcttcgccaataaccacgaccaggagttcgacccccctaaggtgtaccctcccgtccccgccgagaagagaaagcccatccgggtcctgagcctgttcgatggcatcgccaccggtctgctggtgctgaaggacctgggcatccaggtggataggtacattgcctccgaggtgtgcgaggactccatcaccgtgggaatggtgcgtcatcagggcaagatcatgtacgtgggcgacgtgcggagcgtgacacagaagcatatccaggagtggggccctttcgacctggtgatcggcggcagcccttgcaatgacctgagcatcgtgaacccagcccggaagggcctgtacgagggaaccggcagactgttcttcgagttttacagactgctgcacgacgcccggcctaaggaaggcgacgaccggcccttcttttggctgttcgagaatgtggtggccatgggagtcagcgacaagcgggatattagccggttcctggagagcaaccccgtgatgatcgatgccaaggaagtgagcgccgcccaccgggccagatacttctggggcaatctgcctggcatgaacagacccctggccagcaccgtgaacgacaagctggagctgcaggagtgcctggagcacggccggatcgccaagttcagcaaggtgagaaccatcaccacccgaagcaacagcatcaaacaaggcaaggaccagcactttcctgtgttcatgaacgagaaggaggacatcctgtggtgtaccgagatggagagagtgttcgggttcccagtccactacacagatgtcagcaacatgtctagactggccagacagagactgctgggaagaagctggtccgtccctgtgatcagacacctgttcgcccctctgaaggagtacttcgcctgcgtgagcagcggcaacagcaacgccaacagccggggccccagcttctctagcggcctggtgccactgtccctgagagggagccacatgggccccatggagatctacaaaaccgtgagcgcctggaagcggcagcctgtgcgcgtgctgagcctgtttcggaatatcgataaagtcctgaaaagcctgggattcctggagagcggctctggctccggcggtggcaccctgaagtacgtggaggatgtgacaaacgtggtcagacgggatgtggagaagtggggccccttcgatctggtgtacggcagcacccaacccctgggcagctcttgtgaccggtgccctggctggtacatgtttcagttccaccggatcctgcagtacgccctgccgagacaggagtcccagcggccattcttttggattttcatggacaacttgctgctgaccgaggatgaccaggaaactaccactcggttcctgcagaccgaagccgtgaccctgcaggacgtgagaggccgggactaccagaacgccatgcgggtgtggtccaacatccctggactgaaaagcaagcacgcacctctgacccctaaagaagaggagtacctgcaggcccaggtgcggagcagaagcaagctggacgcccctaaggtggatctgctggtgaagaattgcctcctgcccctgagagagtacttcaagtatttcagccagaatagtctgcccctgggaggcagcggcggcggcgccaggggcaagagcaagagcaaggcccccgtgaccttcggcgacctggccatctacttcagccaggaggagtgggagtggctgagccccatccagaaggacctgtacgaggacgtgatgctggagaactacaggaacctggtgagcctgggcctgagcttcaggaggcccaacgtgatcaccctgctggagaagggcaaggccccctggatggtggagcccgtgaggaggaggagggcccccggcggcccaagcagcggcgcccctcctcccagcggcggcagcccagccggctccccaacctctaccgaggagggcacctctgagtccgccacccccgagagcggccctggcacctccaccgagcccagcgagggcagcgcacccggcagccctgccggcagccccacctccacagaggagggaaccagcaccgagcccagcgaaggcagcgccccaggcaccagcaccgagcctagtgagcaggagattaaacggatcaacaagatcagaagaagacttgtgaaagacagcaacaccaagaaggccggcaagacaggccccatgaaaaccctgctggttagagtgatgacacccgatctgagagagcggctggaaaacctgagaaagaagcctgaaaatatcccccagcccatcagcaatacatctagagccaacctgaataagctgctgaccgattacaccgaaatgaagaaggcgatcctgcatgtgtactgggaagagttccagaaggaccctgtgggcctgatgagccgggtggcccagcctgccagcaagaagatcgatcagaacaagctgaaacctgagatggacgagaagggcaacctgaccaccgccggctttgcctgctctcagtgtggccagcccctgttcgtgtacaagctggagcaggtgtctgagaagggcaaggcttacaccaactacttcggacggtgcaatgtggccgagcacgaaaagctgatcctgctggcccagctgaagcccgagaaggatagcgacgaagccgtgacatatagcctgggaaagtttgggcagagggccctggatttctacagcattcatgtgaccaaggagtccacccaccccgtgaagcccctggcccagatcgccggaaacagatacgcctccggacctgtgggaaaggccctgagcgacgcatgtatgggcacaatcgcctccttcctgtctaagtaccaggacatcatcatcgaacaccagaaggtggtgaagggcaaccagaagagactggagagcctgcgggagctggccggcaaggaaaacctggaataccctagcgtgaccctgccacctcagcctcacaccaaggagggcgttgatgcctacaacgaagtgatcgcccgggtgcgaatgtgggtgaacctgaacctgtggcagaagctgaagctaagcagagatgatgccaagcctctgctgagactgaagggattcccttcctttcctctggtcgagagacaggccaacgaagtggactggtgggacatggtgtgtaacgtgaagaagctgatcaacgagaaaaaggaggatggcaaggtgttttggcagaatctggctggctacaagagacaggaagccctgagaccatacctgagcagcgaggaagatcggaagaagggaaagaaattcgctcggtaccagctgggcgacctgctgctgcacctggaaaagaagcacggcgaggactggggaaaggtgtacgacgaggcctgggagcggattgacaagaaagtggaaggcctgagcaagcacatcaagctggaagaggaacggagaagcgaggacgcccagagcaaggccgccctgaccgactggctgcgggctaaggccagcttcgtgatcgagggcctgaaggaggccgacaaggacgagttctgcagatgcgagctgaagctgcagaagtggtacggggacctgcggggaaagcccttcgccatcgaagccgagaacagcatcctggacatcagcggcttcagcaagcagtacaactgtgccttcatctggcagaaggacggcgtgaagaagctgaacctgtacctgatcatcaactacttcaagggcggcaagctgcggttcaagaagatcaaacctgaagccttcgaagccaacagattctacaccgtgatcaacaaaaagagcggcgagatcgtgcccatggaggtgaacttcaacttcgacgaccccaacctgatcatcctgcctctggcctttggcaagagacagggcagagaattcatctggaacgacctgctgtccctggaaaccggcagcctgaagctggccaacggaagagtgatcgagaagacactgtacaacagaagaacccggcaggatgagcctgccctgttcgtggccctgaccttcgagcggcgggaggtcctggactcctccaatatcaaaccaatgaacctgatcggcgtggcaagaggcgaaaacatccccgccgtgatcgccctgaccgaccccgagggctgcccactgagccggtttaaggatagcctgggaaacccaacccacatcctgagaatcggcgagagctataaggagaagcagcggaccatccaggccaagaaggaggtggagcagcggagagccggcggctacagccggaagtacgccagcaaagccaagaatctggcagacgatatggtgagaaacaccgctagagatctgctgtactacgccgtgacccaggatgccatgctgatcttcgccaacctgagccggggcttcggccggcagggcaagcggaccttcatggccgagagacagtacacacggatggaggactggctgaccgccaagctggcctacgagggcctgagcaagacctacctgtccaagacactggcccagtacacctccaagacatgcagcaactgtgggtttaccatcaccagcgccgactacgacagggtgctggagaagctgaagaagacagcaacaggctggatgaccacaattaacggcaaggagctgaaggtggagggccagattacctactacaacagatacaagagacagaacgtagtcaaggacctgtccgtcgagctggatagactgagcgaagaatctgtgaacaacgacatctcctcctggacaaagggcagaagcggagaagctctgagcctcctgaagaaaagattctcccatagacccgtgcaggagaagttcgtgtgcctgaactgcggcttcgagacacacgcagccgagcaagccgccctgaacatcgccagatcctggctgttcctgcggagccaggagtacaagaaataccagacaaacaagacaaccggcaacaccgataagagagccttcgtcgagacctggcagtccttttaccggaagaagcttaaggaggtgtggaaacctgccgtgcggtctggcggatctggcggaggctccaccagccccaagaaaaagagaaaagtctaagctgccttctgcggggcttgccttctggccatgcccttcttctctcccttgcacctgtacctcttggtctttgaataaagcctgagtaggaaggctagcaaaaaaaaaaaaaaaaaaaaaaaaaaaaaaaaaaaaaaaaaaaaaaaaaaaaaaaaaaaaaaaaaaaaaaaaaaaaaaaa

SEQ ID NO: 12687 - RNA, 5785 nt, synthetic construct
  source 1..5785: mol_type = other RNA
aggaaataagagagaaaagaagagtaagaagaaatataagagccaccatggcccctaagaagaagcgtaaagtgagccggatggaacgcctcgtctacgaggtgcggcagaagtgcagaaacatcgaggacatctgcatctcctgcggatctctgaacgtgaccctggagcacccactgttcatcggcggcatgtgccagaactgtaaaaactgttttctggagtgtgcctatcaatacgacgatgacggctaccagagctactgcaccatctgttgcggcggaagagaggtgctgatgtgtggaaataacaactgctgccggtgcttctgcgtggaatgcgtggacctgctggtgggccccggcgccgcccaggccgctattaaggaagatccttggaactgctacatgtgcggccacaagggcacatacggcctgctgagacggagagaggactggcctagcagactgcagatgttcttcgccaataaccacgaccaggagttcgacccccctaaggtgtaccctcccgtccccgccgagaagagaaagcccatccgggtcctgagcctgttcgatggcatcgccaccggtctgctggtgctgaaggacctgggcatccaggtggataggtacattgcctccgaggtgtgcgaggactccatcaccgtgggaatggtgcgtcatcagggcaagatcatgtacgtgggcgacgtgcggagcgtgacacagaagcatatccaggagtggggccctttcgacctggtgatcggcggcagcccttgcaatgacctgagcatcgtgaacccagcccggaagggcctgtacgagggaaccggcagactgttcttcgagttttacagactgctgcacgacgcccggcctaaggaaggcgacgaccggcccttcttttggctgttcgagaatgtggtggccatgggagtcagcgacaagcgggatattagccggttcctggagagcaaccccgtgatgatcgatgccaaggaagtgagcgccgcccaccgggccagatacttctggggcaatctgcctggcatgaacagacccctggccagcaccgtgaacgacaagctggagctgcaggagtgcctggagcacggccggatcgccaagttcagcaaggtgagaaccatcaccacccgaagcaacagcatcaaacaaggcaaggaccagcactttcctgtgttcatgaacgagaaggaggacatcctgtggtgtaccgagatggagagagtgttcgggttcccagtccactacacagatgtcagcaacatgtctagactggccagacagagactgctgggaagaagctggtccgtccctgtgatcagacacctgttcgcccctctgaaggagtacttcgcctgcgtgagcagcggcaacagcaacgccaacagccggggccccagcttctctagcggcctggtgccactgtccctgagagggagccacatgggccccatggagatctacaaaaccgtgagcgcctggaagcggcagcctgtgcgcgtgctgagcctgtttcggaatatcgataaagtcctgaaaagcctgggattcctggagagcggctctggctccggcggtggcaccctgaagtacgtggaggatgtgacaaacgtggtcagacgggatgtggagaagtggggccccttcgatctggtgtacggcagcacccaacccctgggcagctcttgtgaccggtgccctggctggtacatgtttcagttccaccggatcctgcagtacgccctgccgagacaggagtcccagcggccattcttttggattttcatggacaacttgctgctgaccgaggatgaccaggaaactaccactcggttcctgcagaccgaagccgtgaccctgcaggacgtgagaggccgggactaccagaacgccatgcgggtgtggtccaacatccctggactgaaaagcaagcacgcacctctgacccctaaagaagaggagtacctgcaggcccaggtgcggagcagaagcaagctggacgcccctaaggtggatctgctggtgaagaattgcctcctgcccctgagagagtacttcaagtatttcagccagaatagtctgcccctgggaggcagcggcggcggcatggtgcaggagagcgtgaccttcaaggacgtggccgtgctgttcacccaggaggagtggggccagctgagccccgcccagagggccctgtacagggacgtgatgctggagaactacagcaacctggtgagcctgggcctgctgggccccaagcccgacatgttcagccagctggagaagagggaggtgtggatgcccgaggacacccccggcggcttctgcctggactggatgaccatgcccggcggcccaagcagcggcgcccctcctcccagcggcggcagcccagccggctccccaacctctaccgaggagggcacctctgagtccgccacccccgagagcggccctggcacctccaccgagcccagcgagggcagcgcacccggcagccctgccggcagccccacctccacagaggagggaaccagcaccgagcccagcgaaggcagcgccccaggcaccagcaccgagcctagtgagcaggagattaaacggatcaacaagatcagaagaagacttgtgaaagacagcaacaccaagaaggccggcaagacaggccccatgaaaaccctgctggttagagtgatgacacccgatctgagagagcggctggaaaacctgagaaagaagcctgaaaatatcccccagcccatcagcaatacatctagagccaacctgaataagctgctgaccgattacaccgaaatgaagaaggcgatcctgcatgtgtactgggaagagttccagaaggaccctgtgggcctgatgagccgggtggcccagcctgccagcaagaagatcgatcagaacaagctgaaacctgagatggacgagaagggcaacctgaccaccgccggctttgcctgctctcagtgtggccagcccctgttcgtgtacaagctggagcaggtgtctgagaagggcaaggcttacaccaactacttcggacggtgcaatgtggccgagcacgaaaagctgatcctgctggcccagctgaagcccgagaaggatagcgacgaagccgtgacatatagcctgggaaagtttgggcagagggccctggatttctacagcattcatgtgaccaaggagtccacccaccccgtgaagcccctggcccagatcgccggaaacagatacgcctccggacctgtgggaaaggccctgagcgacgcatgtatgggcacaatcgcctccttcctgtctaagtaccaggacatcatcatcgaacaccagaaggtggtgaagggcaaccagaagagactggagagcctgcgggagctggccggcaaggaaaacctggaataccctagcgtgaccctgccacctcagcctcacaccaaggagggcgttgatgcctacaacgaagtgatcgcccgggtgcgaatgtgggtgaacctgaacctgtggcagaagctgaagctaagcagagatgatgccaagcctctgctgagactgaagggattcccttcctttcctctggtcgagagacaggccaacgaagtggactggtgggacatggtgtgtaacgtgaagaagctgatcaacgagaaaaaggaggatggcaaggtgttttggcagaatctggctggctacaagagacaggaagccctgagaccatacctgagcagcgaggaagatcggaagaagggaaagaaattcgctcggtaccagctgggcgacctgctgctgcacctggaaaagaagcacggcgaggactggggaaaggtgtacgacgaggcctgggagcggattgacaagaaagtggaaggcctgagcaagcacatcaagctggaagaggaacggagaagcgaggacgcccagagcaaggccgccctgaccgactggctgcgggctaaggccagcttcgtgatcgagggcctgaaggaggccgacaaggacgagttctgcagatgcgagctgaagctgcagaagtggtacggggacctgcggggaaagcccttcgccatcgaagccgagaacagcatcctggacatcagcggcttcagcaagcagtacaactgtgccttcatctggcagaaggacggcgtgaagaagctgaacctgtacctgatcatcaactacttcaagggcggcaagctgcggttcaagaagatcaaacctgaagccttcgaagccaacagattctacaccgtgatcaacaaaaagagcggcgagatcgtgcccatggaggtgaacttcaacttcgacgaccccaacctgatcatcctgcctctggcctttggcaagagacagggcagagaattcatctggaacgacctgctgtccctggaaaccggcagcctgaagctggccaacggaagagtgatcgagaagacactgtacaacagaagaacccggcaggatgagcctgccctgttcgtggccctgaccttcgagcggcgggaggtcctggactcctccaatatcaaaccaatgaacctgatcggcgtggcaagaggcgaaaacatccccgccgtgatcgccctgaccgaccccgagggctgcccactgagccggtttaaggatagcctgggaaacccaacccacatcctgagaatcggcgagagctataaggagaagcagcggaccatccaggccaagaaggaggtggagcagcggagagccggcggctacagccggaagtacgccagcaaagccaagaatctggcagacgatatggtgagaaacaccgctagagatctgctgtactacgccgtgacccaggatgccatgctgatcttcgccaacctgagccggggcttcggccggcagggcaagcggaccttcatggccgagagacagtacacacggatggaggactggctgaccgccaagctggcctacgagggcctgagcaagacctacctgtccaagacactggcccagtacacctccaagacatgcagcaactgtgggtttaccatcaccagcgccgactacgacagggtgctggagaagctgaagaagacagcaacaggctggatgaccacaattaacggcaaggagctgaaggtggagggccagattacctactacaacagatacaagagacagaacgtagtcaaggacctgtccgtcgagctggatagactgagcgaagaatctgtgaacaacgacatctcctcctggacaaagggcagaagcggagaagctctgagcctcctgaagaaaagattctcccatagacccgtgcaggagaagttcgtgtgcctgaactgcggcttcgagacacacgcagccgagcaagccgccctgaacatcgccagatcctggctgttcctgcggagccaggagtacaagaaataccagacaaacaagacaaccggcaacaccgataagagagccttcgtcgagacctggcagtccttttaccggaagaagcttaaggaggtgtggaaacctgccgtgcggtctggcggatctggcggaggctccaccagccccaagaaaaagagaaaagtctaagctgccttctgcggggcttgccttctggccatgcccttcttctctcccttgcacctgtacctcttggtctttgaataaagcctgagtaggaaggctagcaaaaaaaaaaaaaaaaaaaaaaaaaaaaaaaaaaaaaaaaaaaaaaaaaaaaaaaaaaaaaaaaaaaaaaaaaaaaaaaa

SEQ ID NO: 12688 - RNA, 5785 nt, synthetic construct
  source 1..5785: mol_type = other RNA
aggaaataagagagaaaagaagagtaagaagaaatataagagccaccatggcccctaagaagaagcgtaaagtgagccggatggaacgcctcgtctacgaggtgcggcagaagtgcagaaacatcgaggacatctgcatctcctgcggatctctgaacgtgaccctggagcacccactgttcatcggcggcatgtgccagaactgtaaaaactgttttctggagtgtgcctatcaatacgacgatgacggctaccagagctactgcaccatctgttgcggcggaagagaggtgctgatgtgtggaaataacaactgctgccggtgcttctgcgtggaatgcgtggacctgctggtgggccccggcgccgcccaggccgctattaaggaagatccttggaactgctacatgtgcggccacaagggcacatacggcctgctgagacggagagaggactggcctagcagactgcagatgttcttcgccaataaccacgaccaggagttcgacccccctaaggtgtaccctcccgtccccgccgagaagagaaagcccatccgggtcctgagcctgttcgatggcatcgccaccggtctgctggtgctgaaggacctgggcatccaggtggataggtacattgcctccgaggtgtgcgaggactccatcaccgtgggaatggtgcgtcatcagggcaagatcatgtacgtgggcgacgtgcggagcgtgacacagaagcatatccaggagtggggccctttcgacctggtgatcggcggcagcccttgcaatgacctgagcatcgtgaacccagcccggaagggcctgtacgagggaaccggcagactgttcttcgagttttacagactgctgcacgacgcccggcctaaggaaggcgacgaccggcccttcttttggctgttcgagaatgtggtggccatgggagtcagcgacaagcgggatattagccggttcctggagagcaaccccgtgatgatcgatgccaaggaagtgagcgccgcccaccgggccagatacttctggggcaatctgcctggcatgaacagacccctggccagcaccgtgaacgacaagctggagctgcaggagtgcctggagcacggccggatcgccaagttcagcaaggtgagaaccatcaccacccgaagcaacagcatcaaacaaggcaaggaccagcactttcctgtgttcatgaacgagaaggaggacatcctgtggtgtaccgagatggagagagtgttcgggttcccagtccactacacagatgtcagcaacatgtctagactggccagacagagactgctgggaagaagctggtccgtccctgtgatcagacacctgttcgcccctctgaaggagtacttcgcctgcgtgagcagcggcaacagcaacgccaacagccggggccccagcttctctagcggcctggtgccactgtccctgagagggagccacatgggccccatggagatctacaaaaccgtgagcgcctggaagcggcagcctgtgcgcgtgctgagcctgtttcggaatatcgataaagtcctgaaaagcctgggattcctggagagcggctctggctccggcggtggcaccctgaagtacgtggaggatgtgacaaacgtggtcagacgggatgtggagaagtggggccccttcgatctggtgtacggcagcacccaacccctgggcagctcttgtgaccggtgccctggctggtacatgtttcagttccaccggatcctgcagtacgccctgccgagacaggagtcccagcggccattcttttggattttcatggacaacttgctgctgaccgaggatgaccaggaaactaccactcggttcctgcagaccgaagccgtgaccctgcaggacgtgagaggccgggactaccagaacgccatgcgggtgtggtccaacatccctggactgaaaagcaagcacgcacctctgacccctaaagaagaggagtacctgcaggcccaggtgcggagcagaagcaagctggacgcccctaaggtggatctgctggtgaagaattgcctcctgcccctgagagagtacttcaagtatttcagccagaatagtctgcccctgggaggcagcggcggcggcaccagcgagcccgtgagcttcgccgacgtggccgtgtacttcagccaggaggagtggggctgcctgcagcccgcccagagggccctgtacagggacgtgatgagggagacctacggccacctgggcgccctgggcttcaggggcaccaagcccgccctgatcagctgggtggaggaggaggccgagctgtggggccccgacgccggcccccccgagatgggcgagtgcctgaccgaggccgacggcggcccaagcagcggcgcccctcctcccagcggcggcagcccagccggctccccaacctctaccgaggagggcacctctgagtccgccacccccgagagcggccctggcacctccaccgagcccagcgagggcagcgcacccggcagccctgccggcagccccacctccacagaggagggaaccagcaccgagcccagcgaaggcagcgccccaggcaccagcaccgagcctagtgagcaggagattaaacggatcaacaagatcagaagaagacttgtgaaagacagcaacaccaagaaggccggcaagacaggccccatgaaaaccctgctggttagagtgatgacacccgatctgagagagcggctggaaaacctgagaaagaagcctgaaaatatcccccagcccatcagcaatacatctagagccaacctgaataagctgctgaccgattacaccgaaatgaagaaggcgatcctgcatgtgtactgggaagagttccagaaggaccctgtgggcctgatgagccgggtggcccagcctgccagcaagaagatcgatcagaacaagctgaaacctgagatggacgagaagggcaacctgaccaccgccggctttgcctgctctcagtgtggccagcccctgttcgtgtacaagctggagcaggtgtctgagaagggcaaggcttacaccaactacttcggacggtgcaatgtggccgagcacgaaaagctgatcctgctggcccagctgaagcccgagaaggatagcgacgaagccgtgacatatagcctgggaaagtttgggcagagggccctggatttctacagcattcatgtgaccaaggagtccacccaccccgtgaagcccctggcccagatcgccggaaacagatacgcctccggacctgtgggaaaggccctgagcgacgcatgtatgggcacaatcgcctccttcctgtctaagtaccaggacatcatcatcgaacaccagaaggtggtgaagggcaaccagaagagactggagagcctgcgggagctggccggcaaggaaaacctggaataccctagcgtgaccctgccacctcagcctcacaccaaggagggcgttgatgcctacaacgaagtgatcgcccgggtgcgaatgtgggtgaacctgaacctgtggcagaagctgaagctaagcagagatgatgccaagcctctgctgagactgaagggattcccttcctttcctctggtcgagagacaggccaacgaagtggactggtgggacatggtgtgtaacgtgaagaagctgatcaacgagaaaaaggaggatggcaaggtgttttggcagaatctggctggctacaagagacaggaagccctgagaccatacctgagcagcgaggaagatcggaagaagggaaagaaattcgctcggtaccagctgggcgacctgctgctgcacctggaaaagaagcacggcgaggactggggaaaggtgtacgacgaggcctgggagcggattgacaagaaagtggaaggcctgagcaagcacatcaagctggaagaggaacggagaagcgaggacgcccagagcaaggccgccctgaccgactggctgcgggctaaggccagcttcgtgatcgagggcctgaaggaggccgacaaggacgagttctgcagatgcgagctgaagctgcagaagtggtacggggacctgcggggaaagcccttcgccatcgaagccgagaacagcatcctggacatcagcggcttcagcaagcagtacaactgtgccttcatctggcagaaggacggcgtgaagaagctgaacctgtacctgatcatcaactacttcaagggcggcaagctgcggttcaagaagatcaaacctgaagccttcgaagccaacagattctacaccgtgatcaacaaaaagagcggcgagatcgtgcccatggaggtgaacttcaacttcgacgaccccaacctgatcatcctgcctctggcctttggcaagagacagggcagagaattcatctggaacgacctgctgtccctggaaaccggcagcctgaagctggccaacggaagagtgatcgagaagacactgtacaacagaagaacccggcaggatgagcctgccctgttcgtggccctgaccttcgagcggcgggaggtcctggactcctccaatatcaaaccaatgaacctgatcggcgtggcaagaggcgaaaacatccccgccgtgatcgccctgaccgaccccgagggctgcccactgagccggtttaaggatagcctgggaaacccaacccacatcctgagaatcggcgagagctataaggagaagcagcggaccatccaggccaagaaggaggtggagcagcggagagccggcggctacagccggaagtacgccagcaaagccaagaatctggcagacgatatggtgagaaacaccgctagagatctgctgtactacgccgtgacccaggatgccatgctgatcttcgccaacctgagccggggcttcggccggcagggcaagcggaccttcatggccgagagacagtacacacggatggaggactggctgaccgccaagctggcctacgagggcctgagcaagacctacctgtccaagacactggcccagtacacctccaagacatgcagcaactgtgggtttaccatcaccagcgccgactacgacagggtgctggagaagctgaagaagacagcaacaggctggatgaccacaattaacggcaaggagctgaaggtggagggccagattacctactacaacagatacaagagacagaacgtagtcaaggacctgtccgtcgagctggatagactgagcgaagaatctgtgaacaacgacatctcctcctggacaaagggcagaagcggagaagctctgagcctcctgaagaaaagattctcccatagacccgtgcaggagaagttcgtgtgcctgaactgcggcttcgagacacacgcagccgagcaagccgccctgaacatcgccagatcctggctgttcctgcggagccaggagtacaagaaataccagacaaacaagacaaccggcaacaccgataagagagccttcgtcgagacctggcagtccttttaccggaagaagcttaaggaggtgtggaaacctgccgtgcggtctggcggatctggcggaggctccaccagccccaagaaaaagagaaaagtctaagctgccttctgcggggcttgccttctggccatgcccttcttctctcccttgcacctgtacctcttggtctttgaataaagcctgagtaggaaggctagcaaaaaaaaaaaaaaaaaaaaaaaaaaaaaaaaaaaaaaaaaaaaaaaaaaaaaaaaaaaaaaaaaaaaaaaaaaaaaaaa

SEQ ID NO: 12689 - RNA, 5785 nt, synthetic construct
  source 1..5785: mol_type = other RNA
aggaaataagagagaaaagaagagtaagaagaaatataagagccaccatggcccctaagaagaagcgtaaagtgagccggatggaacgcctcgtctacgaggtgcggcagaagtgcagaaacatcgaggacatctgcatctcctgcggatctctgaacgtgaccctggagcacccactgttcatcggcggcatgtgccagaactgtaaaaactgttttctggagtgtgcctatcaatacgacgatgacggctaccagagctactgcaccatctgttgcggcggaagagaggtgctgatgtgtggaaataacaactgctgccggtgcttctgcgtggaatgcgtggacctgctggtgggccccggcgccgcccaggccgctattaaggaagatccttggaactgctacatgtgcggccacaagggcacatacggcctgctgagacggagagaggactggcctagcagactgcagatgttcttcgccaataaccacgaccaggagttcgacccccctaaggtgtaccctcccgtccccgccgagaagagaaagcccatccgggtcctgagcctgttcgatggcatcgccaccggtctgctggtgctgaaggacctgggcatccaggtggataggtacattgcctccgaggtgtgcgaggactccatcaccgtgggaatggtgcgtcatcagggcaagatcatgtacgtgggcgacgtgcggagcgtgacacagaagcatatccaggagtggggccctttcgacctggtgatcggcggcagcccttgcaatgacctgagcatcgtgaacccagcccggaagggcctgtacgagggaaccggcagactgttcttcgagttttacagactgctgcacgacgcccggcctaaggaaggcgacgaccggcccttcttttggctgttcgagaatgtggtggccatgggagtcagcgacaagcgggatattagccggttcctggagagcaaccccgtgatgatcgatgccaaggaagtgagcgccgcccaccgggccagatacttctggggcaatctgcctggcatgaacagacccctggccagcaccgtgaacgacaagctggagctgcaggagtgcctggagcacggccggatcgccaagttcagcaaggtgagaaccatcaccacccgaagcaacagcatcaaacaaggcaaggaccagcactttcctgtgttcatgaacgagaaggaggacatcctgtggtgtaccgagatggagagagtgttcgggttcccagtccactacacagatgtcagcaacatgtctagactggccagacagagactgctgggaagaagctggtccgtccctgtgatcagacacctgttcgcccctctgaaggagtacttcgcctgcgtgagcagcggcaacagcaacgccaacagccggggccccagcttctctagcggcctggtgccactgtccctgagagggagccacatgggccccatggagatctacaaaaccgtgagcgcctggaagcggcagcctgtgcgcgtgctgagcctgtttcggaatatcgataaagtcctgaaaagcctgggattcctggagagcggctctggctccggcggtggcaccctgaagtacgtggaggatgtgacaaacgtggtcagacgggatgtggagaagtggggccccttcgatctggtgtacggcagcacccaacccctgggcagctcttgtgaccggtgccctggctggtacatgtttcagttccaccggatcctgcagtacgccctgccgagacaggagtcccagcggccattcttttggattttcatggacaacttgctgctgaccgaggatgaccaggaaactaccactcggttcctgcagaccgaagccgtgaccctgcaggacgtgagaggccgggactaccagaacgccatgcgggtgtggtccaacatccctggactgaaaagcaagcacgcacctctgacccctaaagaagaggagtacctgcaggcccaggtgcggagcagaagcaagctggacgcccctaaggtggatctgctggtgaagaattgcctcctgcccctgagagagtacttcaagtatttcagccagaatagtctgcccctgggaggcagcggcggcggcgcccagaccctgctgaccttcagggacgtggccatcgagttcagcctggaggagtggaagtgcctggacctggcccagcagaacctgtacagggacgtgatgctggagaactacaggaacctgttcagcgtgggcctgaccgtgagcaagcccggcctgatcacctgcctggagcagaggaaggagccctggaacgtgaagaggcaggaggccgccgacggccaccccgccatgagcagctgcggcggcccaagcagcggcgcccctcctcccagcggcggcagcccagccggctccccaacctctaccgaggagggcacctctgagtccgccacccccgagagcggccctggcacctccaccgagcccagcgagggcagcgcacccggcagccctgccggcagccccacctccacagaggagggaaccagcaccgagcccagcgaaggcagcgccccaggcaccagcaccgagcctagtgagcaggagattaaacggatcaacaagatcagaagaagacttgtgaaagacagcaacaccaagaaggccggcaagacaggccccatgaaaaccctgctggttagagtgatgacacccgatctgagagagcggctggaaaacctgagaaagaagcctgaaaatatcccccagcccatcagcaatacatctagagccaacctgaataagctgctgaccgattacaccgaaatgaagaaggcgatcctgcatgtgtactgggaagagttccagaaggaccctgtgggcctgatgagccgggtggcccagcctgccagcaagaagatcgatcagaacaagctgaaacctgagatggacgagaagggcaacctgaccaccgccggctttgcctgctctcagtgtggccagcccctgttcgtgtacaagctggagcaggtgtctgagaagggcaaggcttacaccaactacttcggacggtgcaatgtggccgagcacgaaaagctgatcctgctggcccagctgaagcccgagaaggatagcgacgaagccgtgacatatagcctgggaaagtttgggcagagggccctggatttctacagcattcatgtgaccaaggagtccacccaccccgtgaagcccctggcccagatcgccggaaacagatacgcctccggacctgtgggaaaggccctgagcgacgcatgtatgggcacaatcgcctccttcctgtctaagtaccaggacatcatcatcgaacaccagaaggtggtgaagggcaaccagaagagactggagagcctgcgggagctggccggcaaggaaaacctggaataccctagcgtgaccctgccacctcagcctcacaccaaggagggcgttgatgcctacaacgaagtgatcgcccgggtgcgaatgtgggtgaacctgaacctgtggcagaagctgaagctaagcagagatgatgccaagcctctgctgagactgaagggattcccttcctttcctctggtcgagagacaggccaacgaagtggactggtgggacatggtgtgtaacgtgaagaagctgatcaacgagaaaaaggaggatggcaaggtgttttggcagaatctggctggctacaagagacaggaagccctgagaccatacctgagcagcgaggaagatcggaagaagggaaagaaattcgctcggtaccagctgggcgacctgctgctgcacctggaaaagaagcacggcgaggactggggaaaggtgtacgacgaggcctgggagcggattgacaagaaagtggaaggcctgagcaagcacatcaagctggaagaggaacggagaagcgaggacgcccagagcaaggccgccctgaccgactggctgcgggctaaggccagcttcgtgatcgagggcctgaaggaggccgacaaggacgagttctgcagatgcgagctgaagctgcagaagtggtacggggacctgcggggaaagcccttcgccatcgaagccgagaacagcatcctggacatcagcggcttcagcaagcagtacaactgtgccttcatctggcagaaggacggcgtgaagaagctgaacctgtacctgatcatcaactacttcaagggcggcaagctgcggttcaagaagatcaaacctgaagccttcgaagccaacagattctacaccgtgatcaacaaaaagagcggcgagatcgtgcccatggaggtgaacttcaacttcgacgaccccaacctgatcatcctgcctctggcctttggcaagagacagggcagagaattcatctggaacgacctgctgtccctggaaaccggcagcctgaagctggccaacggaagagtgatcgagaagacactgtacaacagaagaacccggcaggatgagcctgccctgttcgtggccctgaccttcgagcggcgggaggtcctggactcctccaatatcaaaccaatgaacctgatcggcgtggcaagaggcgaaaacatccccgccgtgatcgccctgaccgaccccgagggctgcccactgagccggtttaaggatagcctgggaaacccaacccacatcctgagaatcggcgagagctataaggagaagcagcggaccatccaggccaagaaggaggtggagcagcggagagccggcggctacagccggaagtacgccagcaaagccaagaatctggcagacgatatggtgagaaacaccgctagagatctgctgtactacgccgtgacccaggatgccatgctgatcttcgccaacctgagccggggcttcggccggcagggcaagcggaccttcatggccgagagacagtacacacggatggaggactggctgaccgccaagctggcctacgagggcctgagcaagacctacctgtccaagacactggcccagtacacctccaagacatgcagcaactgtgggtttaccatcaccagcgccgactacgacagggtgctggagaagctgaagaagacagcaacaggctggatgaccacaattaacggcaaggagctgaaggtggagggccagattacctactacaacagatacaagagacagaacgtagtcaaggacctgtccgtcgagctggatagactgagcgaagaatctgtgaacaacgacatctcctcctggacaaagggcagaagcggagaagctctgagcctcctgaagaaaagattctcccatagacccgtgcaggagaagttcgtgtgcctgaactgcggcttcgagacacacgcagccgagcaagccgccctgaacatcgccagatcctggctgttcctgcggagccaggagtacaagaaataccagacaaacaagacaaccggcaacaccgataagagagccttcgtcgagacctggcagtccttttaccggaagaagcttaaggaggtgtggaaacctgccgtgcggtctggcggatctggcggaggctccaccagccccaagaaaaagagaaaagtctaagctgccttctgcggggcttgccttctggccatgcccttcttctctcccttgcacctgtacctcttggtctttgaataaagcctgagtaggaaggctagcaaaaaaaaaaaaaaaaaaaaaaaaaaaaaaaaaaaaaaaaaaaaaaaaaaaaaaaaaaaaaaaaaaaaaaaaaaaaaaaa

SEQ ID NO: 12690 - RNA, 5785 nt, synthetic construct
  source 1..5785: mol_type = other RNA
aggaaataagagagaaaagaagagtaagaagaaatataagagccaccatggcccctaagaagaagcgtaaagtgagccggatggaacgcctcgtctacgaggtgcggcagaagtgcagaaacatcgaggacatctgcatctcctgcggatctctgaacgtgaccctggagcacccactgttcatcggcggcatgtgccagaactgtaaaaactgttttctggagtgtgcctatcaatacgacgatgacggctaccagagctactgcaccatctgttgcggcggaagagaggtgctgatgtgtggaaataacaactgctgccggtgcttctgcgtggaatgcgtggacctgctggtgggccccggcgccgcccaggccgctattaaggaagatccttggaactgctacatgtgcggccacaagggcacatacggcctgctgagacggagagaggactggcctagcagactgcagatgttcttcgccaataaccacgaccaggagttcgacccccctaaggtgtaccctcccgtccccgccgagaagagaaagcccatccgggtcctgagcctgttcgatggcatcgccaccggtctgctggtgctgaaggacctgggcatccaggtggataggtacattgcctccgaggtgtgcgaggactccatcaccgtgggaatggtgcgtcatcagggcaagatcatgtacgtgggcgacgtgcggagcgtgacacagaagcatatccaggagtggggccctttcgacctggtgatcggcggcagcccttgcaatgacctgagcatcgtgaacccagcccggaagggcctgtacgagggaaccggcagactgttcttcgagttttacagactgctgcacgacgcccggcctaaggaaggcgacgaccggcccttcttttggctgttcgagaatgtggtggccatgggagtcagcgacaagcgggatattagccggttcctggagagcaaccccgtgatgatcgatgccaaggaagtgagcgccgcccaccgggccagatacttctggggcaatctgcctggcatgaacagacccctggccagcaccgtgaacgacaagctggagctgcaggagtgcctggagcacggccggatcgccaagttcagcaaggtgagaaccatcaccacccgaagcaacagcatcaaacaaggcaaggaccagcactttcctgtgttcatgaacgagaaggaggacatcctgtggtgtaccgagatggagagagtgttcgggttcccagtccactacacagatgtcagcaacatgtctagactggccagacagagactgctgggaagaagctggtccgtccctgtgatcagacacctgttcgcccctctgaaggagtacttcgcctgcgtgagcagcggcaacagcaacgccaacagccggggccccagcttctctagcggcctggtgccactgtccctgagagggagccacatgggccccatggagatctacaaaaccgtgagcgcctggaagcggcagcctgtgcgcgtgctgagcctgtttcggaatatcgataaagtcctgaaaagcctgggattcctggagagcggctctggctccggcggtggcaccctgaagtacgtggaggatgtgacaaacgtggtcagacgggatgtggagaagtggggccccttcgatctggtgtacggcagcacccaacccctgggcagctcttgtgaccggtgccctggctggtacatgtttcagttccaccggatcctgcagtacgccctgccgagacaggagtcccagcggccattcttttggattttcatggacaacttgctgctgaccgaggatgaccaggaaactaccactcggttcctgcagaccgaagccgtgaccctgcaggacgtgagaggccgggactaccagaacgccatgcgggtgtggtccaacatccctggactgaaaagcaagcacgcacctctgacccctaaagaagaggagtacctgcaggcccaggtgcggagcagaagcaagctggacgcccctaaggtggatctgctggtgaagaattgcctcctgcccctgagagagtacttcaagtatttcagccagaatagtctgcccctgggaggcagcggcggcggctgccaggagcccgtgagcttcgcccaggtggccgtgtacttcagcagggaggagtgggccctgctggaccccgcccagagggccctgtacagggacgtgatgctggagacctaccagtgcgtggccagcctggcccccctgcccgcccccaagcccgtgctgatcagccagctggagggcgaggaggacccctgcatcagcgacgtgaggagccccgaggccgtgcccggcgacctgagccccggcggcccaagcagcggcgcccctcctcccagcggcggcagcccagccggctccccaacctctaccgaggagggcacctctgagtccgccacccccgagagcggccctggcacctccaccgagcccagcgagggcagcgcacccggcagccctgccggcagccccacctccacagaggagggaaccagcaccgagcccagcgaaggcagcgccccaggcaccagcaccgagcctagtgagcaggagattaaacggatcaacaagatcagaagaagacttgtgaaagacagcaacaccaagaaggccggcaagacaggccccatgaaaaccctgctggttagagtgatgacacccgatctgagagagcggctggaaaacctgagaaagaagcctgaaaatatcccccagcccatcagcaatacatctagagccaacctgaataagctgctgaccgattacaccgaaatgaagaaggcgatcctgcatgtgtactgggaagagttccagaaggaccctgtgggcctgatgagccgggtggcccagcctgccagcaagaagatcgatcagaacaagctgaaacctgagatggacgagaagggcaacctgaccaccgccggctttgcctgctctcagtgtggccagcccctgttcgtgtacaagctggagcaggtgtctgagaagggcaaggcttacaccaactacttcggacggtgcaatgtggccgagcacgaaaagctgatcctgctggcccagctgaagcccgagaaggatagcgacgaagccgtgacatatagcctgggaaagtttgggcagagggccctggatttctacagcattcatgtgaccaaggagtccacccaccccgtgaagcccctggcccagatcgccggaaacagatacgcctccggacctgtgggaaaggccctgagcgacgcatgtatgggcacaatcgcctccttcctgtctaagtaccaggacatcatcatcgaacaccagaaggtggtgaagggcaaccagaagagactggagagcctgcgggagctggccggcaaggaaaacctggaataccctagcgtgaccctgccacctcagcctcacaccaaggagggcgttgatgcctacaacgaagtgatcgcccgggtgcgaatgtgggtgaacctgaacctgtggcagaagctgaagctaagcagagatgatgccaagcctctgctgagactgaagggattcccttcctttcctctggtcgagagacaggccaacgaagtggactggtgggacatggtgtgtaacgtgaagaagctgatcaacgagaaaaaggaggatggcaaggtgttttggcagaatctggctggctacaagagacaggaagccctgagaccatacctgagcagcgaggaagatcggaagaagggaaagaaattcgctcggtaccagctgggcgacctgctgctgcacctggaaaagaagcacggcgaggactggggaaaggtgtacgacgaggcctgggagcggattgacaagaaagtggaaggcctgagcaagcacatcaagctggaagaggaacggagaagcgaggacgcccagagcaaggccgccctgaccgactggctgcgggctaaggccagcttcgtgatcgagggcctgaaggaggccgacaaggacgagttctgcagatgcgagctgaagctgcagaagtggtacggggacctgcggggaaagcccttcgccatcgaagccgagaacagcatcctggacatcagcggcttcagcaagcagtacaactgtgccttcatctggcagaaggacggcgtgaagaagctgaacctgtacctgatcatcaactacttcaagggcggcaagctgcggttcaagaagatcaaacctgaagccttcgaagccaacagattctacaccgtgatcaacaaaaagagcggcgagatcgtgcccatggaggtgaacttcaacttcgacgaccccaacctgatcatcctgcctctggcctttggcaagagacagggcagagaattcatctggaacgacctgctgtccctggaaaccggcagcctgaagctggccaacggaagagtgatcgagaagacactgtacaacagaagaacccggcaggatgagcctgccctgttcgtggccctgaccttcgagcggcgggaggtcctggactcctccaatatcaaaccaatgaacctgatcggcgtggcaagaggcgaaaacatccccgccgtgatcgccctgaccgaccccgagggctgcccactgagccggtttaaggatagcctgggaaacccaacccacatcctgagaatcggcgagagctataaggagaagcagcggaccatccaggccaagaaggaggtggagcagcggagagccggcggctacagccggaagtacgccagcaaagccaagaatctggcagacgatatggtgagaaacaccgctagagatctgctgtactacgccgtgacccaggatgccatgctgatcttcgccaacctgagccggggcttcggccggcagggcaagcggaccttcatggccgagagacagtacacacggatggaggactggctgaccgccaagctggcctacgagggcctgagcaagacctacctgtccaagacactggcccagtacacctccaagacatgcagcaactgtgggtttaccatcaccagcgccgactacgacagggtgctggagaagctgaagaagacagcaacaggctggatgaccacaattaacggcaaggagctgaaggtggagggccagattacctactacaacagatacaagagacagaacgtagtcaaggacctgtccgtcgagctggatagactgagcgaagaatctgtgaacaacgacatctcctcctggacaaagggcagaagcggagaagctctgagcctcctgaagaaaagattctcccatagacccgtgcaggagaagttcgtgtgcctgaactgcggcttcgagacacacgcagccgagcaagccgccctgaacatcgccagatcctggctgttcctgcggagccaggagtacaagaaataccagacaaacaagacaaccggcaacaccgataagagagccttcgtcgagacctggcagtccttttaccggaagaagcttaaggaggtgtggaaacctgccgtgcggtctggcggatctggcggaggctccaccagccccaagaaaaagagaaaagtctaagctgccttctgcggggcttgccttctggccatgcccttcttctctcccttgcacctgtacctcttggtctttgaataaagcctgagtaggaaggctagcaaaaaaaaaaaaaaaaaaaaaaaaaaaaaaaaaaaaaaaaaaaaaaaaaaaaaaaaaaaaaaaaaaaaaaaaaaaaaaaa

SEQ ID NO: 12691 - RNA, 5818 nt, synthetic construct
  source 1..5818: mol_type = other RNA
aggaaataagagagaaaagaagagtaagaagaaatataagagccaccatggcccctaagaagaagcgtaaagtgagccggatggaacgcctcgtctacgaggtgcggcagaagtgcagaaacatcgaggacatctgcatctcctgcggatctctgaacgtgaccctggagcacccactgttcatcggcggcatgtgccagaactgtaaaaactgttttctggagtgtgcctatcaatacgacgatgacggctaccagagctactgcaccatctgttgcggcggaagagaggtgctgatgtgtggaaataacaactgctgccggtgcttctgcgtggaatgcgtggacctgctggtgggccccggcgccgcccaggccgctattaaggaagatccttggaactgctacatgtgcggccacaagggcacatacggcctgctgagacggagagaggactggcctagcagactgcagatgttcttcgccaataaccacgaccaggagttcgacccccctaaggtgtaccctcccgtccccgccgagaagagaaagcccatccgggtcctgagcctgttcgatggcatcgccaccggtctgctggtgctgaaggacctgggcatccaggtggataggtacattgcctccgaggtgtgcgaggactccatcaccgtgggaatggtgcgtcatcagggcaagatcatgtacgtgggcgacgtgcggagcgtgacacagaagcatatccaggagtggggccctttcgacctggtgatcggcggcagcccttgcaatgacctgagcatcgtgaacccagcccggaagggcctgtacgagggaaccggcagactgttcttcgagttttacagactgctgcacgacgcccggcctaaggaaggcgacgaccggcccttcttttggctgttcgagaatgtggtggccatgggagtcagcgacaagcgggatattagccggttcctggagagcaaccccgtgatgatcgatgccaaggaagtgagcgccgcccaccgggccagatacttctggggcaatctgcctggcatgaacagacccctggccagcaccgtgaacgacaagctggagctgcaggagtgcctggagcacggccggatcgccaagttcagcaaggtgagaaccatcaccacccgaagcaacagcatcaaacaaggcaaggaccagcactttcctgtgttcatgaacgagaaggaggacatcctgtggtgtaccgagatggagagagtgttcgggttcccagtccactacacagatgtcagcaacatgtctagactggccagacagagactgctgggaagaagctggtccgtccctgtgatcagacacctgttcgcccctctgaaggagtacttcgcctgcgtgagcagcggcaacagcaacgccaacagccggggccccagcttctctagcggcctggtgccactgtccctgagagggagccacatgggccccatggagatctacaaaaccgtgagcgcctggaagcggcagcctgtgcgcgtgctgagcctgtttcggaatatcgataaagtcctgaaaagcctgggattcctggagagcggctctggctccggcggtggcaccctgaagtacgtggaggatgtgacaaacgtggtcagacgggatgtggagaagtggggccccttcgatctggtgtacggcagcacccaacccctgggcagctcttgtgaccggtgccctggctggtacatgtttcagttccaccggatcctgcagtacgccctgccgagacaggagtcccagcggccattcttttggattttcatggacaacttgctgctgaccgaggatgaccaggaaactaccactcggttcctgcagaccgaagccgtgaccctgcaggacgtgagaggccgggactaccagaacgccatgcgggtgtggtccaacatccctggactgaaaagcaagcacgcacctctgacccctaaagaagaggagtacctgcaggcccaggtgcggagcagaagcaagctggacgcccctaaggtggatctgctggtgaagaattgcctcctgcccctgagagagtacttcaagtatttcagccagaatagtctgcccctgggaggcagcggcggcggcgtgaagttcgacgaggtggccgtggtgttcagcgaggacgagtggaacctgctgaccgaccagcagaggggcctgtacatggaggtgatgaaggagaactacgagcacctgatctacctgggcttcgaggtgcccgtgatcctgagcctgctgcaggacggcggcggcatcggcagcgacaccgtgacccagagcaagagccagcaggtggccggcgccgaggagagcaagagcagcgtgaccctggagggccccatccccgagaccctgcccagcggcggcccaagcagcggcgcccctcctcccagcggcggcagcccagccggctccccaacctctaccgaggagggcacctctgagtccgccacccccgagagcggccctggcacctccaccgagcccagcgagggcagcgcacccggcagccctgccggcagccccacctccacagaggagggaaccagcaccgagcccagcgaaggcagcgccccaggcaccagcaccgagcctagtgagcaggagattaaacggatcaacaagatcagaagaagacttgtgaaagacagcaacaccaagaaggccggcaagacaggccccatgaaaaccctgctggttagagtgatgacacccgatctgagagagcggctggaaaacctgagaaagaagcctgaaaatatcccccagcccatcagcaatacatctagagccaacctgaataagctgctgaccgattacaccgaaatgaagaaggcgatcctgcatgtgtactgggaagagttccagaaggaccctgtgggcctgatgagccgggtggcccagcctgccagcaagaagatcgatcagaacaagctgaaacctgagatggacgagaagggcaacctgaccaccgccggctttgcctgctctcagtgtggccagcccctgttcgtgtacaagctggagcaggtgtctgagaagggcaaggcttacaccaactacttcggacggtgcaatgtggccgagcacgaaaagctgatcctgctggcccagctgaagcccgagaaggatagcgacgaagccgtgacatatagcctgggaaagtttgggcagagggccctggatttctacagcattcatgtgaccaaggagtccacccaccccgtgaagcccctggcccagatcgccggaaacagatacgcctccggacctgtgggaaaggccctgagcgacgcatgtatgggcacaatcgcctccttcctgtctaagtaccaggacatcatcatcgaacaccagaaggtggtgaagggcaaccagaagagactggagagcctgcgggagctggccggcaaggaaaacctggaataccctagcgtgaccctgccacctcagcctcacaccaaggagggcgttgatgcctacaacgaagtgatcgcccgggtgcgaatgtgggtgaacctgaacctgtggcagaagctgaagctaagcagagatgatgccaagcctctgctgagactgaagggattcccttcctttcctctggtcgagagacaggccaacgaagtggactggtgggacatggtgtgtaacgtgaagaagctgatcaacgagaaaaaggaggatggcaaggtgttttggcagaatctggctggctacaagagacaggaagccctgagaccatacctgagcagcgaggaagatcggaagaagggaaagaaattcgctcggtaccagctgggcgacctgctgctgcacctggaaaagaagcacggcgaggactggggaaaggtgtacgacgaggcctgggagcggattgacaagaaagtggaaggcctgagcaagcacatcaagctggaagaggaacggagaagcgaggacgcccagagcaaggccgccctgaccgactggctgcgggctaaggccagcttcgtgatcgagggcctgaaggaggccgacaaggacgagttctgcagatgcgagctgaagctgcagaagtggtacggggacctgcggggaaagcccttcgccatcgaagccgagaacagcatcctggacatcagcggcttcagcaagcagtacaactgtgccttcatctggcagaaggacggcgtgaagaagctgaacctgtacctgatcatcaactacttcaagggcggcaagctgcggttcaagaagatcaaacctgaagccttcgaagccaacagattctacaccgtgatcaacaaaaagagcggcgagatcgtgcccatggaggtgaacttcaacttcgacgaccccaacctgatcatcctgcctctggcctttggcaagagacagggcagagaattcatctggaacgacctgctgtccctggaaaccggcagcctgaagctggccaacggaagagtgatcgagaagacactgtacaacagaagaacccggcaggatgagcctgccctgttcgtggccctgaccttcgagcggcgggaggtcctggactcctccaatatcaaaccaatgaacctgatcggcgtggcaagaggcgaaaacatccccgccgtgatcgccctgaccgaccccgagggctgcccactgagccggtttaaggatagcctgggaaacccaacccacatcctgagaatcggcgagagctataaggagaagcagcggaccatccaggccaagaaggaggtggagcagcggagagccggcggctacagccggaagtacgccagcaaagccaagaatctggcagacgatatggtgagaaacaccgctagagatctgctgtactacgccgtgacccaggatgccatgctgatcttcgccaacctgagccggggcttcggccggcagggcaagcggaccttcatggccgagagacagtacacacggatggaggactggctgaccgccaagctggcctacgagggcctgagcaagacctacctgtccaagacactggcccagtacacctccaagacatgcagcaactgtgggtttaccatcaccagcgccgactacgacagggtgctggagaagctgaagaagacagcaacaggctggatgaccacaattaacggcaaggagctgaaggtggagggccagattacctactacaacagatacaagagacagaacgtagtcaaggacctgtccgtcgagctggatagactgagcgaagaatctgtgaacaacgacatctcctcctggacaaagggcagaagcggagaagctctgagcctcctgaagaaaagattctcccatagacccgtgcaggagaagttcgtgtgcctgaactgcggcttcgagacacacgcagccgagcaagccgccctgaacatcgccagatcctggctgttcctgcggagccaggagtacaagaaataccagacaaacaagacaaccggcaacaccgataagagagccttcgtcgagacctggcagtccttttaccggaagaagcttaaggaggtgtggaaacctgccgtgcggtctggcggatctggcggaggctccaccagccccaagaaaaagagaaaagtctaagctgccttctgcggggcttgccttctggccatgcccttcttctctcccttgcacctgtacctcttggtctttgaataaagcctgagtaggaaggctagcaaaaaaaaaaaaaaaaaaaaaaaaaaaaaaaaaaaaaaaaaaaaaaaaaaaaaaaaaaaaaaaaaaaaaaaaaaaaaaaa

SEQ ID NO: 12692 - RNA, 5785 nt, synthetic construct
  source 1..5785: mol_type = other RNA
aggaaataagagagaaaagaagagtaagaagaaatataagagccaccatggcccctaagaagaagcgtaaagtgagccggatggaacgcctcgtctacgaggtgcggcagaagtgcagaaacatcgaggacatctgcatctcctgcggatctctgaacgtgaccctggagcacccactgttcatcggcggcatgtgccagaactgtaaaaactgttttctggagtgtgcctatcaatacgacgatgacggctaccagagctactgcaccatctgttgcggcggaagagaggtgctgatgtgtggaaataacaactgctgccggtgcttctgcgtggaatgcgtggacctgctggtgggccccggcgccgcccaggccgctattaaggaagatccttggaactgctacatgtgcggccacaagggcacatacggcctgctgagacggagagaggactggcctagcagactgcagatgttcttcgccaataaccacgaccaggagttcgacccccctaaggtgtaccctcccgtccccgccgagaagagaaagcccatccgggtcctgagcctgttcgatggcatcgccaccggtctgctggtgctgaaggacctgggcatccaggtggataggtacattgcctccgaggtgtgcgaggactccatcaccgtgggaatggtgcgtcatcagggcaagatcatgtacgtgggcgacgtgcggagcgtgacacagaagcatatccaggagtggggccctttcgacctggtgatcggcggcagcccttgcaatgacctgagcatcgtgaacccagcccggaagggcctgtacgagggaaccggcagactgttcttcgagttttacagactgctgcacgacgcccggcctaaggaaggcgacgaccggcccttcttttggctgttcgagaatgtggtggccatgggagtcagcgacaagcgggatattagccggttcctggagagcaaccccgtgatgatcgatgccaaggaagtgagcgccgcccaccgggccagatacttctggggcaatctgcctggcatgaacagacccctggccagcaccgtgaacgacaagctggagctgcaggagtgcctggagcacggccggatcgccaagttcagcaaggtgagaaccatcaccacccgaagcaacagcatcaaacaaggcaaggaccagcactttcctgtgttcatgaacgagaaggaggacatcctgtggtgtaccgagatggagagagtgttcgggttcccagtccactacacagatgtcagcaacatgtctagactggccagacagagactgctgggaagaagctggtccgtccctgtgatcagacacctgttcgcccctctgaaggagtacttcgcctgcgtgagcagcggcaacagcaacgccaacagccggggccccagcttctctagcggcctggtgccactgtccctgagagggagccacatgggccccatggagatctacaaaaccgtgagcgcctggaagcggcagcctgtgcgcgtgctgagcctgtttcggaatatcgataaagtcctgaaaagcctgggattcctggagagcggctctggctccggcggtggcaccctgaagtacgtggaggatgtgacaaacgtggtcagacgggatgtggagaagtggggccccttcgatctggtgtacggcagcacccaacccctgggcagctcttgtgaccggtgccctggctggtacatgtttcagttccaccggatcctgcagtacgccctgccgagacaggagtcccagcggccattcttttggattttcatggacaacttgctgctgaccgaggatgaccaggaaactaccactcggttcctgcagaccgaagccgtgaccctgcaggacgtgagaggccgggactaccagaacgccatgcgggtgtggtccaacatccctggactgaaaagcaagcacgcacctctgacccctaaagaagaggagtacctgcaggcccaggtgcggagcagaagcaagctggacgcccctaaggtggatctgctggtgaagaattgcctcctgcccctgagagagtacttcaagtatttcagccagaatagtctgcccctgggaggcagcggcggcggcgcccaggccggcgtgagcttcgaggaggtggccgtgcacttcagccccggcgagtggagcctgctgcagcccgcccagagggccctgtacaaggaggtgatgctggagaacttcggccacgtggccagcctgggcccccccggcgccacccccgacctgatcgcctggctgcaggagggcctgttcctgctgggcggcgacgaggaggccggcagcgccggcgacgcctggaggagcgccaccggcggcccaagcagcggcgcccctcctcccagcggcggcagcccagccggctccccaacctctaccgaggagggcacctctgagtccgccacccccgagagcggccctggcacctccaccgagcccagcgagggcagcgcacccggcagccctgccggcagccccacctccacagaggagggaaccagcaccgagcccagcgaaggcagcgccccaggcaccagcaccgagcctagtgagcaggagattaaacggatcaacaagatcagaagaagacttgtgaaagacagcaacaccaagaaggccggcaagacaggccccatgaaaaccctgctggttagagtgatgacacccgatctgagagagcggctggaaaacctgagaaagaagcctgaaaatatcccccagcccatcagcaatacatctagagccaacctgaataagctgctgaccgattacaccgaaatgaagaaggcgatcctgcatgtgtactgggaagagttccagaaggaccctgtgggcctgatgagccgggtggcccagcctgccagcaagaagatcgatcagaacaagctgaaacctgagatggacgagaagggcaacctgaccaccgccggctttgcctgctctcagtgtggccagcccctgttcgtgtacaagctggagcaggtgtctgagaagggcaaggcttacaccaactacttcggacggtgcaatgtggccgagcacgaaaagctgatcctgctggcccagctgaagcccgagaaggatagcgacgaagccgtgacatatagcctgggaaagtttgggcagagggccctggatttctacagcattcatgtgaccaaggagtccacccaccccgtgaagcccctggcccagatcgccggaaacagatacgcctccggacctgtgggaaaggccctgagcgacgcatgtatgggcacaatcgcctccttcctgtctaagtaccaggacatcatcatcgaacaccagaaggtggtgaagggcaaccagaagagactggagagcctgcgggagctggccggcaaggaaaacctggaataccctagcgtgaccctgccacctcagcctcacaccaaggagggcgttgatgcctacaacgaagtgatcgcccgggtgcgaatgtgggtgaacctgaacctgtggcagaagctgaagctaagcagagatgatgccaagcctctgctgagactgaagggattcccttcctttcctctggtcgagagacaggccaacgaagtggactggtgggacatggtgtgtaacgtgaagaagctgatcaacgagaaaaaggaggatggcaaggtgttttggcagaatctggctggctacaagagacaggaagccctgagaccatacctgagcagcgaggaagatcggaagaagggaaagaaattcgctcggtaccagctgggcgacctgctgctgcacctggaaaagaagcacggcgaggactggggaaaggtgtacgacgaggcctgggagcggattgacaagaaagtggaaggcctgagcaagcacatcaagctggaagaggaacggagaagcgaggacgcccagagcaaggccgccctgaccgactggctgcgggctaaggccagcttcgtgatcgagggcctgaaggaggccgacaaggacgagttctgcagatgcgagctgaagctgcagaagtggtacggggacctgcggggaaagcccttcgccatcgaagccgagaacagcatcctggacatcagcggcttcagcaagcagtacaactgtgccttcatctggcagaaggacggcgtgaagaagctgaacctgtacctgatcatcaactacttcaagggcggcaagctgcggttcaagaagatcaaacctgaagccttcgaagccaacagattctacaccgtgatcaacaaaaagagcggcgagatcgtgcccatggaggtgaacttcaacttcgacgaccccaacctgatcatcctgcctctggcctttggcaagagacagggcagagaattcatctggaacgacctgctgtccctggaaaccggcagcctgaagctggccaacggaagagtgatcgagaagacactgtacaacagaagaacccggcaggatgagcctgccctgttcgtggccctgaccttcgagcggcgggaggtcctggactcctccaatatcaaaccaatgaacctgatcggcgtggcaagaggcgaaaacatccccgccgtgatcgccctgaccgaccccgagggctgcccactgagccggtttaaggatagcctgggaaacccaacccacatcctgagaatcggcgagagctataaggagaagcagcggaccatccaggccaagaaggaggtggagcagcggagagccggcggctacagccggaagtacgccagcaaagccaagaatctggcagacgatatggtgagaaacaccgctagagatctgctgtactacgccgtgacccaggatgccatgctgatcttcgccaacctgagccggggcttcggccggcagggcaagcggaccttcatggccgagagacagtacacacggatggaggactggctgaccgccaagctggcctacgagggcctgagcaagacctacctgtccaagacactggcccagtacacctccaagacatgcagcaactgtgggtttaccatcaccagcgccgactacgacagggtgctggagaagctgaagaagacagcaacaggctggatgaccacaattaacggcaaggagctgaaggtggagggccagattacctactacaacagatacaagagacagaacgtagtcaaggacctgtccgtcgagctggatagactgagcgaagaatctgtgaacaacgacatctcctcctggacaaagggcagaagcggagaagctctgagcctcctgaagaaaagattctcccatagacccgtgcaggagaagttcgtgtgcctgaactgcggcttcgagacacacgcagccgagcaagccgccctgaacatcgccagatcctggctgttcctgcggagccaggagtacaagaaataccagacaaacaagacaaccggcaacaccgataagagagccttcgtcgagacctggcagtccttttaccggaagaagcttaaggaggtgtggaaacctgccgtgcggtctggcggatctggcggaggctccaccagccccaagaaaaagagaaaagtctaagctgccttctgcggggcttgccttctggccatgcccttcttctctcccttgcacctgtacctcttggtctttgaataaagcctgagtaggaaggctagcaaaaaaaaaaaaaaaaaaaaaaaaaaaaaaaaaaaaaaaaaaaaaaaaaaaaaaaaaaaaaaaaaaaaaaaaaaaaaaaa

SEQ ID NO: 12693 - RNA, 5785 nt, synthetic construct
  source 1..5785: mol_type = other RNA
aggaaataagagagaaaagaagagtaagaagaaatataagagccaccatggcccctaagaagaagcgtaaagtgagccggatggaacgcctcgtctacgaggtgcggcagaagtgcagaaacatcgaggacatctgcatctcctgcggatctctgaacgtgaccctggagcacccactgttcatcggcggcatgtgccagaactgtaaaaactgttttctggagtgtgcctatcaatacgacgatgacggctaccagagctactgcaccatctgttgcggcggaagagaggtgctgatgtgtggaaataacaactgctgccggtgcttctgcgtggaatgcgtggacctgctggtgggccccggcgccgcccaggccgctattaaggaagatccttggaactgctacatgtgcggccacaagggcacatacggcctgctgagacggagagaggactggcctagcagactgcagatgttcttcgccaataaccacgaccaggagttcgacccccctaaggtgtaccctcccgtccccgccgagaagagaaagcccatccgggtcctgagcctgttcgatggcatcgccaccggtctgctggtgctgaaggacctgggcatccaggtggataggtacattgcctccgaggtgtgcgaggactccatcaccgtgggaatggtgcgtcatcagggcaagatcatgtacgtgggcgacgtgcggagcgtgacacagaagcatatccaggagtggggccctttcgacctggtgatcggcggcagcccttgcaatgacctgagcatcgtgaacccagcccggaagggcctgtacgagggaaccggcagactgttcttcgagttttacagactgctgcacgacgcccggcctaaggaaggcgacgaccggcccttcttttggctgttcgagaatgtggtggccatgggagtcagcgacaagcgggatattagccggttcctggagagcaaccccgtgatgatcgatgccaaggaagtgagcgccgcccaccgggccagatacttctggggcaatctgcctggcatgaacagacccctggccagcaccgtgaacgacaagctggagctgcaggagtgcctggagcacggccggatcgccaagttcagcaaggtgagaaccatcaccacccgaagcaacagcatcaaacaaggcaaggaccagcactttcctgtgttcatgaacgagaaggaggacatcctgtggtgtaccgagatggagagagtgttcgggttcccagtccactacacagatgtcagcaacatgtctagactggccagacagagactgctgggaagaagctggtccgtccctgtgatcagacacctgttcgcccctctgaaggagtacttcgcctgcgtgagcagcggcaacagcaacgccaacagccggggccccagcttctctagcggcctggtgccactgtccctgagagggagccacatgggccccatggagatctacaaaaccgtgagcgcctggaagcggcagcctgtgcgcgtgctgagcctgtttcggaatatcgataaagtcctgaaaagcctgggattcctggagagcggctctggctccggcggtggcaccctgaagtacgtggaggatgtgacaaacgtggtcagacgggatgtggagaagtggggccccttcgatctggtgtacggcagcacccaacccctgggcagctcttgtgaccggtgccctggctggtacatgtttcagttccaccggatcctgcagtacgccctgccgagacaggagtcccagcggccattcttttggattttcatggacaacttgctgctgaccgaggatgaccaggaaactaccactcggttcctgcagaccgaagccgtgaccctgcaggacgtgagaggccgggactaccagaacgccatgcgggtgtggtccaacatccctggactgaaaagcaagcacgcacctctgacccctaaagaagaggagtacctgcaggcccaggtgcggagcagaagcaagctggacgcccctaaggtggatctgctggtgaagaattgcctcctgcccctgagagagtacttcaagtatttcagccagaatagtctgcccctgggaggcagcggcggcggcagccagggcagcgtgagcttcaaggacgtgaccgtggacttcacccaggaggagtggcagcagctggaccccgcccagaaggccctgtacagggacgtgatgctggagaactactgccacttcatcgccgtgggcttccacatgaccaagcccgacatgatcaggaagctggagcagggcgaggagctgtggacccagaggatcttccccagctacagctacctggaggaggacggcaagaccggcggcccaagcagcggcgcccctcctcccagcggcggcagcccagccggctccccaacctctaccgaggagggcacctctgagtccgccacccccgagagcggccctggcacctccaccgagcccagcgagggcagcgcacccggcagccctgccggcagccccacctccacagaggagggaaccagcaccgagcccagcgaaggcagcgccccaggcaccagcaccgagcctagtgagcaggagattaaacggatcaacaagatcagaagaagacttgtgaaagacagcaacaccaagaaggccggcaagacaggccccatgaaaaccctgctggttagagtgatgacacccgatctgagagagcggctggaaaacctgagaaagaagcctgaaaatatcccccagcccatcagcaatacatctagagccaacctgaataagctgctgaccgattacaccgaaatgaagaaggcgatcctgcatgtgtactgggaagagttccagaaggaccctgtgggcctgatgagccgggtggcccagcctgccagcaagaagatcgatcagaacaagctgaaacctgagatggacgagaagggcaacctgaccaccgccggctttgcctgctctcagtgtggccagcccctgttcgtgtacaagctggagcaggtgtctgagaagggcaaggcttacaccaactacttcggacggtgcaatgtggccgagcacgaaaagctgatcctgctggcccagctgaagcccgagaaggatagcgacgaagccgtgacatatagcctgggaaagtttgggcagagggccctggatttctacagcattcatgtgaccaaggagtccacccaccccgtgaagcccctggcccagatcgccggaaacagatacgcctccggacctgtgggaaaggccctgagcgacgcatgtatgggcacaatcgcctccttcctgtctaagtaccaggacatcatcatcgaacaccagaaggtggtgaagggcaaccagaagagactggagagcctgcgggagctggccggcaaggaaaacctggaataccctagcgtgaccctgccacctcagcctcacaccaaggagggcgttgatgcctacaacgaagtgatcgcccgggtgcgaatgtgggtgaacctgaacctgtggcagaagctgaagctaagcagagatgatgccaagcctctgctgagactgaagggattcccttcctttcctctggtcgagagacaggccaacgaagtggactggtgggacatggtgtgtaacgtgaagaagctgatcaacgagaaaaaggaggatggcaaggtgttttggcagaatctggctggctacaagagacaggaagccctgagaccatacctgagcagcgaggaagatcggaagaagggaaagaaattcgctcggtaccagctgggcgacctgctgctgcacctggaaaagaagcacggcgaggactggggaaaggtgtacgacgaggcctgggagcggattgacaagaaagtggaaggcctgagcaagcacatcaagctggaagaggaacggagaagcgaggacgcccagagcaaggccgccctgaccgactggctgcgggctaaggccagcttcgtgatcgagggcctgaaggaggccgacaaggacgagttctgcagatgcgagctgaagctgcagaagtggtacggggacctgcggggaaagcccttcgccatcgaagccgagaacagcatcctggacatcagcggcttcagcaagcagtacaactgtgccttcatctggcagaaggacggcgtgaagaagctgaacctgtacctgatcatcaactacttcaagggcggcaagctgcggttcaagaagatcaaacctgaagccttcgaagccaacagattctacaccgtgatcaacaaaaagagcggcgagatcgtgcccatggaggtgaacttcaacttcgacgaccccaacctgatcatcctgcctctggcctttggcaagagacagggcagagaattcatctggaacgacctgctgtccctggaaaccggcagcctgaagctggccaacggaagagtgatcgagaagacactgtacaacagaagaacccggcaggatgagcctgccctgttcgtggccctgaccttcgagcggcgggaggtcctggactcctccaatatcaaaccaatgaacctgatcggcgtggcaagaggcgaaaacatccccgccgtgatcgccctgaccgaccccgagggctgcccactgagccggtttaaggatagcctgggaaacccaacccacatcctgagaatcggcgagagctataaggagaagcagcggaccatccaggccaagaaggaggtggagcagcggagagccggcggctacagccggaagtacgccagcaaagccaagaatctggcagacgatatggtgagaaacaccgctagagatctgctgtactacgccgtgacccaggatgccatgctgatcttcgccaacctgagccggggcttcggccggcagggcaagcggaccttcatggccgagagacagtacacacggatggaggactggctgaccgccaagctggcctacgagggcctgagcaagacctacctgtccaagacactggcccagtacacctccaagacatgcagcaactgtgggtttaccatcaccagcgccgactacgacagggtgctggagaagctgaagaagacagcaacaggctggatgaccacaattaacggcaaggagctgaaggtggagggccagattacctactacaacagatacaagagacagaacgtagtcaaggacctgtccgtcgagctggatagactgagcgaagaatctgtgaacaacgacatctcctcctggacaaagggcagaagcggagaagctctgagcctcctgaagaaaagattctcccatagacccgtgcaggagaagttcgtgtgcctgaactgcggcttcgagacacacgcagccgagcaagccgccctgaacatcgccagatcctggctgttcctgcggagccaggagtacaagaaataccagacaaacaagacaaccggcaacaccgataagagagccttcgtcgagacctggcagtccttttaccggaagaagcttaaggaggtgtggaaacctgccgtgcggtctggcggatctggcggaggctccaccagccccaagaaaaagagaaaagtctaagctgccttctgcggggcttgccttctggccatgcccttcttctctcccttgcacctgtacctcttggtctttgaataaagcctgagtaggaaggctagcaaaaaaaaaaaaaaaaaaaaaaaaaaaaaaaaaaaaaaaaaaaaaaaaaaaaaaaaaaaaaaaaaaaaaaaaaaaaaaaa

SEQ ID NO: 12694 - RNA, 5785 nt, synthetic construct
  source 1..5785: mol_type = other RNA
aggaaataagagagaaaagaagagtaagaagaaatataagagccaccatggcccctaagaagaagcgtaaagtgagccggatggaacgcctcgtctacgaggtgcggcagaagtgcagaaacatcgaggacatctgcatctcctgcggatctctgaacgtgaccctggagcacccactgttcatcggcggcatgtgccagaactgtaaaaactgttttctggagtgtgcctatcaatacgacgatgacggctaccagagctactgcaccatctgttgcggcggaagagaggtgctgatgtgtggaaataacaactgctgccggtgcttctgcgtggaatgcgtggacctgctggtgggccccggcgccgcccaggccgctattaaggaagatccttggaactgctacatgtgcggccacaagggcacatacggcctgctgagacggagagaggactggcctagcagactgcagatgttcttcgccaataaccacgaccaggagttcgacccccctaaggtgtaccctcccgtccccgccgagaagagaaagcccatccgggtcctgagcctgttcgatggcatcgccaccggtctgctggtgctgaaggacctgggcatccaggtggataggtacattgcctccgaggtgtgcgaggactccatcaccgtgggaatggtgcgtcatcagggcaagatcatgtacgtgggcgacgtgcggagcgtgacacagaagcatatccaggagtggggccctttcgacctggtgatcggcggcagcccttgcaatgacctgagcatcgtgaacccagcccggaagggcctgtacgagggaaccggcagactgttcttcgagttttacagactgctgcacgacgcccggcctaaggaaggcgacgaccggcccttcttttggctgttcgagaatgtggtggccatgggagtcagcgacaagcgggatattagccggttcctggagagcaaccccgtgatgatcgatgccaaggaagtgagcgccgcccaccgggccagatacttctggggcaatctgcctggcatgaacagacccctggccagcaccgtgaacgacaagctggagctgcaggagtgcctggagcacggccggatcgccaagttcagcaaggtgagaaccatcaccacccgaagcaacagcatcaaacaaggcaaggaccagcactttcctgtgttcatgaacgagaaggaggacatcctgtggtgtaccgagatggagagagtgttcgggttcccagtccactacacagatgtcagcaacatgtctagactggccagacagagactgctgggaagaagctggtccgtccctgtgatcagacacctgttcgcccctctgaaggagtacttcgcctgcgtgagcagcggcaacagcaacgccaacagccggggccccagcttctctagcggcctggtgccactgtccctgagagggagccacatgggccccatggagatctacaaaaccgtgagcgcctggaagcggcagcctgtgcgcgtgctgagcctgtttcggaatatcgataaagtcctgaaaagcctgggattcctggagagcggctctggctccggcggtggcaccctgaagtacgtggaggatgtgacaaacgtggtcagacgggatgtggagaagtggggccccttcgatctggtgtacggcagcacccaacccctgggcagctcttgtgaccggtgccctggctggtacatgtttcagttccaccggatcctgcagtacgccctgccgagacaggagtcccagcggccattcttttggattttcatggacaacttgctgctgaccgaggatgaccaggaaactaccactcggttcctgcagaccgaagccgtgaccctgcaggacgtgagaggccgggactaccagaacgccatgcgggtgtggtccaacatccctggactgaaaagcaagcacgcacctctgacccctaaagaagaggagtacctgcaggcccaggtgcggagcagaagcaagctggacgcccctaaggtggatctgctggtgaagaattgcctcctgcccctgagagagtacttcaagtatttcagccagaatagtctgcccctgggaggcagcggcggcggcaagcccgccgccgtgagcttcgccgacgtggccgtgtacttcagccccgaggagtggggctgcctgaggcccgcccagagggccctgtacagggaggtgatgagggagacctacggcctgctgggcgccctgggcggcggcggcaccaagcccgccctgatctgctgggtggagagggacgccgagctgtggggccccgacgcccaggaccccgccgccgccgccgccaggggctacggcaccggcggcccaagcagcggcgcccctcctcccagcggcggcagcccagccggctccccaacctctaccgaggagggcacctctgagtccgccacccccgagagcggccctggcacctccaccgagcccagcgagggcagcgcacccggcagccctgccggcagccccacctccacagaggagggaaccagcaccgagcccagcgaaggcagcgccccaggcaccagcaccgagcctagtgagcaggagattaaacggatcaacaagatcagaagaagacttgtgaaagacagcaacaccaagaaggccggcaagacaggccccatgaaaaccctgctggttagagtgatgacacccgatctgagagagcggctggaaaacctgagaaagaagcctgaaaatatcccccagcccatcagcaatacatctagagccaacctgaataagctgctgaccgattacaccgaaatgaagaaggcgatcctgcatgtgtactgggaagagttccagaaggaccctgtgggcctgatgagccgggtggcccagcctgccagcaagaagatcgatcagaacaagctgaaacctgagatggacgagaagggcaacctgaccaccgccggctttgcctgctctcagtgtggccagcccctgttcgtgtacaagctggagcaggtgtctgagaagggcaaggcttacaccaactacttcggacggtgcaatgtggccgagcacgaaaagctgatcctgctggcccagctgaagcccgagaaggatagcgacgaagccgtgacatatagcctgggaaagtttgggcagagggccctggatttctacagcattcatgtgaccaaggagtccacccaccccgtgaagcccctggcccagatcgccggaaacagatacgcctccggacctgtgggaaaggccctgagcgacgcatgtatgggcacaatcgcctccttcctgtctaagtaccaggacatcatcatcgaacaccagaaggtggtgaagggcaaccagaagagactggagagcctgcgggagctggccggcaaggaaaacctggaataccctagcgtgaccctgccacctcagcctcacaccaaggagggcgttgatgcctacaacgaagtgatcgcccgggtgcgaatgtgggtgaacctgaacctgtggcagaagctgaagctaagcagagatgatgccaagcctctgctgagactgaagggattcccttcctttcctctggtcgagagacaggccaacgaagtggactggtgggacatggtgtgtaacgtgaagaagctgatcaacgagaaaaaggaggatggcaaggtgttttggcagaatctggctggctacaagagacaggaagccctgagaccatacctgagcagcgaggaagatcggaagaagggaaagaaattcgctcggtaccagctgggcgacctgctgctgcacctggaaaagaagcacggcgaggactggggaaaggtgtacgacgaggcctgggagcggattgacaagaaagtggaaggcctgagcaagcacatcaagctggaagaggaacggagaagcgaggacgcccagagcaaggccgccctgaccgactggctgcgggctaaggccagcttcgtgatcgagggcctgaaggaggccgacaaggacgagttctgcagatgcgagctgaagctgcagaagtggtacggggacctgcggggaaagcccttcgccatcgaagccgagaacagcatcctggacatcagcggcttcagcaagcagtacaactgtgccttcatctggcagaaggacggcgtgaagaagctgaacctgtacctgatcatcaactacttcaagggcggcaagctgcggttcaagaagatcaaacctgaagccttcgaagccaacagattctacaccgtgatcaacaaaaagagcggcgagatcgtgcccatggaggtgaacttcaacttcgacgaccccaacctgatcatcctgcctctggcctttggcaagagacagggcagagaattcatctggaacgacctgctgtccctggaaaccggcagcctgaagctggccaacggaagagtgatcgagaagacactgtacaacagaagaacccggcaggatgagcctgccctgttcgtggccctgaccttcgagcggcgggaggtcctggactcctccaatatcaaaccaatgaacctgatcggcgtggcaagaggcgaaaacatccccgccgtgatcgccctgaccgaccccgagggctgcccactgagccggtttaaggatagcctgggaaacccaacccacatcctgagaatcggcgagagctataaggagaagcagcggaccatccaggccaagaaggaggtggagcagcggagagccggcggctacagccggaagtacgccagcaaagccaagaatctggcagacgatatggtgagaaacaccgctagagatctgctgtactacgccgtgacccaggatgccatgctgatcttcgccaacctgagccggggcttcggccggcagggcaagcggaccttcatggccgagagacagtacacacggatggaggactggctgaccgccaagctggcctacgagggcctgagcaagacctacctgtccaagacactggcccagtacacctccaagacatgcagcaactgtgggtttaccatcaccagcgccgactacgacagggtgctggagaagctgaagaagacagcaacaggctggatgaccacaattaacggcaaggagctgaaggtggagggccagattacctactacaacagatacaagagacagaacgtagtcaaggacctgtccgtcgagctggatagactgagcgaagaatctgtgaacaacgacatctcctcctggacaaagggcagaagcggagaagctctgagcctcctgaagaaaagattctcccatagacccgtgcaggagaagttcgtgtgcctgaactgcggcttcgagacacacgcagccgagcaagccgccctgaacatcgccagatcctggctgttcctgcggagccaggagtacaagaaataccagacaaacaagacaaccggcaacaccgataagagagccttcgtcgagacctggcagtccttttaccggaagaagcttaaggaggtgtggaaacctgccgtgcggtctggcggatctggcggaggctccaccagccccaagaaaaagagaaaagtctaagctgccttctgcggggcttgccttctggccatgcccttcttctctcccttgcacctgtacctcttggtctttgaataaagcctgagtaggaaggctagcaaaaaaaaaaaaaaaaaaaaaaaaaaaaaaaaaaaaaaaaaaaaaaaaaaaaaaaaaaaaaaaaaaaaaaaaaaaaaaaa

SEQ ID NO: 12695 - RNA, 5785 nt, synthetic construct
  source 1..5785: mol_type = other RNA
aggaaataagagagaaaagaagagtaagaagaaatataagagccaccatggcccctaagaagaagcgtaaagtgagccggatggaacgcctcgtctacgaggtgcggcagaagtgcagaaacatcgaggacatctgcatctcctgcggatctctgaacgtgaccctggagcacccactgttcatcggcggcatgtgccagaactgtaaaaactgttttctggagtgtgcctatcaatacgacgatgacggctaccagagctactgcaccatctgttgcggcggaagagaggtgctgatgtgtggaaataacaactgctgccggtgcttctgcgtggaatgcgtggacctgctggtgggccccggcgccgcccaggccgctattaaggaagatccttggaactgctacatgtgcggccacaagggcacatacggcctgctgagacggagagaggactggcctagcagactgcagatgttcttcgccaataaccacgaccaggagttcgacccccctaaggtgtaccctcccgtccccgccgagaagagaaagcccatccgggtcctgagcctgttcgatggcatcgccaccggtctgctggtgctgaaggacctgggcatccaggtggataggtacattgcctccgaggtgtgcgaggactccatcaccgtgggaatggtgcgtcatcagggcaagatcatgtacgtgggcgacgtgcggagcgtgacacagaagcatatccaggagtggggccctttcgacctggtgatcggcggcagcccttgcaatgacctgagcatcgtgaacccagcccggaagggcctgtacgagggaaccggcagactgttcttcgagttttacagactgctgcacgacgcccggcctaaggaaggcgacgaccggcccttcttttggctgttcgagaatgtggtggccatgggagtcagcgacaagcgggatattagccggttcctggagagcaaccccgtgatgatcgatgccaaggaagtgagcgccgcccaccgggccagatacttctggggcaatctgcctggcatgaacagacccctggccagcaccgtgaacgacaagctggagctgcaggagtgcctggagcacggccggatcgccaagttcagcaaggtgagaaccatcaccacccgaagcaacagcatcaaacaaggcaaggaccagcactttcctgtgttcatgaacgagaaggaggacatcctgtggtgtaccgagatggagagagtgttcgggttcccagtccactacacagatgtcagcaacatgtctagactggccagacagagactgctgggaagaagctggtccgtccctgtgatcagacacctgttcgcccctctgaaggagtacttcgcctgcgtgagcagcggcaacagcaacgccaacagccggggccccagcttctctagcggcctggtgccactgtccctgagagggagccacatgggccccatggagatctacaaaaccgtgagcgcctggaagcggcagcctgtgcgcgtgctgagcctgtttcggaatatcgataaagtcctgaaaagcctgggattcctggagagcggctctggctccggcggtggcaccctgaagtacgtggaggatgtgacaaacgtggtcagacgggatgtggagaagtggggccccttcgatctggtgtacggcagcacccaacccctgggcagctcttgtgaccggtgccctggctggtacatgtttcagttccaccggatcctgcagtacgccctgccgagacaggagtcccagcggccattcttttggattttcatggacaacttgctgctgaccgaggatgaccaggaaactaccactcggttcctgcagaccgaagccgtgaccctgcaggacgtgagaggccgggactaccagaacgccatgcgggtgtggtccaacatccctggactgaaaagcaagcacgcacctctgacccctaaagaagaggagtacctgcaggcccaggtgcggagcagaagcaagctggacgcccctaaggtggatctgctggtgaagaattgcctcctgcccctgagagagtacttcaagtatttcagccagaatagtctgcccctgggaggcagcggcggcggcctgctgaccttcgaggacgtggccgtgagcttcagcgaggaggagtggaggctgctggaccccgcccagaagagcctgtacaacgacgtgatgcaggagaactacgagaccatcgtgagcctgggcctgaagctgaagaacgacaccggcaacgaccagcccatcagcctgagcgccctggagatccaggccagcggctgcagggtgctgaggaaggccaggatgaaggtggcccagaagaccggcggcccaagcagcggcgcccctcctcccagcggcggcagcccagccggctccccaacctctaccgaggagggcacctctgagtccgccacccccgagagcggccctggcacctccaccgagcccagcgagggcagcgcacccggcagccctgccggcagccccacctccacagaggagggaaccagcaccgagcccagcgaaggcagcgccccaggcaccagcaccgagcctagtgagcaggagattaaacggatcaacaagatcagaagaagacttgtgaaagacagcaacaccaagaaggccggcaagacaggccccatgaaaaccctgctggttagagtgatgacacccgatctgagagagcggctggaaaacctgagaaagaagcctgaaaatatcccccagcccatcagcaatacatctagagccaacctgaataagctgctgaccgattacaccgaaatgaagaaggcgatcctgcatgtgtactgggaagagttccagaaggaccctgtgggcctgatgagccgggtggcccagcctgccagcaagaagatcgatcagaacaagctgaaacctgagatggacgagaagggcaacctgaccaccgccggctttgcctgctctcagtgtggccagcccctgttcgtgtacaagctggagcaggtgtctgagaagggcaaggcttacaccaactacttcggacggtgcaatgtggccgagcacgaaaagctgatcctgctggcccagctgaagcccgagaaggatagcgacgaagccgtgacatatagcctgggaaagtttgggcagagggccctggatttctacagcattcatgtgaccaaggagtccacccaccccgtgaagcccctggcccagatcgccggaaacagatacgcctccggacctgtgggaaaggccctgagcgacgcatgtatgggcacaatcgcctccttcctgtctaagtaccaggacatcatcatcgaacaccagaaggtggtgaagggcaaccagaagagactggagagcctgcgggagctggccggcaaggaaaacctggaataccctagcgtgaccctgccacctcagcctcacaccaaggagggcgttgatgcctacaacgaagtgatcgcccgggtgcgaatgtgggtgaacctgaacctgtggcagaagctgaagctaagcagagatgatgccaagcctctgctgagactgaagggattcccttcctttcctctggtcgagagacaggccaacgaagtggactggtgggacatggtgtgtaacgtgaagaagctgatcaacgagaaaaaggaggatggcaaggtgttttggcagaatctggctggctacaagagacaggaagccctgagaccatacctgagcagcgaggaagatcggaagaagggaaagaaattcgctcggtaccagctgggcgacctgctgctgcacctggaaaagaagcacggcgaggactggggaaaggtgtacgacgaggcctgggagcggattgacaagaaagtggaaggcctgagcaagcacatcaagctggaagaggaacggagaagcgaggacgcccagagcaaggccgccctgaccgactggctgcgggctaaggccagcttcgtgatcgagggcctgaaggaggccgacaaggacgagttctgcagatgcgagctgaagctgcagaagtggtacggggacctgcggggaaagcccttcgccatcgaagccgagaacagcatcctggacatcagcggcttcagcaagcagtacaactgtgccttcatctggcagaaggacggcgtgaagaagctgaacctgtacctgatcatcaactacttcaagggcggcaagctgcggttcaagaagatcaaacctgaagccttcgaagccaacagattctacaccgtgatcaacaaaaagagcggcgagatcgtgcccatggaggtgaacttcaacttcgacgaccccaacctgatcatcctgcctctggcctttggcaagagacagggcagagaattcatctggaacgacctgctgtccctggaaaccggcagcctgaagctggccaacggaagagtgatcgagaagacactgtacaacagaagaacccggcaggatgagcctgccctgttcgtggccctgaccttcgagcggcgggaggtcctggactcctccaatatcaaaccaatgaacctgatcggcgtggcaagaggcgaaaacatccccgccgtgatcgccctgaccgaccccgagggctgcccactgagccggtttaaggatagcctgggaaacccaacccacatcctgagaatcggcgagagctataaggagaagcagcggaccatccaggccaagaaggaggtggagcagcggagagccggcggctacagccggaagtacgccagcaaagccaagaatctggcagacgatatggtgagaaacaccgctagagatctgctgtactacgccgtgacccaggatgccatgctgatcttcgccaacctgagccggggcttcggccggcagggcaagcggaccttcatggccgagagacagtacacacggatggaggactggctgaccgccaagctggcctacgagggcctgagcaagacctacctgtccaagacactggcccagtacacctccaagacatgcagcaactgtgggtttaccatcaccagcgccgactacgacagggtgctggagaagctgaagaagacagcaacaggctggatgaccacaattaacggcaaggagctgaaggtggagggccagattacctactacaacagatacaagagacagaacgtagtcaaggacctgtccgtcgagctggatagactgagcgaagaatctgtgaacaacgacatctcctcctggacaaagggcagaagcggagaagctctgagcctcctgaagaaaagattctcccatagacccgtgcaggagaagttcgtgtgcctgaactgcggcttcgagacacacgcagccgagcaagccgccctgaacatcgccagatcctggctgttcctgcggagccaggagtacaagaaataccagacaaacaagacaaccggcaacaccgataagagagccttcgtcgagacctggcagtccttttaccggaagaagcttaaggaggtgtggaaacctgccgtgcggtctggcggatctggcggaggctccaccagccccaagaaaaagagaaaagtctaagctgccttctgcggggcttgccttctggccatgcccttcttctctcccttgcacctgtacctcttggtctttgaataaagcctgagtaggaaggctagcaaaaaaaaaaaaaaaaaaaaaaaaaaaaaaaaaaaaaaaaaaaaaaaaaaaaaaaaaaaaaaaaaaaaaaaaaaaaaaaa

SEQ ID NO: 12696 - RNA, 5785 nt, synthetic construct
  source 1..5785: mol_type = other RNA
aggaaataagagagaaaagaagagtaagaagaaatataagagccaccatggcccctaagaagaagcgtaaagtgagccggatggaacgcctcgtctacgaggtgcggcagaagtgcagaaacatcgaggacatctgcatctcctgcggatctctgaacgtgaccctggagcacccactgttcatcggcggcatgtgccagaactgtaaaaactgttttctggagtgtgcctatcaatacgacgatgacggctaccagagctactgcaccatctgttgcggcggaagagaggtgctgatgtgtggaaataacaactgctgccggtgcttctgcgtggaatgcgtggacctgctggtgggccccggcgccgcccaggccgctattaaggaagatccttggaactgctacatgtgcggccacaagggcacatacggcctgctgagacggagagaggactggcctagcagactgcagatgttcttcgccaataaccacgaccaggagttcgacccccctaaggtgtaccctcccgtccccgccgagaagagaaagcccatccgggtcctgagcctgttcgatggcatcgccaccggtctgctggtgctgaaggacctgggcatccaggtggataggtacattgcctccgaggtgtgcgaggactccatcaccgtgggaatggtgcgtcatcagggcaagatcatgtacgtgggcgacgtgcggagcgtgacacagaagcatatccaggagtggggccctttcgacctggtgatcggcggcagcccttgcaatgacctgagcatcgtgaacccagcccggaagggcctgtacgagggaaccggcagactgttcttcgagttttacagactgctgcacgacgcccggcctaaggaaggcgacgaccggcccttcttttggctgttcgagaatgtggtggccatgggagtcagcgacaagcgggatattagccggttcctggagagcaaccccgtgatgatcgatgccaaggaagtgagcgccgcccaccgggccagatacttctggggcaatctgcctggcatgaacagacccctggccagcaccgtgaacgacaagctggagctgcaggagtgcctggagcacggccggatcgccaagttcagcaaggtgagaaccatcaccacccgaagcaacagcatcaaacaaggcaaggaccagcactttcctgtgttcatgaacgagaaggaggacatcctgtggtgtaccgagatggagagagtgttcgggttcccagtccactacacagatgtcagcaacatgtctagactggccagacagagactgctgggaagaagctggtccgtccctgtgatcagacacctgttcgcccctctgaaggagtacttcgcctgcgtgagcagcggcaacagcaacgccaacagccggggccccagcttctctagcggcctggtgccactgtccctgagagggagccacatgggccccatggagatctacaaaaccgtgagcgcctggaagcggcagcctgtgcgcgtgctgagcctgtttcggaatatcgataaagtcctgaaaagcctgggattcctggagagcggctctggctccggcggtggcaccctgaagtacgtggaggatgtgacaaacgtggtcagacgggatgtggagaagtggggccccttcgatctggtgtacggcagcacccaacccctgggcagctcttgtgaccggtgccctggctggtacatgtttcagttccaccggatcctgcagtacgccctgccgagacaggagtcccagcggccattcttttggattttcatggacaacttgctgctgaccgaggatgaccaggaaactaccactcggttcctgcagaccgaagccgtgaccctgcaggacgtgagaggccgggactaccagaacgccatgcgggtgtggtccaacatccctggactgaaaagcaagcacgcacctctgacccctaaagaagaggagtacctgcaggcccaggtgcggagcagaagcaagctggacgcccctaaggtggatctgctggtgaagaattgcctcctgcccctgagagagtacttcaagtatttcagccagaatagtctgcccctgggaggcagcggcggcggcagccacaccctggtgaccttcaaggacatcctggtgaacttcaccagggaggagtggaagctgctggacaccgcccagcagatcatgtacaaggacgtgatgctggagaactacaggaacctggtgagcctgggccaccagctgcccaagcccgacgtgatcctgaggctggagaagggcgaggagccctggctggtggagaaggagatccaccaggagacccaccccgacctggagacccccggcggcccaagcagcggcgcccctcctcccagcggcggcagcccagccggctccccaacctctaccgaggagggcacctctgagtccgccacccccgagagcggccctggcacctccaccgagcccagcgagggcagcgcacccggcagccctgccggcagccccacctccacagaggagggaaccagcaccgagcccagcgaaggcagcgccccaggcaccagcaccgagcctagtgagcaggagattaaacggatcaacaagatcagaagaagacttgtgaaagacagcaacaccaagaaggccggcaagacaggccccatgaaaaccctgctggttagagtgatgacacccgatctgagagagcggctggaaaacctgagaaagaagcctgaaaatatcccccagcccatcagcaatacatctagagccaacctgaataagctgctgaccgattacaccgaaatgaagaaggcgatcctgcatgtgtactgggaagagttccagaaggaccctgtgggcctgatgagccgggtggcccagcctgccagcaagaagatcgatcagaacaagctgaaacctgagatggacgagaagggcaacctgaccaccgccggctttgcctgctctcagtgtggccagcccctgttcgtgtacaagctggagcaggtgtctgagaagggcaaggcttacaccaactacttcggacggtgcaatgtggccgagcacgaaaagctgatcctgctggcccagctgaagcccgagaaggatagcgacgaagccgtgacatatagcctgggaaagtttgggcagagggccctggatttctacagcattcatgtgaccaaggagtccacccaccccgtgaagcccctggcccagatcgccggaaacagatacgcctccggacctgtgggaaaggccctgagcgacgcatgtatgggcacaatcgcctccttcctgtctaagtaccaggacatcatcatcgaacaccagaaggtggtgaagggcaaccagaagagactggagagcctgcgggagctggccggcaaggaaaacctggaataccctagcgtgaccctgccacctcagcctcacaccaaggagggcgttgatgcctacaacgaagtgatcgcccgggtgcgaatgtgggtgaacctgaacctgtggcagaagctgaagctaagcagagatgatgccaagcctctgctgagactgaagggattcccttcctttcctctggtcgagagacaggccaacgaagtggactggtgggacatggtgtgtaacgtgaagaagctgatcaacgagaaaaaggaggatggcaaggtgttttggcagaatctggctggctacaagagacaggaagccctgagaccatacctgagcagcgaggaagatcggaagaagggaaagaaattcgctcggtaccagctgggcgacctgctgctgcacctggaaaagaagcacggcgaggactggggaaaggtgtacgacgaggcctgggagcggattgacaagaaagtggaaggcctgagcaagcacatcaagctggaagaggaacggagaagcgaggacgcccagagcaaggccgccctgaccgactggctgcgggctaaggccagcttcgtgatcgagggcctgaaggaggccgacaaggacgagttctgcagatgcgagctgaagctgcagaagtggtacggggacctgcggggaaagcccttcgccatcgaagccgagaacagcatcctggacatcagcggcttcagcaagcagtacaactgtgccttcatctggcagaaggacggcgtgaagaagctgaacctgtacctgatcatcaactacttcaagggcggcaagctgcggttcaagaagatcaaacctgaagccttcgaagccaacagattctacaccgtgatcaacaaaaagagcggcgagatcgtgcccatggaggtgaacttcaacttcgacgaccccaacctgatcatcctgcctctggcctttggcaagagacagggcagagaattcatctggaacgacctgctgtccctggaaaccggcagcctgaagctggccaacggaagagtgatcgagaagacactgtacaacagaagaacccggcaggatgagcctgccctgttcgtggccctgaccttcgagcggcgggaggtcctggactcctccaatatcaaaccaatgaacctgatcggcgtggcaagaggcgaaaacatccccgccgtgatcgccctgaccgaccccgagggctgcccactgagccggtttaaggatagcctgggaaacccaacccacatcctgagaatcggcgagagctataaggagaagcagcggaccatccaggccaagaaggaggtggagcagcggagagccggcggctacagccggaagtacgccagcaaagccaagaatctggcagacgatatggtgagaaacaccgctagagatctgctgtactacgccgtgacccaggatgccatgctgatcttcgccaacctgagccggggcttcggccggcagggcaagcggaccttcatggccgagagacagtacacacggatggaggactggctgaccgccaagctggcctacgagggcctgagcaagacctacctgtccaagacactggcccagtacacctccaagacatgcagcaactgtgggtttaccatcaccagcgccgactacgacagggtgctggagaagctgaagaagacagcaacaggctggatgaccacaattaacggcaaggagctgaaggtggagggccagattacctactacaacagatacaagagacagaacgtagtcaaggacctgtccgtcgagctggatagactgagcgaagaatctgtgaacaacgacatctcctcctggacaaagggcagaagcggagaagctctgagcctcctgaagaaaagattctcccatagacccgtgcaggagaagttcgtgtgcctgaactgcggcttcgagacacacgcagccgagcaagccgccctgaacatcgccagatcctggctgttcctgcggagccaggagtacaagaaataccagacaaacaagacaaccggcaacaccgataagagagccttcgtcgagacctggcagtccttttaccggaagaagcttaaggaggtgtggaaacctgccgtgcggtctggcggatctggcggaggctccaccagccccaagaaaaagagaaaagtctaagctgccttctgcggggcttgccttctggccatgcccttcttctctcccttgcacctgtacctcttggtctttgaataaagcctgagtaggaaggctagcaaaaaaaaaaaaaaaaaaaaaaaaaaaaaaaaaaaaaaaaaaaaaaaaaaaaaaaaaaaaaaaaaaaaaaaaaaaaaaaa

SEQ ID NO: 12697 - RNA, 5785 nt, synthetic construct
  source 1..5785: mol_type = other RNA
aggaaataagagagaaaagaagagtaagaagaaatataagagccaccatggcccctaagaagaagcgtaaagtgagccggatggaacgcctcgtctacgaggtgcggcagaagtgcagaaacatcgaggacatctgcatctcctgcggatctctgaacgtgaccctggagcacccactgttcatcggcggcatgtgccagaactgtaaaaactgttttctggagtgtgcctatcaatacgacgatgacggctaccagagctactgcaccatctgttgcggcggaagagaggtgctgatgtgtggaaataacaactgctgccggtgcttctgcgtggaatgcgtggacctgctggtgggccccggcgccgcccaggccgctattaaggaagatccttggaactgctacatgtgcggccacaagggcacatacggcctgctgagacggagagaggactggcctagcagactgcagatgttcttcgccaataaccacgaccaggagttcgacccccctaaggtgtaccctcccgtccccgccgagaagagaaagcccatccgggtcctgagcctgttcgatggcatcgccaccggtctgctggtgctgaaggacctgggcatccaggtggataggtacattgcctccgaggtgtgcgaggactccatcaccgtgggaatggtgcgtcatcagggcaagatcatgtacgtgggcgacgtgcggagcgtgacacagaagcatatccaggagtggggccctttcgacctggtgatcggcggcagcccttgcaatgacctgagcatcgtgaacccagcccggaagggcctgtacgagggaaccggcagactgttcttcgagttttacagactgctgcacgacgcccggcctaaggaaggcgacgaccggcccttcttttggctgttcgagaatgtggtggccatgggagtcagcgacaagcgggatattagccggttcctggagagcaaccccgtgatgatcgatgccaaggaagtgagcgccgcccaccgggccagatacttctggggcaatctgcctggcatgaacagacccctggccagcaccgtgaacgacaagctggagctgcaggagtgcctggagcacggccggatcgccaagttcagcaaggtgagaaccatcaccacccgaagcaacagcatcaaacaaggcaaggaccagcactttcctgtgttcatgaacgagaaggaggacatcctgtggtgtaccgagatggagagagtgttcgggttcccagtccactacacagatgtcagcaacatgtctagactggccagacagagactgctgggaagaagctggtccgtccctgtgatcagacacctgttcgcccctctgaaggagtacttcgcctgcgtgagcagcggcaacagcaacgccaacagccggggccccagcttctctagcggcctggtgccactgtccctgagagggagccacatgggccccatggagatctacaaaaccgtgagcgcctggaagcggcagcctgtgcgcgtgctgagcctgtttcggaatatcgataaagtcctgaaaagcctgggattcctggagagcggctctggctccggcggtggcaccctgaagtacgtggaggatgtgacaaacgtggtcagacgggatgtggagaagtggggccccttcgatctggtgtacggcagcacccaacccctgggcagctcttgtgaccggtgccctggctggtacatgtttcagttccaccggatcctgcagtacgccctgccgagacaggagtcccagcggccattcttttggattttcatggacaacttgctgctgaccgaggatgaccaggaaactaccactcggttcctgcagaccgaagccgtgaccctgcaggacgtgagaggccgggactaccagaacgccatgcgggtgtggtccaacatccctggactgaaaagcaagcacgcacctctgacccctaaagaagaggagtacctgcaggcccaggtgcggagcagaagcaagctggacgcccctaaggtggatctgctggtgaagaattgcctcctgcccctgagagagtacttcaagtatttcagccagaatagtctgcccctgggaggcagcggcggcggcatgaacatggagggcctggtgatgttccaggacctgagcatcgacttcagccaggaggagtgggagtgcctgaaccccgcccagaaggacctgtacagggacgtgatgatggagaactacagcagcctgctgagcctgggcctgagcatccccaagcccgacgtgatcagcctgctggagcagggcaaggagccctggatggtgagcagggacatcctgggcggctggtgccccgacaggctgggcggcccaagcagcggcgcccctcctcccagcggcggcagcccagccggctccccaacctctaccgaggagggcacctctgagtccgccacccccgagagcggccctggcacctccaccgagcccagcgagggcagcgcacccggcagccctgccggcagccccacctccacagaggagggaaccagcaccgagcccagcgaaggcagcgccccaggcaccagcaccgagcctagtgagcaggagattaaacggatcaacaagatcagaagaagacttgtgaaagacagcaacaccaagaaggccggcaagacaggccccatgaaaaccctgctggttagagtgatgacacccgatctgagagagcggctggaaaacctgagaaagaagcctgaaaatatcccccagcccatcagcaatacatctagagccaacctgaataagctgctgaccgattacaccgaaatgaagaaggcgatcctgcatgtgtactgggaagagttccagaaggaccctgtgggcctgatgagccgggtggcccagcctgccagcaagaagatcgatcagaacaagctgaaacctgagatggacgagaagggcaacctgaccaccgccggctttgcctgctctcagtgtggccagcccctgttcgtgtacaagctggagcaggtgtctgagaagggcaaggcttacaccaactacttcggacggtgcaatgtggccgagcacgaaaagctgatcctgctggcccagctgaagcccgagaaggatagcgacgaagccgtgacatatagcctgggaaagtttgggcagagggccctggatttctacagcattcatgtgaccaaggagtccacccaccccgtgaagcccctggcccagatcgccggaaacagatacgcctccggacctgtgggaaaggccctgagcgacgcatgtatgggcacaatcgcctccttcctgtctaagtaccaggacatcatcatcgaacaccagaaggtggtgaagggcaaccagaagagactggagagcctgcgggagctggccggcaaggaaaacctggaataccctagcgtgaccctgccacctcagcctcacaccaaggagggcgttgatgcctacaacgaagtgatcgcccgggtgcgaatgtgggtgaacctgaacctgtggcagaagctgaagctaagcagagatgatgccaagcctctgctgagactgaagggattcccttcctttcctctggtcgagagacaggccaacgaagtggactggtgggacatggtgtgtaacgtgaagaagctgatcaacgagaaaaaggaggatggcaaggtgttttggcagaatctggctggctacaagagacaggaagccctgagaccatacctgagcagcgaggaagatcggaagaagggaaagaaattcgctcggtaccagctgggcgacctgctgctgcacctggaaaagaagcacggcgaggactggggaaaggtgtacgacgaggcctgggagcggattgacaagaaagtggaaggcctgagcaagcacatcaagctggaagaggaacggagaagcgaggacgcccagagcaaggccgccctgaccgactggctgcgggctaaggccagcttcgtgatcgagggcctgaaggaggccgacaaggacgagttctgcagatgcgagctgaagctgcagaagtggtacggggacctgcggggaaagcccttcgccatcgaagccgagaacagcatcctggacatcagcggcttcagcaagcagtacaactgtgccttcatctggcagaaggacggcgtgaagaagctgaacctgtacctgatcatcaactacttcaagggcggcaagctgcggttcaagaagatcaaacctgaagccttcgaagccaacagattctacaccgtgatcaacaaaaagagcggcgagatcgtgcccatggaggtgaacttcaacttcgacgaccccaacctgatcatcctgcctctggcctttggcaagagacagggcagagaattcatctggaacgacctgctgtccctggaaaccggcagcctgaagctggccaacggaagagtgatcgagaagacactgtacaacagaagaacccggcaggatgagcctgccctgttcgtggccctgaccttcgagcggcgggaggtcctggactcctccaatatcaaaccaatgaacctgatcggcgtggcaagaggcgaaaacatccccgccgtgatcgccctgaccgaccccgagggctgcccactgagccggtttaaggatagcctgggaaacccaacccacatcctgagaatcggcgagagctataaggagaagcagcggaccatccaggccaagaaggaggtggagcagcggagagccggcggctacagccggaagtacgccagcaaagccaagaatctggcagacgatatggtgagaaacaccgctagagatctgctgtactacgccgtgacccaggatgccatgctgatcttcgccaacctgagccggggcttcggccggcagggcaagcggaccttcatggccgagagacagtacacacggatggaggactggctgaccgccaagctggcctacgagggcctgagcaagacctacctgtccaagacactggcccagtacacctccaagacatgcagcaactgtgggtttaccatcaccagcgccgactacgacagggtgctggagaagctgaagaagacagcaacaggctggatgaccacaattaacggcaaggagctgaaggtggagggccagattacctactacaacagatacaagagacagaacgtagtcaaggacctgtccgtcgagctggatagactgagcgaagaatctgtgaacaacgacatctcctcctggacaaagggcagaagcggagaagctctgagcctcctgaagaaaagattctcccatagacccgtgcaggagaagttcgtgtgcctgaactgcggcttcgagacacacgcagccgagcaagccgccctgaacatcgccagatcctggctgttcctgcggagccaggagtacaagaaataccagacaaacaagacaaccggcaacaccgataagagagccttcgtcgagacctggcagtccttttaccggaagaagcttaaggaggtgtggaaacctgccgtgcggtctggcggatctggcggaggctccaccagccccaagaaaaagagaaaagtctaagctgccttctgcggggcttgccttctggccatgcccttcttctctcccttgcacctgtacctcttggtctttgaataaagcctgagtaggaaggctagcaaaaaaaaaaaaaaaaaaaaaaaaaaaaaaaaaaaaaaaaaaaaaaaaaaaaaaaaaaaaaaaaaaaaaaaaaaaaaaaa

SEQ ID NO: 12698 - RNA, 5785 nt, synthetic construct
  source 1..5785: mol_type = other RNA
aggaaataagagagaaaagaagagtaagaagaaatataagagccaccatggcccctaagaagaagcgtaaagtgagccggatggaacgcctcgtctacgaggtgcggcagaagtgcagaaacatcgaggacatctgcatctcctgcggatctctgaacgtgaccctggagcacccactgttcatcggcggcatgtgccagaactgtaaaaactgttttctggagtgtgcctatcaatacgacgatgacggctaccagagctactgcaccatctgttgcggcggaagagaggtgctgatgtgtggaaataacaactgctgccggtgcttctgcgtggaatgcgtggacctgctggtgggccccggcgccgcccaggccgctattaaggaagatccttggaactgctacatgtgcggccacaagggcacatacggcctgctgagacggagagaggactggcctagcagactgcagatgttcttcgccaataaccacgaccaggagttcgacccccctaaggtgtaccctcccgtccccgccgagaagagaaagcccatccgggtcctgagcctgttcgatggcatcgccaccggtctgctggtgctgaaggacctgggcatccaggtggataggtacattgcctccgaggtgtgcgaggactccatcaccgtgggaatggtgcgtcatcagggcaagatcatgtacgtgggcgacgtgcggagcgtgacacagaagcatatccaggagtggggccctttcgacctggtgatcggcggcagcccttgcaatgacctgagcatcgtgaacccagcccggaagggcctgtacgagggaaccggcagactgttcttcgagttttacagactgctgcacgacgcccggcctaaggaaggcgacgaccggcccttcttttggctgttcgagaatgtggtggccatgggagtcagcgacaagcgggatattagccggttcctggagagcaaccccgtgatgatcgatgccaaggaagtgagcgccgcccaccgggccagatacttctggggcaatctgcctggcatgaacagacccctggccagcaccgtgaacgacaagctggagctgcaggagtgcctggagcacggccggatcgccaagttcagcaaggtgagaaccatcaccacccgaagcaacagcatcaaacaaggcaaggaccagcactttcctgtgttcatgaacgagaaggaggacatcctgtggtgtaccgagatggagagagtgttcgggttcccagtccactacacagatgtcagcaacatgtctagactggccagacagagactgctgggaagaagctggtccgtccctgtgatcagacacctgttcgcccctctgaaggagtacttcgcctgcgtgagcagcggcaacagcaacgccaacagccggggccccagcttctctagcggcctggtgccactgtccctgagagggagccacatgggccccatggagatctacaaaaccgtgagcgcctggaagcggcagcctgtgcgcgtgctgagcctgtttcggaatatcgataaagtcctgaaaagcctgggattcctggagagcggctctggctccggcggtggcaccctgaagtacgtggaggatgtgacaaacgtggtcagacgggatgtggagaagtggggccccttcgatctggtgtacggcagcacccaacccctgggcagctcttgtgaccggtgccctggctggtacatgtttcagttccaccggatcctgcagtacgccctgccgagacaggagtcccagcggccattcttttggattttcatggacaacttgctgctgaccgaggatgaccaggaaactaccactcggttcctgcagaccgaagccgtgaccctgcaggacgtgagaggccgggactaccagaacgccatgcgggtgtggtccaacatccctggactgaaaagcaagcacgcacctctgacccctaaagaagaggagtacctgcaggcccaggtgcggagcagaagcaagctggacgcccctaaggtggatctgctggtgaagaattgcctcctgcccctgagagagtacttcaagtatttcagccagaatagtctgcccctgggaggcagcggcggcggcaggcaggagcccgtgaccttcgaggacgtggccgtgtacttcacccagaacgagtgggccagcctggacagcgtgcagagggccctgtacagggaggtgatgctggagaactacgccaacgtggccagcctggccttccccttcaccacccccgtgctggtgagccagctggagcagggcgagctgccctggggcctggacccctgggagcccatgggcagggaggccctgaggggcatctgcggcggcccaagcagcggcgcccctcctcccagcggcggcagcccagccggctccccaacctctaccgaggagggcacctctgagtccgccacccccgagagcggccctggcacctccaccgagcccagcgagggcagcgcacccggcagccctgccggcagccccacctccacagaggagggaaccagcaccgagcccagcgaaggcagcgccccaggcaccagcaccgagcctagtgagcaggagattaaacggatcaacaagatcagaagaagacttgtgaaagacagcaacaccaagaaggccggcaagacaggccccatgaaaaccctgctggttagagtgatgacacccgatctgagagagcggctggaaaacctgagaaagaagcctgaaaatatcccccagcccatcagcaatacatctagagccaacctgaataagctgctgaccgattacaccgaaatgaagaaggcgatcctgcatgtgtactgggaagagttccagaaggaccctgtgggcctgatgagccgggtggcccagcctgccagcaagaagatcgatcagaacaagctgaaacctgagatggacgagaagggcaacctgaccaccgccggctttgcctgctctcagtgtggccagcccctgttcgtgtacaagctggagcaggtgtctgagaagggcaaggcttacaccaactacttcggacggtgcaatgtggccgagcacgaaaagctgatcctgctggcccagctgaagcccgagaaggatagcgacgaagccgtgacatatagcctgggaaagtttgggcagagggccctggatttctacagcattcatgtgaccaaggagtccacccaccccgtgaagcccctggcccagatcgccggaaacagatacgcctccggacctgtgggaaaggccctgagcgacgcatgtatgggcacaatcgcctccttcctgtctaagtaccaggacatcatcatcgaacaccagaaggtggtgaagggcaaccagaagagactggagagcctgcgggagctggccggcaaggaaaacctggaataccctagcgtgaccctgccacctcagcctcacaccaaggagggcgttgatgcctacaacgaagtgatcgcccgggtgcgaatgtgggtgaacctgaacctgtggcagaagctgaagctaagcagagatgatgccaagcctctgctgagactgaagggattcccttcctttcctctggtcgagagacaggccaacgaagtggactggtgggacatggtgtgtaacgtgaagaagctgatcaacgagaaaaaggaggatggcaaggtgttttggcagaatctggctggctacaagagacaggaagccctgagaccatacctgagcagcgaggaagatcggaagaagggaaagaaattcgctcggtaccagctgggcgacctgctgctgcacctggaaaagaagcacggcgaggactggggaaaggtgtacgacgaggcctgggagcggattgacaagaaagtggaaggcctgagcaagcacatcaagctggaagaggaacggagaagcgaggacgcccagagcaaggccgccctgaccgactggctgcgggctaaggccagcttcgtgatcgagggcctgaaggaggccgacaaggacgagttctgcagatgcgagctgaagctgcagaagtggtacggggacctgcggggaaagcccttcgccatcgaagccgagaacagcatcctggacatcagcggcttcagcaagcagtacaactgtgccttcatctggcagaaggacggcgtgaagaagctgaacctgtacctgatcatcaactacttcaagggcggcaagctgcggttcaagaagatcaaacctgaagccttcgaagccaacagattctacaccgtgatcaacaaaaagagcggcgagatcgtgcccatggaggtgaacttcaacttcgacgaccccaacctgatcatcctgcctctggcctttggcaagagacagggcagagaattcatctggaacgacctgctgtccctggaaaccggcagcctgaagctggccaacggaagagtgatcgagaagacactgtacaacagaagaacccggcaggatgagcctgccctgttcgtggccctgaccttcgagcggcgggaggtcctggactcctccaatatcaaaccaatgaacctgatcggcgtggcaagaggcgaaaacatccccgccgtgatcgccctgaccgaccccgagggctgcccactgagccggtttaaggatagcctgggaaacccaacccacatcctgagaatcggcgagagctataaggagaagcagcggaccatccaggccaagaaggaggtggagcagcggagagccggcggctacagccggaagtacgccagcaaagccaagaatctggcagacgatatggtgagaaacaccgctagagatctgctgtactacgccgtgacccaggatgccatgctgatcttcgccaacctgagccggggcttcggccggcagggcaagcggaccttcatggccgagagacagtacacacggatggaggactggctgaccgccaagctggcctacgagggcctgagcaagacctacctgtccaagacactggcccagtacacctccaagacatgcagcaactgtgggtttaccatcaccagcgccgactacgacagggtgctggagaagctgaagaagacagcaacaggctggatgaccacaattaacggcaaggagctgaaggtggagggccagattacctactacaacagatacaagagacagaacgtagtcaaggacctgtccgtcgagctggatagactgagcgaagaatctgtgaacaacgacatctcctcctggacaaagggcagaagcggagaagctctgagcctcctgaagaaaagattctcccatagacccgtgcaggagaagttcgtgtgcctgaactgcggcttcgagacacacgcagccgagcaagccgccctgaacatcgccagatcctggctgttcctgcggagccaggagtacaagaaataccagacaaacaagacaaccggcaacaccgataagagagccttcgtcgagacctggcagtccttttaccggaagaagcttaaggaggtgtggaaacctgccgtgcggtctggcggatctggcggaggctccaccagccccaagaaaaagagaaaagtctaagctgccttctgcggggcttgccttctggccatgcccttcttctctcccttgcacctgtacctcttggtctttgaataaagcctgagtaggaaggctagcaaaaaaaaaaaaaaaaaaaaaaaaaaaaaaaaaaaaaaaaaaaaaaaaaaaaaaaaaaaaaaaaaaaaaaaaaaaaaaaa

SEQ ID NO: 12699 - RNA, 5785 nt, synthetic construct
  source 1..5785: mol_type = other RNA
aggaaataagagagaaaagaagagtaagaagaaatataagagccaccatggcccctaagaagaagcgtaaagtgagccggatggaacgcctcgtctacgaggtgcggcagaagtgcagaaacatcgaggacatctgcatctcctgcggatctctgaacgtgaccctggagcacccactgttcatcggcggcatgtgccagaactgtaaaaactgttttctggagtgtgcctatcaatacgacgatgacggctaccagagctactgcaccatctgttgcggcggaagagaggtgctgatgtgtggaaataacaactgctgccggtgcttctgcgtggaatgcgtggacctgctggtgggccccggcgccgcccaggccgctattaaggaagatccttggaactgctacatgtgcggccacaagggcacatacggcctgctgagacggagagaggactggcctagcagactgcagatgttcttcgccaataaccacgaccaggagttcgacccccctaaggtgtaccctcccgtccccgccgagaagagaaagcccatccgggtcctgagcctgttcgatggcatcgccaccggtctgctggtgctgaaggacctgggcatccaggtggataggtacattgcctccgaggtgtgcgaggactccatcaccgtgggaatggtgcgtcatcagggcaagatcatgtacgtgggcgacgtgcggagcgtgacacagaagcatatccaggagtggggccctttcgacctggtgatcggcggcagcccttgcaatgacctgagcatcgtgaacccagcccggaagggcctgtacgagggaaccggcagactgttcttcgagttttacagactgctgcacgacgcccggcctaaggaaggcgacgaccggcccttcttttggctgttcgagaatgtggtggccatgggagtcagcgacaagcgggatattagccggttcctggagagcaaccccgtgatgatcgatgccaaggaagtgagcgccgcccaccgggccagatacttctggggcaatctgcctggcatgaacagacccctggccagcaccgtgaacgacaagctggagctgcaggagtgcctggagcacggccggatcgccaagttcagcaaggtgagaaccatcaccacccgaagcaacagcatcaaacaaggcaaggaccagcactttcctgtgttcatgaacgagaaggaggacatcctgtggtgtaccgagatggagagagtgttcgggttcccagtccactacacagatgtcagcaacatgtctagactggccagacagagactgctgggaagaagctggtccgtccctgtgatcagacacctgttcgcccctctgaaggagtacttcgcctgcgtgagcagcggcaacagcaacgccaacagccggggccccagcttctctagcggcctggtgccactgtccctgagagggagccacatgggccccatggagatctacaaaaccgtgagcgcctggaagcggcagcctgtgcgcgtgctgagcctgtttcggaatatcgataaagtcctgaaaagcctgggattcctggagagcggctctggctccggcggtggcaccctgaagtacgtggaggatgtgacaaacgtggtcagacgggatgtggagaagtggggccccttcgatctggtgtacggcagcacccaacccctgggcagctcttgtgaccggtgccctggctggtacatgtttcagttccaccggatcctgcagtacgccctgccgagacaggagtcccagcggccattcttttggattttcatggacaacttgctgctgaccgaggatgaccaggaaactaccactcggttcctgcagaccgaagccgtgaccctgcaggacgtgagaggccgggactaccagaacgccatgcgggtgtggtccaacatccctggactgaaaagcaagcacgcacctctgacccctaaagaagaggagtacctgcaggcccaggtgcggagcagaagcaagctggacgcccctaaggtggatctgctggtgaagaattgcctcctgcccctgagagagtacttcaagtatttcagccagaatagtctgcccctgggaggcagcggcggcggcgtgaccttcgaggaggtggccgtgtacttcagcgccgaggagtgggccctgctgggccccgcccagagggccctgtacagggaggtgatgagggagaactacgaggccgtgaccagcctggcctgggccggcctgcccatcagcaagcccgacctgatcagctgcatggagaggggcgaggagccctgggtggcccacctgcagagccagaggaggagggagctgcccaggggcaggaacagcggcggcccaagcagcggcgcccctcctcccagcggcggcagcccagccggctccccaacctctaccgaggagggcacctctgagtccgccacccccgagagcggccctggcacctccaccgagcccagcgagggcagcgcacccggcagccctgccggcagccccacctccacagaggagggaaccagcaccgagcccagcgaaggcagcgccccaggcaccagcaccgagcctagtgagcaggagattaaacggatcaacaagatcagaagaagacttgtgaaagacagcaacaccaagaaggccggcaagacaggccccatgaaaaccctgctggttagagtgatgacacccgatctgagagagcggctggaaaacctgagaaagaagcctgaaaatatcccccagcccatcagcaatacatctagagccaacctgaataagctgctgaccgattacaccgaaatgaagaaggcgatcctgcatgtgtactgggaagagttccagaaggaccctgtgggcctgatgagccgggtggcccagcctgccagcaagaagatcgatcagaacaagctgaaacctgagatggacgagaagggcaacctgaccaccgccggctttgcctgctctcagtgtggccagcccctgttcgtgtacaagctggagcaggtgtctgagaagggcaaggcttacaccaactacttcggacggtgcaatgtggccgagcacgaaaagctgatcctgctggcccagctgaagcccgagaaggatagcgacgaagccgtgacatatagcctgggaaagtttgggcagagggccctggatttctacagcattcatgtgaccaaggagtccacccaccccgtgaagcccctggcccagatcgccggaaacagatacgcctccggacctgtgggaaaggccctgagcgacgcatgtatgggcacaatcgcctccttcctgtctaagtaccaggacatcatcatcgaacaccagaaggtggtgaagggcaaccagaagagactggagagcctgcgggagctggccggcaaggaaaacctggaataccctagcgtgaccctgccacctcagcctcacaccaaggagggcgttgatgcctacaacgaagtgatcgcccgggtgcgaatgtgggtgaacctgaacctgtggcagaagctgaagctaagcagagatgatgccaagcctctgctgagactgaagggattcccttcctttcctctggtcgagagacaggccaacgaagtggactggtgggacatggtgtgtaacgtgaagaagctgatcaacgagaaaaaggaggatggcaaggtgttttggcagaatctggctggctacaagagacaggaagccctgagaccatacctgagcagcgaggaagatcggaagaagggaaagaaattcgctcggtaccagctgggcgacctgctgctgcacctggaaaagaagcacggcgaggactggggaaaggtgtacgacgaggcctgggagcggattgacaagaaagtggaaggcctgagcaagcacatcaagctggaagaggaacggagaagcgaggacgcccagagcaaggccgccctgaccgactggctgcgggctaaggccagcttcgtgatcgagggcctgaaggaggccgacaaggacgagttctgcagatgcgagctgaagctgcagaagtggtacggggacctgcggggaaagcccttcgccatcgaagccgagaacagcatcctggacatcagcggcttcagcaagcagtacaactgtgccttcatctggcagaaggacggcgtgaagaagctgaacctgtacctgatcatcaactacttcaagggcggcaagctgcggttcaagaagatcaaacctgaagccttcgaagccaacagattctacaccgtgatcaacaaaaagagcggcgagatcgtgcccatggaggtgaacttcaacttcgacgaccccaacctgatcatcctgcctctggcctttggcaagagacagggcagagaattcatctggaacgacctgctgtccctggaaaccggcagcctgaagctggccaacggaagagtgatcgagaagacactgtacaacagaagaacccggcaggatgagcctgccctgttcgtggccctgaccttcgagcggcgggaggtcctggactcctccaatatcaaaccaatgaacctgatcggcgtggcaagaggcgaaaacatccccgccgtgatcgccctgaccgaccccgagggctgcccactgagccggtttaaggatagcctgggaaacccaacccacatcctgagaatcggcgagagctataaggagaagcagcggaccatccaggccaagaaggaggtggagcagcggagagccggcggctacagccggaagtacgccagcaaagccaagaatctggcagacgatatggtgagaaacaccgctagagatctgctgtactacgccgtgacccaggatgccatgctgatcttcgccaacctgagccggggcttcggccggcagggcaagcggaccttcatggccgagagacagtacacacggatggaggactggctgaccgccaagctggcctacgagggcctgagcaagacctacctgtccaagacactggcccagtacacctccaagacatgcagcaactgtgggtttaccatcaccagcgccgactacgacagggtgctggagaagctgaagaagacagcaacaggctggatgaccacaattaacggcaaggagctgaaggtggagggccagattacctactacaacagatacaagagacagaacgtagtcaaggacctgtccgtcgagctggatagactgagcgaagaatctgtgaacaacgacatctcctcctggacaaagggcagaagcggagaagctctgagcctcctgaagaaaagattctcccatagacccgtgcaggagaagttcgtgtgcctgaactgcggcttcgagacacacgcagccgagcaagccgccctgaacatcgccagatcctggctgttcctgcggagccaggagtacaagaaataccagacaaacaagacaaccggcaacaccgataagagagccttcgtcgagacctggcagtccttttaccggaagaagcttaaggaggtgtggaaacctgccgtgcggtctggcggatctggcggaggctccaccagccccaagaaaaagagaaaagtctaagctgccttctgcggggcttgccttctggccatgcccttcttctctcccttgcacctgtacctcttggtctttgaataaagcctgagtaggaaggctagcaaaaaaaaaaaaaaaaaaaaaaaaaaaaaaaaaaaaaaaaaaaaaaaaaaaaaaaaaaaaaaaaaaaaaaaaaaaaaaaa

SEQ ID NO: 12700 - RNA, 5785 nt, synthetic construct
  source 1..5785: mol_type = other RNA
aggaaataagagagaaaagaagagtaagaagaaatataagagccaccatggcccctaagaagaagcgtaaagtgagccggatggaacgcctcgtctacgaggtgcggcagaagtgcagaaacatcgaggacatctgcatctcctgcggatctctgaacgtgaccctggagcacccactgttcatcggcggcatgtgccagaactgtaaaaactgttttctggagtgtgcctatcaatacgacgatgacggctaccagagctactgcaccatctgttgcggcggaagagaggtgctgatgtgtggaaataacaactgctgccggtgcttctgcgtggaatgcgtggacctgctggtgggccccggcgccgcccaggccgctattaaggaagatccttggaactgctacatgtgcggccacaagggcacatacggcctgctgagacggagagaggactggcctagcagactgcagatgttcttcgccaataaccacgaccaggagttcgacccccctaaggtgtaccctcccgtccccgccgagaagagaaagcccatccgggtcctgagcctgttcgatggcatcgccaccggtctgctggtgctgaaggacctgggcatccaggtggataggtacattgcctccgaggtgtgcgaggactccatcaccgtgggaatggtgcgtcatcagggcaagatcatgtacgtgggcgacgtgcggagcgtgacacagaagcatatccaggagtggggccctttcgacctggtgatcggcggcagcccttgcaatgacctgagcatcgtgaacccagcccggaagggcctgtacgagggaaccggcagactgttcttcgagttttacagactgctgcacgacgcccggcctaaggaaggcgacgaccggcccttcttttggctgttcgagaatgtggtggccatgggagtcagcgacaagcgggatattagccggttcctggagagcaaccccgtgatgatcgatgccaaggaagtgagcgccgcccaccgggccagatacttctggggcaatctgcctggcatgaacagacccctggccagcaccgtgaacgacaagctggagctgcaggagtgcctggagcacggccggatcgccaagttcagcaaggtgagaaccatcaccacccgaagcaacagcatcaaacaaggcaaggaccagcactttcctgtgttcatgaacgagaaggaggacatcctgtggtgtaccgagatggagagagtgttcgggttcccagtccactacacagatgtcagcaacatgtctagactggccagacagagactgctgggaagaagctggtccgtccctgtgatcagacacctgttcgcccctctgaaggagtacttcgcctgcgtgagcagcggcaacagcaacgccaacagccggggccccagcttctctagcggcctggtgccactgtccctgagagggagccacatgggccccatggagatctacaaaaccgtgagcgcctggaagcggcagcctgtgcgcgtgctgagcctgtttcggaatatcgataaagtcctgaaaagcctgggattcctggagagcggctctggctccggcggtggcaccctgaagtacgtggaggatgtgacaaacgtggtcagacgggatgtggagaagtggggccccttcgatctggtgtacggcagcacccaacccctgggcagctcttgtgaccggtgccctggctggtacatgtttcagttccaccggatcctgcagtacgccctgccgagacaggagtcccagcggccattcttttggattttcatggacaacttgctgctgaccgaggatgaccaggaaactaccactcggttcctgcagaccgaagccgtgaccctgcaggacgtgagaggccgggactaccagaacgccatgcgggtgtggtccaacatccctggactgaaaagcaagcacgcacctctgacccctaaagaagaggagtacctgcaggcccaggtgcggagcagaagcaagctggacgcccctaaggtggatctgctggtgaagaattgcctcctgcccctgagagagtacttcaagtatttcagccagaatagtctgcccctgggaggcagcggcggcggcgtgcagggcagcatgagcttcgaggacgtgatcgtggagttcacccaggacgagtggcagtacatgagccccgcccagaggatcctgtacagggacgtgatgctggagaactacagccacctgatcagcgtgggctactgcaccaccaagcccgagatgatcttcaagctggagcagggcgaggagccctggagcctggaggaggagttcctgaaccagaggtaccccggctacttcagcgtgggcggcccaagcagcggcgcccctcctcccagcggcggcagcccagccggctccccaacctctaccgaggagggcacctctgagtccgccacccccgagagcggccctggcacctccaccgagcccagcgagggcagcgcacccggcagccctgccggcagccccacctccacagaggagggaaccagcaccgagcccagcgaaggcagcgccccaggcaccagcaccgagcctagtgagcaggagattaaacggatcaacaagatcagaagaagacttgtgaaagacagcaacaccaagaaggccggcaagacaggccccatgaaaaccctgctggttagagtgatgacacccgatctgagagagcggctggaaaacctgagaaagaagcctgaaaatatcccccagcccatcagcaatacatctagagccaacctgaataagctgctgaccgattacaccgaaatgaagaaggcgatcctgcatgtgtactgggaagagttccagaaggaccctgtgggcctgatgagccgggtggcccagcctgccagcaagaagatcgatcagaacaagctgaaacctgagatggacgagaagggcaacctgaccaccgccggctttgcctgctctcagtgtggccagcccctgttcgtgtacaagctggagcaggtgtctgagaagggcaaggcttacaccaactacttcggacggtgcaatgtggccgagcacgaaaagctgatcctgctggcccagctgaagcccgagaaggatagcgacgaagccgtgacatatagcctgggaaagtttgggcagagggccctggatttctacagcattcatgtgaccaaggagtccacccaccccgtgaagcccctggcccagatcgccggaaacagatacgcctccggacctgtgggaaaggccctgagcgacgcatgtatgggcacaatcgcctccttcctgtctaagtaccaggacatcatcatcgaacaccagaaggtggtgaagggcaaccagaagagactggagagcctgcgggagctggccggcaaggaaaacctggaataccctagcgtgaccctgccacctcagcctcacaccaaggagggcgttgatgcctacaacgaagtgatcgcccgggtgcgaatgtgggtgaacctgaacctgtggcagaagctgaagctaagcagagatgatgccaagcctctgctgagactgaagggattcccttcctttcctctggtcgagagacaggccaacgaagtggactggtgggacatggtgtgtaacgtgaagaagctgatcaacgagaaaaaggaggatggcaaggtgttttggcagaatctggctggctacaagagacaggaagccctgagaccatacctgagcagcgaggaagatcggaagaagggaaagaaattcgctcggtaccagctgggcgacctgctgctgcacctggaaaagaagcacggcgaggactggggaaaggtgtacgacgaggcctgggagcggattgacaagaaagtggaaggcctgagcaagcacatcaagctggaagaggaacggagaagcgaggacgcccagagcaaggccgccctgaccgactggctgcgggctaaggccagcttcgtgatcgagggcctgaaggaggccgacaaggacgagttctgcagatgcgagctgaagctgcagaagtggtacggggacctgcggggaaagcccttcgccatcgaagccgagaacagcatcctggacatcagcggcttcagcaagcagtacaactgtgccttcatctggcagaaggacggcgtgaagaagctgaacctgtacctgatcatcaactacttcaagggcggcaagctgcggttcaagaagatcaaacctgaagccttcgaagccaacagattctacaccgtgatcaacaaaaagagcggcgagatcgtgcccatggaggtgaacttcaacttcgacgaccccaacctgatcatcctgcctctggcctttggcaagagacagggcagagaattcatctggaacgacctgctgtccctggaaaccggcagcctgaagctggccaacggaagagtgatcgagaagacactgtacaacagaagaacccggcaggatgagcctgccctgttcgtggccctgaccttcgagcggcgggaggtcctggactcctccaatatcaaaccaatgaacctgatcggcgtggcaagaggcgaaaacatccccgccgtgatcgccctgaccgaccccgagggctgcccactgagccggtttaaggatagcctgggaaacccaacccacatcctgagaatcggcgagagctataaggagaagcagcggaccatccaggccaagaaggaggtggagcagcggagagccggcggctacagccggaagtacgccagcaaagccaagaatctggcagacgatatggtgagaaacaccgctagagatctgctgtactacgccgtgacccaggatgccatgctgatcttcgccaacctgagccggggcttcggccggcagggcaagcggaccttcatggccgagagacagtacacacggatggaggactggctgaccgccaagctggcctacgagggcctgagcaagacctacctgtccaagacactggcccagtacacctccaagacatgcagcaactgtgggtttaccatcaccagcgccgactacgacagggtgctggagaagctgaagaagacagcaacaggctggatgaccacaattaacggcaaggagctgaaggtggagggccagattacctactacaacagatacaagagacagaacgtagtcaaggacctgtccgtcgagctggatagactgagcgaagaatctgtgaacaacgacatctcctcctggacaaagggcagaagcggagaagctctgagcctcctgaagaaaagattctcccatagacccgtgcaggagaagttcgtgtgcctgaactgcggcttcgagacacacgcagccgagcaagccgccctgaacatcgccagatcctggctgttcctgcggagccaggagtacaagaaataccagacaaacaagacaaccggcaacaccgataagagagccttcgtcgagacctggcagtccttttaccggaagaagcttaaggaggtgtggaaacctgccgtgcggtctggcggatctggcggaggctccaccagccccaagaaaaagagaaaagtctaagctgccttctgcggggcttgccttctggccatgcccttcttctctcccttgcacctgtacctcttggtctttgaataaagcctgagtaggaaggctagcaaaaaaaaaaaaaaaaaaaaaaaaaaaaaaaaaaaaaaaaaaaaaaaaaaaaaaaaaaaaaaaaaaaaaaaaaaaaaaaa

SEQ ID NO: 12701 - RNA, 5785 nt, synthetic construct
  source 1..5785: mol_type = other RNA
aggaaataagagagaaaagaagagtaagaagaaatataagagccaccatggcccctaagaagaagcgtaaagtgagccggatggaacgcctcgtctacgaggtgcggcagaagtgcagaaacatcgaggacatctgcatctcctgcggatctctgaacgtgaccctggagcacccactgttcatcggcggcatgtgccagaactgtaaaaactgttttctggagtgtgcctatcaatacgacgatgacggctaccagagctactgcaccatctgttgcggcggaagagaggtgctgatgtgtggaaataacaactgctgccggtgcttctgcgtggaatgcgtggacctgctggtgggccccggcgccgcccaggccgctattaaggaagatccttggaactgctacatgtgcggccacaagggcacatacggcctgctgagacggagagaggactggcctagcagactgcagatgttcttcgccaataaccacgaccaggagttcgacccccctaaggtgtaccctcccgtccccgccgagaagagaaagcccatccgggtcctgagcctgttcgatggcatcgccaccggtctgctggtgctgaaggacctgggcatccaggtggataggtacattgcctccgaggtgtgcgaggactccatcaccgtgggaatggtgcgtcatcagggcaagatcatgtacgtgggcgacgtgcggagcgtgacacagaagcatatccaggagtggggccctttcgacctggtgatcggcggcagcccttgcaatgacctgagcatcgtgaacccagcccggaagggcctgtacgagggaaccggcagactgttcttcgagttttacagactgctgcacgacgcccggcctaaggaaggcgacgaccggcccttcttttggctgttcgagaatgtggtggccatgggagtcagcgacaagcgggatattagccggttcctggagagcaaccccgtgatgatcgatgccaaggaagtgagcgccgcccaccgggccagatacttctggggcaatctgcctggcatgaacagacccctggccagcaccgtgaacgacaagctggagctgcaggagtgcctggagcacggccggatcgccaagttcagcaaggtgagaaccatcaccacccgaagcaacagcatcaaacaaggcaaggaccagcactttcctgtgttcatgaacgagaaggaggacatcctgtggtgtaccgagatggagagagtgttcgggttcccagtccactacacagatgtcagcaacatgtctagactggccagacagagactgctgggaagaagctggtccgtccctgtgatcagacacctgttcgcccctctgaaggagtacttcgcctgcgtgagcagcggcaacagcaacgccaacagccggggccccagcttctctagcggcctggtgccactgtccctgagagggagccacatgggccccatggagatctacaaaaccgtgagcgcctggaagcggcagcctgtgcgcgtgctgagcctgtttcggaatatcgataaagtcctgaaaagcctgggattcctggagagcggctctggctccggcggtggcaccctgaagtacgtggaggatgtgacaaacgtggtcagacgggatgtggagaagtggggccccttcgatctggtgtacggcagcacccaacccctgggcagctcttgtgaccggtgccctggctggtacatgtttcagttccaccggatcctgcagtacgccctgccgagacaggagtcccagcggccattcttttggattttcatggacaacttgctgctgaccgaggatgaccaggaaactaccactcggttcctgcagaccgaagccgtgaccctgcaggacgtgagaggccgggactaccagaacgccatgcgggtgtggtccaacatccctggactgaaaagcaagcacgcacctctgacccctaaagaagaggagtacctgcaggcccaggtgcggagcagaagcaagctggacgcccctaaggtggatctgctggtgaagaattgcctcctgcccctgagagagtacttcaagtatttcagccagaatagtctgcccctgggaggcagcggcggcggcatggcccacctgatgttcagggacgtggccatcgacttcagccaggaggagtgggagggcctggacctgaagcagagggacctgtacagggacgtgatgctggagaactacagcaacatggtgagcctgggcctgtgcatctaccagcccgacgtgttcagcctgctggagaagggcaaggagccctggaagatcctgagggacgagaccaggggcccctgccccgacatgcagagcaggtgcggcggcccaagcagcggcgcccctcctcccagcggcggcagcccagccggctccccaacctctaccgaggagggcacctctgagtccgccacccccgagagcggccctggcacctccaccgagcccagcgagggcagcgcacccggcagccctgccggcagccccacctccacagaggagggaaccagcaccgagcccagcgaaggcagcgccccaggcaccagcaccgagcctagtgagcaggagattaaacggatcaacaagatcagaagaagacttgtgaaagacagcaacaccaagaaggccggcaagacaggccccatgaaaaccctgctggttagagtgatgacacccgatctgagagagcggctggaaaacctgagaaagaagcctgaaaatatcccccagcccatcagcaatacatctagagccaacctgaataagctgctgaccgattacaccgaaatgaagaaggcgatcctgcatgtgtactgggaagagttccagaaggaccctgtgggcctgatgagccgggtggcccagcctgccagcaagaagatcgatcagaacaagctgaaacctgagatggacgagaagggcaacctgaccaccgccggctttgcctgctctcagtgtggccagcccctgttcgtgtacaagctggagcaggtgtctgagaagggcaaggcttacaccaactacttcggacggtgcaatgtggccgagcacgaaaagctgatcctgctggcccagctgaagcccgagaaggatagcgacgaagccgtgacatatagcctgggaaagtttgggcagagggccctggatttctacagcattcatgtgaccaaggagtccacccaccccgtgaagcccctggcccagatcgccggaaacagatacgcctccggacctgtgggaaaggccctgagcgacgcatgtatgggcacaatcgcctccttcctgtctaagtaccaggacatcatcatcgaacaccagaaggtggtgaagggcaaccagaagagactggagagcctgcgggagctggccggcaaggaaaacctggaataccctagcgtgaccctgccacctcagcctcacaccaaggagggcgttgatgcctacaacgaagtgatcgcccgggtgcgaatgtgggtgaacctgaacctgtggcagaagctgaagctaagcagagatgatgccaagcctctgctgagactgaagggattcccttcctttcctctggtcgagagacaggccaacgaagtggactggtgggacatggtgtgtaacgtgaagaagctgatcaacgagaaaaaggaggatggcaaggtgttttggcagaatctggctggctacaagagacaggaagccctgagaccatacctgagcagcgaggaagatcggaagaagggaaagaaattcgctcggtaccagctgggcgacctgctgctgcacctggaaaagaagcacggcgaggactggggaaaggtgtacgacgaggcctgggagcggattgacaagaaagtggaaggcctgagcaagcacatcaagctggaagaggaacggagaagcgaggacgcccagagcaaggccgccctgaccgactggctgcgggctaaggccagcttcgtgatcgagggcctgaaggaggccgacaaggacgagttctgcagatgcgagctgaagctgcagaagtggtacggggacctgcggggaaagcccttcgccatcgaagccgagaacagcatcctggacatcagcggcttcagcaagcagtacaactgtgccttcatctggcagaaggacggcgtgaagaagctgaacctgtacctgatcatcaactacttcaagggcggcaagctgcggttcaagaagatcaaacctgaagccttcgaagccaacagattctacaccgtgatcaacaaaaagagcggcgagatcgtgcccatggaggtgaacttcaacttcgacgaccccaacctgatcatcctgcctctggcctttggcaagagacagggcagagaattcatctggaacgacctgctgtccctggaaaccggcagcctgaagctggccaacggaagagtgatcgagaagacactgtacaacagaagaacccggcaggatgagcctgccctgttcgtggccctgaccttcgagcggcgggaggtcctggactcctccaatatcaaaccaatgaacctgatcggcgtggcaagaggcgaaaacatccccgccgtgatcgccctgaccgaccccgagggctgcccactgagccggtttaaggatagcctgggaaacccaacccacatcctgagaatcggcgagagctataaggagaagcagcggaccatccaggccaagaaggaggtggagcagcggagagccggcggctacagccggaagtacgccagcaaagccaagaatctggcagacgatatggtgagaaacaccgctagagatctgctgtactacgccgtgacccaggatgccatgctgatcttcgccaacctgagccggggcttcggccggcagggcaagcggaccttcatggccgagagacagtacacacggatggaggactggctgaccgccaagctggcctacgagggcctgagcaagacctacctgtccaagacactggcccagtacacctccaagacatgcagcaactgtgggtttaccatcaccagcgccgactacgacagggtgctggagaagctgaagaagacagcaacaggctggatgaccacaattaacggcaaggagctgaaggtggagggccagattacctactacaacagatacaagagacagaacgtagtcaaggacctgtccgtcgagctggatagactgagcgaagaatctgtgaacaacgacatctcctcctggacaaagggcagaagcggagaagctctgagcctcctgaagaaaagattctcccatagacccgtgcaggagaagttcgtgtgcctgaactgcggcttcgagacacacgcagccgagcaagccgccctgaacatcgccagatcctggctgttcctgcggagccaggagtacaagaaataccagacaaacaagacaaccggcaacaccgataagagagccttcgtcgagacctggcagtccttttaccggaagaagcttaaggaggtgtggaaacctgccgtgcggtctggcggatctggcggaggctccaccagccccaagaaaaagagaaaagtctaagctgccttctgcggggcttgccttctggccatgcccttcttctctcccttgcacctgtacctcttggtctttgaataaagcctgagtaggaaggctagcaaaaaaaaaaaaaaaaaaaaaaaaaaaaaaaaaaaaaaaaaaaaaaaaaaaaaaaaaaaaaaaaaaaaaaaaaaaaaaaa

SEQ ID NO: 12702 - RNA, 5785 nt, synthetic construct
  source 1..5785: mol_type = other RNA
aggaaataagagagaaaagaagagtaagaagaaatataagagccaccatggcccctaagaagaagcgtaaagtgagccggatggaacgcctcgtctacgaggtgcggcagaagtgcagaaacatcgaggacatctgcatctcctgcggatctctgaacgtgaccctggagcacccactgttcatcggcggcatgtgccagaactgtaaaaactgttttctggagtgtgcctatcaatacgacgatgacggctaccagagctactgcaccatctgttgcggcggaagagaggtgctgatgtgtggaaataacaactgctgccggtgcttctgcgtggaatgcgtggacctgctggtgggccccggcgccgcccaggccgctattaaggaagatccttggaactgctacatgtgcggccacaagggcacatacggcctgctgagacggagagaggactggcctagcagactgcagatgttcttcgccaataaccacgaccaggagttcgacccccctaaggtgtaccctcccgtccccgccgagaagagaaagcccatccgggtcctgagcctgttcgatggcatcgccaccggtctgctggtgctgaaggacctgggcatccaggtggataggtacattgcctccgaggtgtgcgaggactccatcaccgtgggaatggtgcgtcatcagggcaagatcatgtacgtgggcgacgtgcggagcgtgacacagaagcatatccaggagtggggccctttcgacctggtgatcggcggcagcccttgcaatgacctgagcatcgtgaacccagcccggaagggcctgtacgagggaaccggcagactgttcttcgagttttacagactgctgcacgacgcccggcctaaggaaggcgacgaccggcccttcttttggctgttcgagaatgtggtggccatgggagtcagcgacaagcgggatattagccggttcctggagagcaaccccgtgatgatcgatgccaaggaagtgagcgccgcccaccgggccagatacttctggggcaatctgcctggcatgaacagacccctggccagcaccgtgaacgacaagctggagctgcaggagtgcctggagcacggccggatcgccaagttcagcaaggtgagaaccatcaccacccgaagcaacagcatcaaacaaggcaaggaccagcactttcctgtgttcatgaacgagaaggaggacatcctgtggtgtaccgagatggagagagtgttcgggttcccagtccactacacagatgtcagcaacatgtctagactggccagacagagactgctgggaagaagctggtccgtccctgtgatcagacacctgttcgcccctctgaaggagtacttcgcctgcgtgagcagcggcaacagcaacgccaacagccggggccccagcttctctagcggcctggtgccactgtccctgagagggagccacatgggccccatggagatctacaaaaccgtgagcgcctggaagcggcagcctgtgcgcgtgctgagcctgtttcggaatatcgataaagtcctgaaaagcctgggattcctggagagcggctctggctccggcggtggcaccctgaagtacgtggaggatgtgacaaacgtggtcagacgggatgtggagaagtggggccccttcgatctggtgtacggcagcacccaacccctgggcagctcttgtgaccggtgccctggctggtacatgtttcagttccaccggatcctgcagtacgccctgccgagacaggagtcccagcggccattcttttggattttcatggacaacttgctgctgaccgaggatgaccaggaaactaccactcggttcctgcagaccgaagccgtgaccctgcaggacgtgagaggccgggactaccagaacgccatgcgggtgtggtccaacatccctggactgaaaagcaagcacgcacctctgacccctaaagaagaggagtacctgcaggcccaggtgcggagcagaagcaagctggacgcccctaaggtggatctgctggtgaagaattgcctcctgcccctgagagagtacttcaagtatttcagccagaatagtctgcccctgggaggcagcggcggcggcgcccacggcctggtgatgttcaaggacgtggccatcgacgtgagccaggaggagtgggagtgcctgaaccccacccagaggagcctgtacaaggacgtgatgctggagaactacagcaacctggtgagcctgggcctgagcatcagcaagcccgccgtgatcagcagcctggagcagggcaaggagccctggatggtggtgagggaggtgaccggcgagcagtgccccgacctggtgagcaggggcggcccaagcagcggcgcccctcctcccagcggcggcagcccagccggctccccaacctctaccgaggagggcacctctgagtccgccacccccgagagcggccctggcacctccaccgagcccagcgagggcagcgcacccggcagccctgccggcagccccacctccacagaggagggaaccagcaccgagcccagcgaaggcagcgccccaggcaccagcaccgagcctagtgagcaggagattaaacggatcaacaagatcagaagaagacttgtgaaagacagcaacaccaagaaggccggcaagacaggccccatgaaaaccctgctggttagagtgatgacacccgatctgagagagcggctggaaaacctgagaaagaagcctgaaaatatcccccagcccatcagcaatacatctagagccaacctgaataagctgctgaccgattacaccgaaatgaagaaggcgatcctgcatgtgtactgggaagagttccagaaggaccctgtgggcctgatgagccgggtggcccagcctgccagcaagaagatcgatcagaacaagctgaaacctgagatggacgagaagggcaacctgaccaccgccggctttgcctgctctcagtgtggccagcccctgttcgtgtacaagctggagcaggtgtctgagaagggcaaggcttacaccaactacttcggacggtgcaatgtggccgagcacgaaaagctgatcctgctggcccagctgaagcccgagaaggatagcgacgaagccgtgacatatagcctgggaaagtttgggcagagggccctggatttctacagcattcatgtgaccaaggagtccacccaccccgtgaagcccctggcccagatcgccggaaacagatacgcctccggacctgtgggaaaggccctgagcgacgcatgtatgggcacaatcgcctccttcctgtctaagtaccaggacatcatcatcgaacaccagaaggtggtgaagggcaaccagaagagactggagagcctgcgggagctggccggcaaggaaaacctggaataccctagcgtgaccctgccacctcagcctcacaccaaggagggcgttgatgcctacaacgaagtgatcgcccgggtgcgaatgtgggtgaacctgaacctgtggcagaagctgaagctaagcagagatgatgccaagcctctgctgagactgaagggattcccttcctttcctctggtcgagagacaggccaacgaagtggactggtgggacatggtgtgtaacgtgaagaagctgatcaacgagaaaaaggaggatggcaaggtgttttggcagaatctggctggctacaagagacaggaagccctgagaccatacctgagcagcgaggaagatcggaagaagggaaagaaattcgctcggtaccagctgggcgacctgctgctgcacctggaaaagaagcacggcgaggactggggaaaggtgtacgacgaggcctgggagcggattgacaagaaagtggaaggcctgagcaagcacatcaagctggaagaggaacggagaagcgaggacgcccagagcaaggccgccctgaccgactggctgcgggctaaggccagcttcgtgatcgagggcctgaaggaggccgacaaggacgagttctgcagatgcgagctgaagctgcagaagtggtacggggacctgcggggaaagcccttcgccatcgaagccgagaacagcatcctggacatcagcggcttcagcaagcagtacaactgtgccttcatctggcagaaggacggcgtgaagaagctgaacctgtacctgatcatcaactacttcaagggcggcaagctgcggttcaagaagatcaaacctgaagccttcgaagccaacagattctacaccgtgatcaacaaaaagagcggcgagatcgtgcccatggaggtgaacttcaacttcgacgaccccaacctgatcatcctgcctctggcctttggcaagagacagggcagagaattcatctggaacgacctgctgtccctggaaaccggcagcctgaagctggccaacggaagagtgatcgagaagacactgtacaacagaagaacccggcaggatgagcctgccctgttcgtggccctgaccttcgagcggcgggaggtcctggactcctccaatatcaaaccaatgaacctgatcggcgtggcaagaggcgaaaacatccccgccgtgatcgccctgaccgaccccgagggctgcccactgagccggtttaaggatagcctgggaaacccaacccacatcctgagaatcggcgagagctataaggagaagcagcggaccatccaggccaagaaggaggtggagcagcggagagccggcggctacagccggaagtacgccagcaaagccaagaatctggcagacgatatggtgagaaacaccgctagagatctgctgtactacgccgtgacccaggatgccatgctgatcttcgccaacctgagccggggcttcggccggcagggcaagcggaccttcatggccgagagacagtacacacggatggaggactggctgaccgccaagctggcctacgagggcctgagcaagacctacctgtccaagacactggcccagtacacctccaagacatgcagcaactgtgggtttaccatcaccagcgccgactacgacagggtgctggagaagctgaagaagacagcaacaggctggatgaccacaattaacggcaaggagctgaaggtggagggccagattacctactacaacagatacaagagacagaacgtagtcaaggacctgtccgtcgagctggatagactgagcgaagaatctgtgaacaacgacatctcctcctggacaaagggcagaagcggagaagctctgagcctcctgaagaaaagattctcccatagacccgtgcaggagaagttcgtgtgcctgaactgcggcttcgagacacacgcagccgagcaagccgccctgaacatcgccagatcctggctgttcctgcggagccaggagtacaagaaataccagacaaacaagacaaccggcaacaccgataagagagccttcgtcgagacctggcagtccttttaccggaagaagcttaaggaggtgtggaaacctgccgtgcggtctggcggatctggcggaggctccaccagccccaagaaaaagagaaaagtctaagctgccttctgcggggcttgccttctggccatgcccttcttctctcccttgcacctgtacctcttggtctttgaataaagcctgagtaggaaggctagcaaaaaaaaaaaaaaaaaaaaaaaaaaaaaaaaaaaaaaaaaaaaaaaaaaaaaaaaaaaaaaaaaaaaaaaaaaaaaaaa

SEQ ID NO: 12703 - RNA, 5785 nt, synthetic construct
  source 1..5785: mol_type = other RNA
aggaaataagagagaaaagaagagtaagaagaaatataagagccaccatggcccctaagaagaagcgtaaagtgagccggatggaacgcctcgtctacgaggtgcggcagaagtgcagaaacatcgaggacatctgcatctcctgcggatctctgaacgtgaccctggagcacccactgttcatcggcggcatgtgccagaactgtaaaaactgttttctggagtgtgcctatcaatacgacgatgacggctaccagagctactgcaccatctgttgcggcggaagagaggtgctgatgtgtggaaataacaactgctgccggtgcttctgcgtggaatgcgtggacctgctggtgggccccggcgccgcccaggccgctattaaggaagatccttggaactgctacatgtgcggccacaagggcacatacggcctgctgagacggagagaggactggcctagcagactgcagatgttcttcgccaataaccacgaccaggagttcgacccccctaaggtgtaccctcccgtccccgccgagaagagaaagcccatccgggtcctgagcctgttcgatggcatcgccaccggtctgctggtgctgaaggacctgggcatccaggtggataggtacattgcctccgaggtgtgcgaggactccatcaccgtgggaatggtgcgtcatcagggcaagatcatgtacgtgggcgacgtgcggagcgtgacacagaagcatatccaggagtggggccctttcgacctggtgatcggcggcagcccttgcaatgacctgagcatcgtgaacccagcccggaagggcctgtacgagggaaccggcagactgttcttcgagttttacagactgctgcacgacgcccggcctaaggaaggcgacgaccggcccttcttttggctgttcgagaatgtggtggccatgggagtcagcgacaagcgggatattagccggttcctggagagcaaccccgtgatgatcgatgccaaggaagtgagcgccgcccaccgggccagatacttctggggcaatctgcctggcatgaacagacccctggccagcaccgtgaacgacaagctggagctgcaggagtgcctggagcacggccggatcgccaagttcagcaaggtgagaaccatcaccacccgaagcaacagcatcaaacaaggcaaggaccagcactttcctgtgttcatgaacgagaaggaggacatcctgtggtgtaccgagatggagagagtgttcgggttcccagtccactacacagatgtcagcaacatgtctagactggccagacagagactgctgggaagaagctggtccgtccctgtgatcagacacctgttcgcccctctgaaggagtacttcgcctgcgtgagcagcggcaacagcaacgccaacagccggggccccagcttctctagcggcctggtgccactgtccctgagagggagccacatgggccccatggagatctacaaaaccgtgagcgcctggaagcggcagcctgtgcgcgtgctgagcctgtttcggaatatcgataaagtcctgaaaagcctgggattcctggagagcggctctggctccggcggtggcaccctgaagtacgtggaggatgtgacaaacgtggtcagacgggatgtggagaagtggggccccttcgatctggtgtacggcagcacccaacccctgggcagctcttgtgaccggtgccctggctggtacatgtttcagttccaccggatcctgcagtacgccctgccgagacaggagtcccagcggccattcttttggattttcatggacaacttgctgctgaccgaggatgaccaggaaactaccactcggttcctgcagaccgaagccgtgaccctgcaggacgtgagaggccgggactaccagaacgccatgcgggtgtggtccaacatccctggactgaaaagcaagcacgcacctctgacccctaaagaagaggagtacctgcaggcccaggtgcggagcagaagcaagctggacgcccctaaggtggatctgctggtgaagaattgcctcctgcccctgagagagtacttcaagtatttcagccagaatagtctgcccctgggaggcagcggcggcggccaggagcaggtgagcttcaaggacgtgtgcgtggacttcacccaggaggagtggtacctgctggaccccgcccagaagatcctgtacagggacgtgatcctggagaactacagccacctggtgagcgtgggcaactgcatcaccaagcccgaggtgatcttcaagatcgagcagggcgaggagccctggatcctggaggagaggttccccaagcagtggcacagcggcaagagctacaagtacggcggcccaagcagcggcgcccctcctcccagcggcggcagcccagccggctccccaacctctaccgaggagggcacctctgagtccgccacccccgagagcggccctggcacctccaccgagcccagcgagggcagcgcacccggcagccctgccggcagccccacctccacagaggagggaaccagcaccgagcccagcgaaggcagcgccccaggcaccagcaccgagcctagtgagcaggagattaaacggatcaacaagatcagaagaagacttgtgaaagacagcaacaccaagaaggccggcaagacaggccccatgaaaaccctgctggttagagtgatgacacccgatctgagagagcggctggaaaacctgagaaagaagcctgaaaatatcccccagcccatcagcaatacatctagagccaacctgaataagctgctgaccgattacaccgaaatgaagaaggcgatcctgcatgtgtactgggaagagttccagaaggaccctgtgggcctgatgagccgggtggcccagcctgccagcaagaagatcgatcagaacaagctgaaacctgagatggacgagaagggcaacctgaccaccgccggctttgcctgctctcagtgtggccagcccctgttcgtgtacaagctggagcaggtgtctgagaagggcaaggcttacaccaactacttcggacggtgcaatgtggccgagcacgaaaagctgatcctgctggcccagctgaagcccgagaaggatagcgacgaagccgtgacatatagcctgggaaagtttgggcagagggccctggatttctacagcattcatgtgaccaaggagtccacccaccccgtgaagcccctggcccagatcgccggaaacagatacgcctccggacctgtgggaaaggccctgagcgacgcatgtatgggcacaatcgcctccttcctgtctaagtaccaggacatcatcatcgaacaccagaaggtggtgaagggcaaccagaagagactggagagcctgcgggagctggccggcaaggaaaacctggaataccctagcgtgaccctgccacctcagcctcacaccaaggagggcgttgatgcctacaacgaagtgatcgcccgggtgcgaatgtgggtgaacctgaacctgtggcagaagctgaagctaagcagagatgatgccaagcctctgctgagactgaagggattcccttcctttcctctggtcgagagacaggccaacgaagtggactggtgggacatggtgtgtaacgtgaagaagctgatcaacgagaaaaaggaggatggcaaggtgttttggcagaatctggctggctacaagagacaggaagccctgagaccatacctgagcagcgaggaagatcggaagaagggaaagaaattcgctcggtaccagctgggcgacctgctgctgcacctggaaaagaagcacggcgaggactggggaaaggtgtacgacgaggcctgggagcggattgacaagaaagtggaaggcctgagcaagcacatcaagctggaagaggaacggagaagcgaggacgcccagagcaaggccgccctgaccgactggctgcgggctaaggccagcttcgtgatcgagggcctgaaggaggccgacaaggacgagttctgcagatgcgagctgaagctgcagaagtggtacggggacctgcggggaaagcccttcgccatcgaagccgagaacagcatcctggacatcagcggcttcagcaagcagtacaactgtgccttcatctggcagaaggacggcgtgaagaagctgaacctgtacctgatcatcaactacttcaagggcggcaagctgcggttcaagaagatcaaacctgaagccttcgaagccaacagattctacaccgtgatcaacaaaaagagcggcgagatcgtgcccatggaggtgaacttcaacttcgacgaccccaacctgatcatcctgcctctggcctttggcaagagacagggcagagaattcatctggaacgacctgctgtccctggaaaccggcagcctgaagctggccaacggaagagtgatcgagaagacactgtacaacagaagaacccggcaggatgagcctgccctgttcgtggccctgaccttcgagcggcgggaggtcctggactcctccaatatcaaaccaatgaacctgatcggcgtggcaagaggcgaaaacatccccgccgtgatcgccctgaccgaccccgagggctgcccactgagccggtttaaggatagcctgggaaacccaacccacatcctgagaatcggcgagagctataaggagaagcagcggaccatccaggccaagaaggaggtggagcagcggagagccggcggctacagccggaagtacgccagcaaagccaagaatctggcagacgatatggtgagaaacaccgctagagatctgctgtactacgccgtgacccaggatgccatgctgatcttcgccaacctgagccggggcttcggccggcagggcaagcggaccttcatggccgagagacagtacacacggatggaggactggctgaccgccaagctggcctacgagggcctgagcaagacctacctgtccaagacactggcccagtacacctccaagacatgcagcaactgtgggtttaccatcaccagcgccgactacgacagggtgctggagaagctgaagaagacagcaacaggctggatgaccacaattaacggcaaggagctgaaggtggagggccagattacctactacaacagatacaagagacagaacgtagtcaaggacctgtccgtcgagctggatagactgagcgaagaatctgtgaacaacgacatctcctcctggacaaagggcagaagcggagaagctctgagcctcctgaagaaaagattctcccatagacccgtgcaggagaagttcgtgtgcctgaactgcggcttcgagacacacgcagccgagcaagccgccctgaacatcgccagatcctggctgttcctgcggagccaggagtacaagaaataccagacaaacaagacaaccggcaacaccgataagagagccttcgtcgagacctggcagtccttttaccggaagaagcttaaggaggtgtggaaacctgccgtgcggtctggcggatctggcggaggctccaccagccccaagaaaaagagaaaagtctaagctgccttctgcggggcttgccttctggccatgcccttcttctctcccttgcacctgtacctcttggtctttgaataaagcctgagtaggaaggctagcaaaaaaaaaaaaaaaaaaaaaaaaaaaaaaaaaaaaaaaaaaaaaaaaaaaaaaaaaaaaaaaaaaaaaaaaaaaaaaaa

SEQ ID NO: 12704 - RNA, 5785 nt, synthetic construct
  source 1..5785: mol_type = other RNA
aggaaataagagagaaaagaagagtaagaagaaatataagagccaccatggcccctaagaagaagcgtaaagtgagccggatggaacgcctcgtctacgaggtgcggcagaagtgcagaaacatcgaggacatctgcatctcctgcggatctctgaacgtgaccctggagcacccactgttcatcggcggcatgtgccagaactgtaaaaactgttttctggagtgtgcctatcaatacgacgatgacggctaccagagctactgcaccatctgttgcggcggaagagaggtgctgatgtgtggaaataacaactgctgccggtgcttctgcgtggaatgcgtggacctgctggtgggccccggcgccgcccaggccgctattaaggaagatccttggaactgctacatgtgcggccacaagggcacatacggcctgctgagacggagagaggactggcctagcagactgcagatgttcttcgccaataaccacgaccaggagttcgacccccctaaggtgtaccctcccgtccccgccgagaagagaaagcccatccgggtcctgagcctgttcgatggcatcgccaccggtctgctggtgctgaaggacctgggcatccaggtggataggtacattgcctccgaggtgtgcgaggactccatcaccgtgggaatggtgcgtcatcagggcaagatcatgtacgtgggcgacgtgcggagcgtgacacagaagcatatccaggagtggggccctttcgacctggtgatcggcggcagcccttgcaatgacctgagcatcgtgaacccagcccggaagggcctgtacgagggaaccggcagactgttcttcgagttttacagactgctgcacgacgcccggcctaaggaaggcgacgaccggcccttcttttggctgttcgagaatgtggtggccatgggagtcagcgacaagcgggatattagccggttcctggagagcaaccccgtgatgatcgatgccaaggaagtgagcgccgcccaccgggccagatacttctggggcaatctgcctggcatgaacagacccctggccagcaccgtgaacgacaagctggagctgcaggagtgcctggagcacggccggatcgccaagttcagcaaggtgagaaccatcaccacccgaagcaacagcatcaaacaaggcaaggaccagcactttcctgtgttcatgaacgagaaggaggacatcctgtggtgtaccgagatggagagagtgttcgggttcccagtccactacacagatgtcagcaacatgtctagactggccagacagagactgctgggaagaagctggtccgtccctgtgatcagacacctgttcgcccctctgaaggagtacttcgcctgcgtgagcagcggcaacagcaacgccaacagccggggccccagcttctctagcggcctggtgccactgtccctgagagggagccacatgggccccatggagatctacaaaaccgtgagcgcctggaagcggcagcctgtgcgcgtgctgagcctgtttcggaatatcgataaagtcctgaaaagcctgggattcctggagagcggctctggctccggcggtggcaccctgaagtacgtggaggatgtgacaaacgtggtcagacgggatgtggagaagtggggccccttcgatctggtgtacggcagcacccaacccctgggcagctcttgtgaccggtgccctggctggtacatgtttcagttccaccggatcctgcagtacgccctgccgagacaggagtcccagcggccattcttttggattttcatggacaacttgctgctgaccgaggatgaccaggaaactaccactcggttcctgcagaccgaagccgtgaccctgcaggacgtgagaggccgggactaccagaacgccatgcgggtgtggtccaacatccctggactgaaaagcaagcacgcacctctgacccctaaagaagaggagtacctgcaggcccaggtgcggagcagaagcaagctggacgcccctaaggtggatctgctggtgaagaattgcctcctgcccctgagagagtacttcaagtatttcagccagaatagtctgcccctgggaggcagcggcggcggcttcctgccccaggtgaccttcgaggacgtggccatctacttcagcagggaggagtgggacgagctgagcgagtggcagagggagctgtaccaggccgtgatgatggagaactacgaggccgtgctgagcctgggcaagaacgacttcatcgcccagtgcacctggggcctgagggagggcgagaagagggccagcggcaagagcgagaaggccaggaacaggcccgtgagcaacctgtggaggggcggcccaagcagcggcgcccctcctcccagcggcggcagcccagccggctccccaacctctaccgaggagggcacctctgagtccgccacccccgagagcggccctggcacctccaccgagcccagcgagggcagcgcacccggcagccctgccggcagccccacctccacagaggagggaaccagcaccgagcccagcgaaggcagcgccccaggcaccagcaccgagcctagtgagcaggagattaaacggatcaacaagatcagaagaagacttgtgaaagacagcaacaccaagaaggccggcaagacaggccccatgaaaaccctgctggttagagtgatgacacccgatctgagagagcggctggaaaacctgagaaagaagcctgaaaatatcccccagcccatcagcaatacatctagagccaacctgaataagctgctgaccgattacaccgaaatgaagaaggcgatcctgcatgtgtactgggaagagttccagaaggaccctgtgggcctgatgagccgggtggcccagcctgccagcaagaagatcgatcagaacaagctgaaacctgagatggacgagaagggcaacctgaccaccgccggctttgcctgctctcagtgtggccagcccctgttcgtgtacaagctggagcaggtgtctgagaagggcaaggcttacaccaactacttcggacggtgcaatgtggccgagcacgaaaagctgatcctgctggcccagctgaagcccgagaaggatagcgacgaagccgtgacatatagcctgggaaagtttgggcagagggccctggatttctacagcattcatgtgaccaaggagtccacccaccccgtgaagcccctggcccagatcgccggaaacagatacgcctccggacctgtgggaaaggccctgagcgacgcatgtatgggcacaatcgcctccttcctgtctaagtaccaggacatcatcatcgaacaccagaaggtggtgaagggcaaccagaagagactggagagcctgcgggagctggccggcaaggaaaacctggaataccctagcgtgaccctgccacctcagcctcacaccaaggagggcgttgatgcctacaacgaagtgatcgcccgggtgcgaatgtgggtgaacctgaacctgtggcagaagctgaagctaagcagagatgatgccaagcctctgctgagactgaagggattcccttcctttcctctggtcgagagacaggccaacgaagtggactggtgggacatggtgtgtaacgtgaagaagctgatcaacgagaaaaaggaggatggcaaggtgttttggcagaatctggctggctacaagagacaggaagccctgagaccatacctgagcagcgaggaagatcggaagaagggaaagaaattcgctcggtaccagctgggcgacctgctgctgcacctggaaaagaagcacggcgaggactggggaaaggtgtacgacgaggcctgggagcggattgacaagaaagtggaaggcctgagcaagcacatcaagctggaagaggaacggagaagcgaggacgcccagagcaaggccgccctgaccgactggctgcgggctaaggccagcttcgtgatcgagggcctgaaggaggccgacaaggacgagttctgcagatgcgagctgaagctgcagaagtggtacggggacctgcggggaaagcccttcgccatcgaagccgagaacagcatcctggacatcagcggcttcagcaagcagtacaactgtgccttcatctggcagaaggacggcgtgaagaagctgaacctgtacctgatcatcaactacttcaagggcggcaagctgcggttcaagaagatcaaacctgaagccttcgaagccaacagattctacaccgtgatcaacaaaaagagcggcgagatcgtgcccatggaggtgaacttcaacttcgacgaccccaacctgatcatcctgcctctggcctttggcaagagacagggcagagaattcatctggaacgacctgctgtccctggaaaccggcagcctgaagctggccaacggaagagtgatcgagaagacactgtacaacagaagaacccggcaggatgagcctgccctgttcgtggccctgaccttcgagcggcgggaggtcctggactcctccaatatcaaaccaatgaacctgatcggcgtggcaagaggcgaaaacatccccgccgtgatcgccctgaccgaccccgagggctgcccactgagccggtttaaggatagcctgggaaacccaacccacatcctgagaatcggcgagagctataaggagaagcagcggaccatccaggccaagaaggaggtggagcagcggagagccggcggctacagccggaagtacgccagcaaagccaagaatctggcagacgatatggtgagaaacaccgctagagatctgctgtactacgccgtgacccaggatgccatgctgatcttcgccaacctgagccggggcttcggccggcagggcaagcggaccttcatggccgagagacagtacacacggatggaggactggctgaccgccaagctggcctacgagggcctgagcaagacctacctgtccaagacactggcccagtacacctccaagacatgcagcaactgtgggtttaccatcaccagcgccgactacgacagggtgctggagaagctgaagaagacagcaacaggctggatgaccacaattaacggcaaggagctgaaggtggagggccagattacctactacaacagatacaagagacagaacgtagtcaaggacctgtccgtcgagctggatagactgagcgaagaatctgtgaacaacgacatctcctcctggacaaagggcagaagcggagaagctctgagcctcctgaagaaaagattctcccatagacccgtgcaggagaagttcgtgtgcctgaactgcggcttcgagacacacgcagccgagcaagccgccctgaacatcgccagatcctggctgttcctgcggagccaggagtacaagaaataccagacaaacaagacaaccggcaacaccgataagagagccttcgtcgagacctggcagtccttttaccggaagaagcttaaggaggtgtggaaacctgccgtgcggtctggcggatctggcggaggctccaccagccccaagaaaaagagaaaagtctaagctgccttctgcggggcttgccttctggccatgcccttcttctctcccttgcacctgtacctcttggtctttgaataaagcctgagtaggaaggctagcaaaaaaaaaaaaaaaaaaaaaaaaaaaaaaaaaaaaaaaaaaaaaaaaaaaaaaaaaaaaaaaaaaaaaaaaaaaaaaaa

SEQ ID NO: 12705 - RNA, 5785 nt, synthetic construct
  source 1..5785: mol_type = other RNA
aggaaataagagagaaaagaagagtaagaagaaatataagagccaccatggcccctaagaagaagcgtaaagtgagccggatggaacgcctcgtctacgaggtgcggcagaagtgcagaaacatcgaggacatctgcatctcctgcggatctctgaacgtgaccctggagcacccactgttcatcggcggcatgtgccagaactgtaaaaactgttttctggagtgtgcctatcaatacgacgatgacggctaccagagctactgcaccatctgttgcggcggaagagaggtgctgatgtgtggaaataacaactgctgccggtgcttctgcgtggaatgcgtggacctgctggtgggccccggcgccgcccaggccgctattaaggaagatccttggaactgctacatgtgcggccacaagggcacatacggcctgctgagacggagagaggactggcctagcagactgcagatgttcttcgccaataaccacgaccaggagttcgacccccctaaggtgtaccctcccgtccccgccgagaagagaaagcccatccgggtcctgagcctgttcgatggcatcgccaccggtctgctggtgctgaaggacctgggcatccaggtggataggtacattgcctccgaggtgtgcgaggactccatcaccgtgggaatggtgcgtcatcagggcaagatcatgtacgtgggcgacgtgcggagcgtgacacagaagcatatccaggagtggggccctttcgacctggtgatcggcggcagcccttgcaatgacctgagcatcgtgaacccagcccggaagggcctgtacgagggaaccggcagactgttcttcgagttttacagactgctgcacgacgcccggcctaaggaaggcgacgaccggcccttcttttggctgttcgagaatgtggtggccatgggagtcagcgacaagcgggatattagccggttcctggagagcaaccccgtgatgatcgatgccaaggaagtgagcgccgcccaccgggccagatacttctggggcaatctgcctggcatgaacagacccctggccagcaccgtgaacgacaagctggagctgcaggagtgcctggagcacggccggatcgccaagttcagcaaggtgagaaccatcaccacccgaagcaacagcatcaaacaaggcaaggaccagcactttcctgtgttcatgaacgagaaggaggacatcctgtggtgtaccgagatggagagagtgttcgggttcccagtccactacacagatgtcagcaacatgtctagactggccagacagagactgctgggaagaagctggtccgtccctgtgatcagacacctgttcgcccctctgaaggagtacttcgcctgcgtgagcagcggcaacagcaacgccaacagccggggccccagcttctctagcggcctggtgccactgtccctgagagggagccacatgggccccatggagatctacaaaaccgtgagcgcctggaagcggcagcctgtgcgcgtgctgagcctgtttcggaatatcgataaagtcctgaaaagcctgggattcctggagagcggctctggctccggcggtggcaccctgaagtacgtggaggatgtgacaaacgtggtcagacgggatgtggagaagtggggccccttcgatctggtgtacggcagcacccaacccctgggcagctcttgtgaccggtgccctggctggtacatgtttcagttccaccggatcctgcagtacgccctgccgagacaggagtcccagcggccattcttttggattttcatggacaacttgctgctgaccgaggatgaccaggaaactaccactcggttcctgcagaccgaagccgtgaccctgcaggacgtgagaggccgggactaccagaacgccatgcgggtgtggtccaacatccctggactgaaaagcaagcacgcacctctgacccctaaagaagaggagtacctgcaggcccaggtgcggagcagaagcaagctggacgcccctaaggtggatctgctggtgaagaattgcctcctgcccctgagagagtacttcaagtatttcagccagaatagtctgcccctgggaggcagcggcggcggcagccaggagcccgtgaccttcgccgacgtggccgtggtgttcacccccgaggagtgggtgttcctggacagcacccagaggagcctgtacagggacgtgatgctggagaactacaggaacctggccagcgtggccgaccagctgtgcaagcccaacgccctgagctacctggaggagaggggcgagcagtggaccaccgacaggggcgtgctgcccgacacctgcgccgagccccagtgccagggcggcccaagcagcggcgcccctcctcccagcggcggcagcccagccggctccccaacctctaccgaggagggcacctctgagtccgccacccccgagagcggccctggcacctccaccgagcccagcgagggcagcgcacccggcagccctgccggcagccccacctccacagaggagggaaccagcaccgagcccagcgaaggcagcgccccaggcaccagcaccgagcctagtgagcaggagattaaacggatcaacaagatcagaagaagacttgtgaaagacagcaacaccaagaaggccggcaagacaggccccatgaaaaccctgctggttagagtgatgacacccgatctgagagagcggctggaaaacctgagaaagaagcctgaaaatatcccccagcccatcagcaatacatctagagccaacctgaataagctgctgaccgattacaccgaaatgaagaaggcgatcctgcatgtgtactgggaagagttccagaaggaccctgtgggcctgatgagccgggtggcccagcctgccagcaagaagatcgatcagaacaagctgaaacctgagatggacgagaagggcaacctgaccaccgccggctttgcctgctctcagtgtggccagcccctgttcgtgtacaagctggagcaggtgtctgagaagggcaaggcttacaccaactacttcggacggtgcaatgtggccgagcacgaaaagctgatcctgctggcccagctgaagcccgagaaggatagcgacgaagccgtgacatatagcctgggaaagtttgggcagagggccctggatttctacagcattcatgtgaccaaggagtccacccaccccgtgaagcccctggcccagatcgccggaaacagatacgcctccggacctgtgggaaaggccctgagcgacgcatgtatgggcacaatcgcctccttcctgtctaagtaccaggacatcatcatcgaacaccagaaggtggtgaagggcaaccagaagagactggagagcctgcgggagctggccggcaaggaaaacctggaataccctagcgtgaccctgccacctcagcctcacaccaaggagggcgttgatgcctacaacgaagtgatcgcccgggtgcgaatgtgggtgaacctgaacctgtggcagaagctgaagctaagcagagatgatgccaagcctctgctgagactgaagggattcccttcctttcctctggtcgagagacaggccaacgaagtggactggtgggacatggtgtgtaacgtgaagaagctgatcaacgagaaaaaggaggatggcaaggtgttttggcagaatctggctggctacaagagacaggaagccctgagaccatacctgagcagcgaggaagatcggaagaagggaaagaaattcgctcggtaccagctgggcgacctgctgctgcacctggaaaagaagcacggcgaggactggggaaaggtgtacgacgaggcctgggagcggattgacaagaaagtggaaggcctgagcaagcacatcaagctggaagaggaacggagaagcgaggacgcccagagcaaggccgccctgaccgactggctgcgggctaaggccagcttcgtgatcgagggcctgaaggaggccgacaaggacgagttctgcagatgcgagctgaagctgcagaagtggtacggggacctgcggggaaagcccttcgccatcgaagccgagaacagcatcctggacatcagcggcttcagcaagcagtacaactgtgccttcatctggcagaaggacggcgtgaagaagctgaacctgtacctgatcatcaactacttcaagggcggcaagctgcggttcaagaagatcaaacctgaagccttcgaagccaacagattctacaccgtgatcaacaaaaagagcggcgagatcgtgcccatggaggtgaacttcaacttcgacgaccccaacctgatcatcctgcctctggcctttggcaagagacagggcagagaattcatctggaacgacctgctgtccctggaaaccggcagcctgaagctggccaacggaagagtgatcgagaagacactgtacaacagaagaacccggcaggatgagcctgccctgttcgtggccctgaccttcgagcggcgggaggtcctggactcctccaatatcaaaccaatgaacctgatcggcgtggcaagaggcgaaaacatccccgccgtgatcgccctgaccgaccccgagggctgcccactgagccggtttaaggatagcctgggaaacccaacccacatcctgagaatcggcgagagctataaggagaagcagcggaccatccaggccaagaaggaggtggagcagcggagagccggcggctacagccggaagtacgccagcaaagccaagaatctggcagacgatatggtgagaaacaccgctagagatctgctgtactacgccgtgacccaggatgccatgctgatcttcgccaacctgagccggggcttcggccggcagggcaagcggaccttcatggccgagagacagtacacacggatggaggactggctgaccgccaagctggcctacgagggcctgagcaagacctacctgtccaagacactggcccagtacacctccaagacatgcagcaactgtgggtttaccatcaccagcgccgactacgacagggtgctggagaagctgaagaagacagcaacaggctggatgaccacaattaacggcaaggagctgaaggtggagggccagattacctactacaacagatacaagagacagaacgtagtcaaggacctgtccgtcgagctggatagactgagcgaagaatctgtgaacaacgacatctcctcctggacaaagggcagaagcggagaagctctgagcctcctgaagaaaagattctcccatagacccgtgcaggagaagttcgtgtgcctgaactgcggcttcgagacacacgcagccgagcaagccgccctgaacatcgccagatcctggctgttcctgcggagccaggagtacaagaaataccagacaaacaagacaaccggcaacaccgataagagagccttcgtcgagacctggcagtccttttaccggaagaagcttaaggaggtgtggaaacctgccgtgcggtctggcggatctggcggaggctccaccagccccaagaaaaagagaaaagtctaagctgccttctgcggggcttgccttctggccatgcccttcttctctcccttgcacctgtacctcttggtctttgaataaagcctgagtaggaaggctagcaaaaaaaaaaaaaaaaaaaaaaaaaaaaaaaaaaaaaaaaaaaaaaaaaaaaaaaaaaaaaaaaaaaaaaaaaaaaaaaa

SEQ ID NO: 12706 - RNA, 5785 nt, synthetic construct
  source 1..5785: mol_type = other RNA
aggaaataagagagaaaagaagagtaagaagaaatataagagccaccatggcccctaagaagaagcgtaaagtgagccggatggaacgcctcgtctacgaggtgcggcagaagtgcagaaacatcgaggacatctgcatctcctgcggatctctgaacgtgaccctggagcacccactgttcatcggcggcatgtgccagaactgtaaaaactgttttctggagtgtgcctatcaatacgacgatgacggctaccagagctactgcaccatctgttgcggcggaagagaggtgctgatgtgtggaaataacaactgctgccggtgcttctgcgtggaatgcgtggacctgctggtgggccccggcgccgcccaggccgctattaaggaagatccttggaactgctacatgtgcggccacaagggcacatacggcctgctgagacggagagaggactggcctagcagactgcagatgttcttcgccaataaccacgaccaggagttcgacccccctaaggtgtaccctcccgtccccgccgagaagagaaagcccatccgggtcctgagcctgttcgatggcatcgccaccggtctgctggtgctgaaggacctgggcatccaggtggataggtacattgcctccgaggtgtgcgaggactccatcaccgtgggaatggtgcgtcatcagggcaagatcatgtacgtgggcgacgtgcggagcgtgacacagaagcatatccaggagtggggccctttcgacctggtgatcggcggcagcccttgcaatgacctgagcatcgtgaacccagcccggaagggcctgtacgagggaaccggcagactgttcttcgagttttacagactgctgcacgacgcccggcctaaggaaggcgacgaccggcccttcttttggctgttcgagaatgtggtggccatgggagtcagcgacaagcgggatattagccggttcctggagagcaaccccgtgatgatcgatgccaaggaagtgagcgccgcccaccgggccagatacttctggggcaatctgcctggcatgaacagacccctggccagcaccgtgaacgacaagctggagctgcaggagtgcctggagcacggccggatcgccaagttcagcaaggtgagaaccatcaccacccgaagcaacagcatcaaacaaggcaaggaccagcactttcctgtgttcatgaacgagaaggaggacatcctgtggtgtaccgagatggagagagtgttcgggttcccagtccactacacagatgtcagcaacatgtctagactggccagacagagactgctgggaagaagctggtccgtccctgtgatcagacacctgttcgcccctctgaaggagtacttcgcctgcgtgagcagcggcaacagcaacgccaacagccggggccccagcttctctagcggcctggtgccactgtccctgagagggagccacatgggccccatggagatctacaaaaccgtgagcgcctggaagcggcagcctgtgcgcgtgctgagcctgtttcggaatatcgataaagtcctgaaaagcctgggattcctggagagcggctctggctccggcggtggcaccctgaagtacgtggaggatgtgacaaacgtggtcagacgggatgtggagaagtggggccccttcgatctggtgtacggcagcacccaacccctgggcagctcttgtgaccggtgccctggctggtacatgtttcagttccaccggatcctgcagtacgccctgccgagacaggagtcccagcggccattcttttggattttcatggacaacttgctgctgaccgaggatgaccaggaaactaccactcggttcctgcagaccgaagccgtgaccctgcaggacgtgagaggccgggactaccagaacgccatgcgggtgtggtccaacatccctggactgaaaagcaagcacgcacctctgacccctaaagaagaggagtacctgcaggcccaggtgcggagcagaagcaagctggacgcccctaaggtggatctgctggtgaagaattgcctcctgcccctgagagagtacttcaagtatttcagccagaatagtctgcccctgggaggcagcggcggcggcttccagatgcccgtgaccttcgaggaggtggccgtgtacttcacccagggccagggcgccctgctggaccccgcccagagggccctgtacagggacgtgatgcaggagaactacgagatggtgaccagcctgggcttccccatccccaagcccgagctgatcgccaggctggagaggggcgaggagccctgggtgcccgacctgcaggcctgcaaggagaggaggctgcccaggtgcaccaggggcggcccaagcagcggcgcccctcctcccagcggcggcagcccagccggctccccaacctctaccgaggagggcacctctgagtccgccacccccgagagcggccctggcacctccaccgagcccagcgagggcagcgcacccggcagccctgccggcagccccacctccacagaggagggaaccagcaccgagcccagcgaaggcagcgccccaggcaccagcaccgagcctagtgagcaggagattaaacggatcaacaagatcagaagaagacttgtgaaagacagcaacaccaagaaggccggcaagacaggccccatgaaaaccctgctggttagagtgatgacacccgatctgagagagcggctggaaaacctgagaaagaagcctgaaaatatcccccagcccatcagcaatacatctagagccaacctgaataagctgctgaccgattacaccgaaatgaagaaggcgatcctgcatgtgtactgggaagagttccagaaggaccctgtgggcctgatgagccgggtggcccagcctgccagcaagaagatcgatcagaacaagctgaaacctgagatggacgagaagggcaacctgaccaccgccggctttgcctgctctcagtgtggccagcccctgttcgtgtacaagctggagcaggtgtctgagaagggcaaggcttacaccaactacttcggacggtgcaatgtggccgagcacgaaaagctgatcctgctggcccagctgaagcccgagaaggatagcgacgaagccgtgacatatagcctgggaaagtttgggcagagggccctggatttctacagcattcatgtgaccaaggagtccacccaccccgtgaagcccctggcccagatcgccggaaacagatacgcctccggacctgtgggaaaggccctgagcgacgcatgtatgggcacaatcgcctccttcctgtctaagtaccaggacatcatcatcgaacaccagaaggtggtgaagggcaaccagaagagactggagagcctgcgggagctggccggcaaggaaaacctggaataccctagcgtgaccctgccacctcagcctcacaccaaggagggcgttgatgcctacaacgaagtgatcgcccgggtgcgaatgtgggtgaacctgaacctgtggcagaagctgaagctaagcagagatgatgccaagcctctgctgagactgaagggattcccttcctttcctctggtcgagagacaggccaacgaagtggactggtgggacatggtgtgtaacgtgaagaagctgatcaacgagaaaaaggaggatggcaaggtgttttggcagaatctggctggctacaagagacaggaagccctgagaccatacctgagcagcgaggaagatcggaagaagggaaagaaattcgctcggtaccagctgggcgacctgctgctgcacctggaaaagaagcacggcgaggactggggaaaggtgtacgacgaggcctgggagcggattgacaagaaagtggaaggcctgagcaagcacatcaagctggaagaggaacggagaagcgaggacgcccagagcaaggccgccctgaccgactggctgcgggctaaggccagcttcgtgatcgagggcctgaaggaggccgacaaggacgagttctgcagatgcgagctgaagctgcagaagtggtacggggacctgcggggaaagcccttcgccatcgaagccgagaacagcatcctggacatcagcggcttcagcaagcagtacaactgtgccttcatctggcagaaggacggcgtgaagaagctgaacctgtacctgatcatcaactacttcaagggcggcaagctgcggttcaagaagatcaaacctgaagccttcgaagccaacagattctacaccgtgatcaacaaaaagagcggcgagatcgtgcccatggaggtgaacttcaacttcgacgaccccaacctgatcatcctgcctctggcctttggcaagagacagggcagagaattcatctggaacgacctgctgtccctggaaaccggcagcctgaagctggccaacggaagagtgatcgagaagacactgtacaacagaagaacccggcaggatgagcctgccctgttcgtggccctgaccttcgagcggcgggaggtcctggactcctccaatatcaaaccaatgaacctgatcggcgtggcaagaggcgaaaacatccccgccgtgatcgccctgaccgaccccgagggctgcccactgagccggtttaaggatagcctgggaaacccaacccacatcctgagaatcggcgagagctataaggagaagcagcggaccatccaggccaagaaggaggtggagcagcggagagccggcggctacagccggaagtacgccagcaaagccaagaatctggcagacgatatggtgagaaacaccgctagagatctgctgtactacgccgtgacccaggatgccatgctgatcttcgccaacctgagccggggcttcggccggcagggcaagcggaccttcatggccgagagacagtacacacggatggaggactggctgaccgccaagctggcctacgagggcctgagcaagacctacctgtccaagacactggcccagtacacctccaagacatgcagcaactgtgggtttaccatcaccagcgccgactacgacagggtgctggagaagctgaagaagacagcaacaggctggatgaccacaattaacggcaaggagctgaaggtggagggccagattacctactacaacagatacaagagacagaacgtagtcaaggacctgtccgtcgagctggatagactgagcgaagaatctgtgaacaacgacatctcctcctggacaaagggcagaagcggagaagctctgagcctcctgaagaaaagattctcccatagacccgtgcaggagaagttcgtgtgcctgaactgcggcttcgagacacacgcagccgagcaagccgccctgaacatcgccagatcctggctgttcctgcggagccaggagtacaagaaataccagacaaacaagacaaccggcaacaccgataagagagccttcgtcgagacctggcagtccttttaccggaagaagcttaaggaggtgtggaaacctgccgtgcggtctggcggatctggcggaggctccaccagccccaagaaaaagagaaaagtctaagctgccttctgcggggcttgccttctggccatgcccttcttctctcccttgcacctgtacctcttggtctttgaataaagcctgagtaggaaggctagcaaaaaaaaaaaaaaaaaaaaaaaaaaaaaaaaaaaaaaaaaaaaaaaaaaaaaaaaaaaaaaaaaaaaaaaaaaaaaaaa

SEQ ID NO: 12707 - RNA, 5785 nt, synthetic construct
  source 1..5785: mol_type = other RNA
aggaaataagagagaaaagaagagtaagaagaaatataagagccaccatggcccctaagaagaagcgtaaagtgagccggatggaacgcctcgtctacgaggtgcggcagaagtgcagaaacatcgaggacatctgcatctcctgcggatctctgaacgtgaccctggagcacccactgttcatcggcggcatgtgccagaactgtaaaaactgttttctggagtgtgcctatcaatacgacgatgacggctaccagagctactgcaccatctgttgcggcggaagagaggtgctgatgtgtggaaataacaactgctgccggtgcttctgcgtggaatgcgtggacctgctggtgggccccggcgccgcccaggccgctattaaggaagatccttggaactgctacatgtgcggccacaagggcacatacggcctgctgagacggagagaggactggcctagcagactgcagatgttcttcgccaataaccacgaccaggagttcgacccccctaaggtgtaccctcccgtccccgccgagaagagaaagcccatccgggtcctgagcctgttcgatggcatcgccaccggtctgctggtgctgaaggacctgggcatccaggtggataggtacattgcctccgaggtgtgcgaggactccatcaccgtgggaatggtgcgtcatcagggcaagatcatgtacgtgggcgacgtgcggagcgtgacacagaagcatatccaggagtggggccctttcgacctggtgatcggcggcagcccttgcaatgacctgagcatcgtgaacccagcccggaagggcctgtacgagggaaccggcagactgttcttcgagttttacagactgctgcacgacgcccggcctaaggaaggcgacgaccggcccttcttttggctgttcgagaatgtggtggccatgggagtcagcgacaagcgggatattagccggttcctggagagcaaccccgtgatgatcgatgccaaggaagtgagcgccgcccaccgggccagatacttctggggcaatctgcctggcatgaacagacccctggccagcaccgtgaacgacaagctggagctgcaggagtgcctggagcacggccggatcgccaagttcagcaaggtgagaaccatcaccacccgaagcaacagcatcaaacaaggcaaggaccagcactttcctgtgttcatgaacgagaaggaggacatcctgtggtgtaccgagatggagagagtgttcgggttcccagtccactacacagatgtcagcaacatgtctagactggccagacagagactgctgggaagaagctggtccgtccctgtgatcagacacctgttcgcccctctgaaggagtacttcgcctgcgtgagcagcggcaacagcaacgccaacagccggggccccagcttctctagcggcctggtgccactgtccctgagagggagccacatgggccccatggagatctacaaaaccgtgagcgcctggaagcggcagcctgtgcgcgtgctgagcctgtttcggaatatcgataaagtcctgaaaagcctgggattcctggagagcggctctggctccggcggtggcaccctgaagtacgtggaggatgtgacaaacgtggtcagacgggatgtggagaagtggggccccttcgatctggtgtacggcagcacccaacccctgggcagctcttgtgaccggtgccctggctggtacatgtttcagttccaccggatcctgcagtacgccctgccgagacaggagtcccagcggccattcttttggattttcatggacaacttgctgctgaccgaggatgaccaggaaactaccactcggttcctgcagaccgaagccgtgaccctgcaggacgtgagaggccgggactaccagaacgccatgcgggtgtggtccaacatccctggactgaaaagcaagcacgcacctctgacccctaaagaagaggagtacctgcaggcccaggtgcggagcagaagcaagctggacgcccctaaggtggatctgctggtgaagaattgcctcctgcccctgagagagtacttcaagtatttcagccagaatagtctgcccctgggaggcagcggcggcggcttccaggagcccgtgaccttcgaggacgtggccgtgtacttcacccagaacgagtgggccagcctgcaccccatgcagagggccctgcacagggaggtgatgctggagaactacgccaacgtgaccagcctgagcgccttccccttccccaagcccgacctgatcttccagctggagcagggcgaggccgcctggggccccgacccctggaccctggccggcggcgagaccctgaggggcatgggcggcccaagcagcggcgcccctcctcccagcggcggcagcccagccggctccccaacctctaccgaggagggcacctctgagtccgccacccccgagagcggccctggcacctccaccgagcccagcgagggcagcgcacccggcagccctgccggcagccccacctccacagaggagggaaccagcaccgagcccagcgaaggcagcgccccaggcaccagcaccgagcctagtgagcaggagattaaacggatcaacaagatcagaagaagacttgtgaaagacagcaacaccaagaaggccggcaagacaggccccatgaaaaccctgctggttagagtgatgacacccgatctgagagagcggctggaaaacctgagaaagaagcctgaaaatatcccccagcccatcagcaatacatctagagccaacctgaataagctgctgaccgattacaccgaaatgaagaaggcgatcctgcatgtgtactgggaagagttccagaaggaccctgtgggcctgatgagccgggtggcccagcctgccagcaagaagatcgatcagaacaagctgaaacctgagatggacgagaagggcaacctgaccaccgccggctttgcctgctctcagtgtggccagcccctgttcgtgtacaagctggagcaggtgtctgagaagggcaaggcttacaccaactacttcggacggtgcaatgtggccgagcacgaaaagctgatcctgctggcccagctgaagcccgagaaggatagcgacgaagccgtgacatatagcctgggaaagtttgggcagagggccctggatttctacagcattcatgtgaccaaggagtccacccaccccgtgaagcccctggcccagatcgccggaaacagatacgcctccggacctgtgggaaaggccctgagcgacgcatgtatgggcacaatcgcctccttcctgtctaagtaccaggacatcatcatcgaacaccagaaggtggtgaagggcaaccagaagagactggagagcctgcgggagctggccggcaaggaaaacctggaataccctagcgtgaccctgccacctcagcctcacaccaaggagggcgttgatgcctacaacgaagtgatcgcccgggtgcgaatgtgggtgaacctgaacctgtggcagaagctgaagctaagcagagatgatgccaagcctctgctgagactgaagggattcccttcctttcctctggtcgagagacaggccaacgaagtggactggtgggacatggtgtgtaacgtgaagaagctgatcaacgagaaaaaggaggatggcaaggtgttttggcagaatctggctggctacaagagacaggaagccctgagaccatacctgagcagcgaggaagatcggaagaagggaaagaaattcgctcggtaccagctgggcgacctgctgctgcacctggaaaagaagcacggcgaggactggggaaaggtgtacgacgaggcctgggagcggattgacaagaaagtggaaggcctgagcaagcacatcaagctggaagaggaacggagaagcgaggacgcccagagcaaggccgccctgaccgactggctgcgggctaaggccagcttcgtgatcgagggcctgaaggaggccgacaaggacgagttctgcagatgcgagctgaagctgcagaagtggtacggggacctgcggggaaagcccttcgccatcgaagccgagaacagcatcctggacatcagcggcttcagcaagcagtacaactgtgccttcatctggcagaaggacggcgtgaagaagctgaacctgtacctgatcatcaactacttcaagggcggcaagctgcggttcaagaagatcaaacctgaagccttcgaagccaacagattctacaccgtgatcaacaaaaagagcggcgagatcgtgcccatggaggtgaacttcaacttcgacgaccccaacctgatcatcctgcctctggcctttggcaagagacagggcagagaattcatctggaacgacctgctgtccctggaaaccggcagcctgaagctggccaacggaagagtgatcgagaagacactgtacaacagaagaacccggcaggatgagcctgccctgttcgtggccctgaccttcgagcggcgggaggtcctggactcctccaatatcaaaccaatgaacctgatcggcgtggcaagaggcgaaaacatccccgccgtgatcgccctgaccgaccccgagggctgcccactgagccggtttaaggatagcctgggaaacccaacccacatcctgagaatcggcgagagctataaggagaagcagcggaccatccaggccaagaaggaggtggagcagcggagagccggcggctacagccggaagtacgccagcaaagccaagaatctggcagacgatatggtgagaaacaccgctagagatctgctgtactacgccgtgacccaggatgccatgctgatcttcgccaacctgagccggggcttcggccggcagggcaagcggaccttcatggccgagagacagtacacacggatggaggactggctgaccgccaagctggcctacgagggcctgagcaagacctacctgtccaagacactggcccagtacacctccaagacatgcagcaactgtgggtttaccatcaccagcgccgactacgacagggtgctggagaagctgaagaagacagcaacaggctggatgaccacaattaacggcaaggagctgaaggtggagggccagattacctactacaacagatacaagagacagaacgtagtcaaggacctgtccgtcgagctggatagactgagcgaagaatctgtgaacaacgacatctcctcctggacaaagggcagaagcggagaagctctgagcctcctgaagaaaagattctcccatagacccgtgcaggagaagttcgtgtgcctgaactgcggcttcgagacacacgcagccgagcaagccgccctgaacatcgccagatcctggctgttcctgcggagccaggagtacaagaaataccagacaaacaagacaaccggcaacaccgataagagagccttcgtcgagacctggcagtccttttaccggaagaagcttaaggaggtgtggaaacctgccgtgcggtctggcggatctggcggaggctccaccagccccaagaaaaagagaaaagtctaagctgccttctgcggggcttgccttctggccatgcccttcttctctcccttgcacctgtacctcttggtctttgaataaagcctgagtaggaaggctagcaaaaaaaaaaaaaaaaaaaaaaaaaaaaaaaaaaaaaaaaaaaaaaaaaaaaaaaaaaaaaaaaaaaaaaaaaaaaaaaa

SEQ ID NO: 12708 - RNA, 5785 nt, synthetic construct
  source 1..5785: mol_type = other RNA
aggaaataagagagaaaagaagagtaagaagaaatataagagccaccatggcccctaagaagaagcgtaaagtgagccggatggaacgcctcgtctacgaggtgcggcagaagtgcagaaacatcgaggacatctgcatctcctgcggatctctgaacgtgaccctggagcacccactgttcatcggcggcatgtgccagaactgtaaaaactgttttctggagtgtgcctatcaatacgacgatgacggctaccagagctactgcaccatctgttgcggcggaagagaggtgctgatgtgtggaaataacaactgctgccggtgcttctgcgtggaatgcgtggacctgctggtgggccccggcgccgcccaggccgctattaaggaagatccttggaactgctacatgtgcggccacaagggcacatacggcctgctgagacggagagaggactggcctagcagactgcagatgttcttcgccaataaccacgaccaggagttcgacccccctaaggtgtaccctcccgtccccgccgagaagagaaagcccatccgggtcctgagcctgttcgatggcatcgccaccggtctgctggtgctgaaggacctgggcatccaggtggataggtacattgcctccgaggtgtgcgaggactccatcaccgtgggaatggtgcgtcatcagggcaagatcatgtacgtgggcgacgtgcggagcgtgacacagaagcatatccaggagtggggccctttcgacctggtgatcggcggcagcccttgcaatgacctgagcatcgtgaacccagcccggaagggcctgtacgagggaaccggcagactgttcttcgagttttacagactgctgcacgacgcccggcctaaggaaggcgacgaccggcccttcttttggctgttcgagaatgtggtggccatgggagtcagcgacaagcgggatattagccggttcctggagagcaaccccgtgatgatcgatgccaaggaagtgagcgccgcccaccgggccagatacttctggggcaatctgcctggcatgaacagacccctggccagcaccgtgaacgacaagctggagctgcaggagtgcctggagcacggccggatcgccaagttcagcaaggtgagaaccatcaccacccgaagcaacagcatcaaacaaggcaaggaccagcactttcctgtgttcatgaacgagaaggaggacatcctgtggtgtaccgagatggagagagtgttcgggttcccagtccactacacagatgtcagcaacatgtctagactggccagacagagactgctgggaagaagctggtccgtccctgtgatcagacacctgttcgcccctctgaaggagtacttcgcctgcgtgagcagcggcaacagcaacgccaacagccggggccccagcttctctagcggcctggtgccactgtccctgagagggagccacatgggccccatggagatctacaaaaccgtgagcgcctggaagcggcagcctgtgcgcgtgctgagcctgtttcggaatatcgataaagtcctgaaaagcctgggattcctggagagcggctctggctccggcggtggcaccctgaagtacgtggaggatgtgacaaacgtggtcagacgggatgtggagaagtggggccccttcgatctggtgtacggcagcacccaacccctgggcagctcttgtgaccggtgccctggctggtacatgtttcagttccaccggatcctgcagtacgccctgccgagacaggagtcccagcggccattcttttggattttcatggacaacttgctgctgaccgaggatgaccaggaaactaccactcggttcctgcagaccgaagccgtgaccctgcaggacgtgagaggccgggactaccagaacgccatgcgggtgtggtccaacatccctggactgaaaagcaagcacgcacctctgacccctaaagaagaggagtacctgcaggcccaggtgcggagcagaagcaagctggacgcccctaaggtggatctgctggtgaagaattgcctcctgcccctgagagagtacttcaagtatttcagccagaatagtctgcccctgggaggcagcggcggcggcatggccctgacccagggccagctgagcttcagcgacgtggccatcgagttcagccaggaggagtggaagtgcctggaccccggccagaaggccctgtacagggacgtgatgctggagaactacaggaacctgatcagcctgggcatctgcctgcccgacctgagcgtgaccagcatcttcttcaccagcggcctgggcagggccaggctgcagggcggcagcctggccagggtgagcagggtgggcggcccaagcagcggcgcccctcctcccagcggcggcagcccagccggctccccaacctctaccgaggagggcacctctgagtccgccacccccgagagcggccctggcacctccaccgagcccagcgagggcagcgcacccggcagccctgccggcagccccacctccacagaggagggaaccagcaccgagcccagcgaaggcagcgccccaggcaccagcaccgagcctagtgagcaggagattaaacggatcaacaagatcagaagaagacttgtgaaagacagcaacaccaagaaggccggcaagacaggccccatgaaaaccctgctggttagagtgatgacacccgatctgagagagcggctggaaaacctgagaaagaagcctgaaaatatcccccagcccatcagcaatacatctagagccaacctgaataagctgctgaccgattacaccgaaatgaagaaggcgatcctgcatgtgtactgggaagagttccagaaggaccctgtgggcctgatgagccgggtggcccagcctgccagcaagaagatcgatcagaacaagctgaaacctgagatggacgagaagggcaacctgaccaccgccggctttgcctgctctcagtgtggccagcccctgttcgtgtacaagctggagcaggtgtctgagaagggcaaggcttacaccaactacttcggacggtgcaatgtggccgagcacgaaaagctgatcctgctggcccagctgaagcccgagaaggatagcgacgaagccgtgacatatagcctgggaaagtttgggcagagggccctggatttctacagcattcatgtgaccaaggagtccacccaccccgtgaagcccctggcccagatcgccggaaacagatacgcctccggacctgtgggaaaggccctgagcgacgcatgtatgggcacaatcgcctccttcctgtctaagtaccaggacatcatcatcgaacaccagaaggtggtgaagggcaaccagaagagactggagagcctgcgggagctggccggcaaggaaaacctggaataccctagcgtgaccctgccacctcagcctcacaccaaggagggcgttgatgcctacaacgaagtgatcgcccgggtgcgaatgtgggtgaacctgaacctgtggcagaagctgaagctaagcagagatgatgccaagcctctgctgagactgaagggattcccttcctttcctctggtcgagagacaggccaacgaagtggactggtgggacatggtgtgtaacgtgaagaagctgatcaacgagaaaaaggaggatggcaaggtgttttggcagaatctggctggctacaagagacaggaagccctgagaccatacctgagcagcgaggaagatcggaagaagggaaagaaattcgctcggtaccagctgggcgacctgctgctgcacctggaaaagaagcacggcgaggactggggaaaggtgtacgacgaggcctgggagcggattgacaagaaagtggaaggcctgagcaagcacatcaagctggaagaggaacggagaagcgaggacgcccagagcaaggccgccctgaccgactggctgcgggctaaggccagcttcgtgatcgagggcctgaaggaggccgacaaggacgagttctgcagatgcgagctgaagctgcagaagtggtacggggacctgcggggaaagcccttcgccatcgaagccgagaacagcatcctggacatcagcggcttcagcaagcagtacaactgtgccttcatctggcagaaggacggcgtgaagaagctgaacctgtacctgatcatcaactacttcaagggcggcaagctgcggttcaagaagatcaaacctgaagccttcgaagccaacagattctacaccgtgatcaacaaaaagagcggcgagatcgtgcccatggaggtgaacttcaacttcgacgaccccaacctgatcatcctgcctctggcctttggcaagagacagggcagagaattcatctggaacgacctgctgtccctggaaaccggcagcctgaagctggccaacggaagagtgatcgagaagacactgtacaacagaagaacccggcaggatgagcctgccctgttcgtggccctgaccttcgagcggcgggaggtcctggactcctccaatatcaaaccaatgaacctgatcggcgtggcaagaggcgaaaacatccccgccgtgatcgccctgaccgaccccgagggctgcccactgagccggtttaaggatagcctgggaaacccaacccacatcctgagaatcggcgagagctataaggagaagcagcggaccatccaggccaagaaggaggtggagcagcggagagccggcggctacagccggaagtacgccagcaaagccaagaatctggcagacgatatggtgagaaacaccgctagagatctgctgtactacgccgtgacccaggatgccatgctgatcttcgccaacctgagccggggcttcggccggcagggcaagcggaccttcatggccgagagacagtacacacggatggaggactggctgaccgccaagctggcctacgagggcctgagcaagacctacctgtccaagacactggcccagtacacctccaagacatgcagcaactgtgggtttaccatcaccagcgccgactacgacagggtgctggagaagctgaagaagacagcaacaggctggatgaccacaattaacggcaaggagctgaaggtggagggccagattacctactacaacagatacaagagacagaacgtagtcaaggacctgtccgtcgagctggatagactgagcgaagaatctgtgaacaacgacatctcctcctggacaaagggcagaagcggagaagctctgagcctcctgaagaaaagattctcccatagacccgtgcaggagaagttcgtgtgcctgaactgcggcttcgagacacacgcagccgagcaagccgccctgaacatcgccagatcctggctgttcctgcggagccaggagtacaagaaataccagacaaacaagacaaccggcaacaccgataagagagccttcgtcgagacctggcagtccttttaccggaagaagcttaaggaggtgtggaaacctgccgtgcggtctggcggatctggcggaggctccaccagccccaagaaaaagagaaaagtctaagctgccttctgcggggcttgccttctggccatgcccttcttctctcccttgcacctgtacctcttggtctttgaataaagcctgagtaggaaggctagcaaaaaaaaaaaaaaaaaaaaaaaaaaaaaaaaaaaaaaaaaaaaaaaaaaaaaaaaaaaaaaaaaaaaaaaaaaaaaaaa

SEQ ID NO: 12709 - RNA, 5785 nt, synthetic construct
  source 1..5785: mol_type = other RNA
aggaaataagagagaaaagaagagtaagaagaaatataagagccaccatggcccctaagaagaagcgtaaagtgagccggatggaacgcctcgtctacgaggtgcggcagaagtgcagaaacatcgaggacatctgcatctcctgcggatctctgaacgtgaccctggagcacccactgttcatcggcggcatgtgccagaactgtaaaaactgttttctggagtgtgcctatcaatacgacgatgacggctaccagagctactgcaccatctgttgcggcggaagagaggtgctgatgtgtggaaataacaactgctgccggtgcttctgcgtggaatgcgtggacctgctggtgggccccggcgccgcccaggccgctattaaggaagatccttggaactgctacatgtgcggccacaagggcacatacggcctgctgagacggagagaggactggcctagcagactgcagatgttcttcgccaataaccacgaccaggagttcgacccccctaaggtgtaccctcccgtccccgccgagaagagaaagcccatccgggtcctgagcctgttcgatggcatcgccaccggtctgctggtgctgaaggacctgggcatccaggtggataggtacattgcctccgaggtgtgcgaggactccatcaccgtgggaatggtgcgtcatcagggcaagatcatgtacgtgggcgacgtgcggagcgtgacacagaagcatatccaggagtggggccctttcgacctggtgatcggcggcagcccttgcaatgacctgagcatcgtgaacccagcccggaagggcctgtacgagggaaccggcagactgttcttcgagttttacagactgctgcacgacgcccggcctaaggaaggcgacgaccggcccttcttttggctgttcgagaatgtggtggccatgggagtcagcgacaagcgggatattagccggttcctggagagcaaccccgtgatgatcgatgccaaggaagtgagcgccgcccaccgggccagatacttctggggcaatctgcctggcatgaacagacccctggccagcaccgtgaacgacaagctggagctgcaggagtgcctggagcacggccggatcgccaagttcagcaaggtgagaaccatcaccacccgaagcaacagcatcaaacaaggcaaggaccagcactttcctgtgttcatgaacgagaaggaggacatcctgtggtgtaccgagatggagagagtgttcgggttcccagtccactacacagatgtcagcaacatgtctagactggccagacagagactgctgggaagaagctggtccgtccctgtgatcagacacctgttcgcccctctgaaggagtacttcgcctgcgtgagcagcggcaacagcaacgccaacagccggggccccagcttctctagcggcctggtgccactgtccctgagagggagccacatgggccccatggagatctacaaaaccgtgagcgcctggaagcggcagcctgtgcgcgtgctgagcctgtttcggaatatcgataaagtcctgaaaagcctgggattcctggagagcggctctggctccggcggtggcaccctgaagtacgtggaggatgtgacaaacgtggtcagacgggatgtggagaagtggggccccttcgatctggtgtacggcagcacccaacccctgggcagctcttgtgaccggtgccctggctggtacatgtttcagttccaccggatcctgcagtacgccctgccgagacaggagtcccagcggccattcttttggattttcatggacaacttgctgctgaccgaggatgaccaggaaactaccactcggttcctgcagaccgaagccgtgaccctgcaggacgtgagaggccgggactaccagaacgccatgcgggtgtggtccaacatccctggactgaaaagcaagcacgcacctctgacccctaaagaagaggagtacctgcaggcccaggtgcggagcagaagcaagctggacgcccctaaggtggatctgctggtgaagaattgcctcctgcccctgagagagtacttcaagtatttcagccagaatagtctgcccctgggaggcagcggcggcggctaccaggaggccctgaccttccaggacgtgaaggtgaccttcagccaggaggagtggggctgcctggacagcgcccagaggaacctgtacagggacgtgatgctggagaactacggcaacgtggtgagcgtggtgggcagcagccccaagcccgccctgatcagctggctggaggccaggaagcccagcaccgtgaacatctgcaaggtgcagcccaagagggacagcggcaccgcccccgagggcggcccaagcagcggcgcccctcctcccagcggcggcagcccagccggctccccaacctctaccgaggagggcacctctgagtccgccacccccgagagcggccctggcacctccaccgagcccagcgagggcagcgcacccggcagccctgccggcagccccacctccacagaggagggaaccagcaccgagcccagcgaaggcagcgccccaggcaccagcaccgagcctagtgagcaggagattaaacggatcaacaagatcagaagaagacttgtgaaagacagcaacaccaagaaggccggcaagacaggccccatgaaaaccctgctggttagagtgatgacacccgatctgagagagcggctggaaaacctgagaaagaagcctgaaaatatcccccagcccatcagcaatacatctagagccaacctgaataagctgctgaccgattacaccgaaatgaagaaggcgatcctgcatgtgtactgggaagagttccagaaggaccctgtgggcctgatgagccgggtggcccagcctgccagcaagaagatcgatcagaacaagctgaaacctgagatggacgagaagggcaacctgaccaccgccggctttgcctgctctcagtgtggccagcccctgttcgtgtacaagctggagcaggtgtctgagaagggcaaggcttacaccaactacttcggacggtgcaatgtggccgagcacgaaaagctgatcctgctggcccagctgaagcccgagaaggatagcgacgaagccgtgacatatagcctgggaaagtttgggcagagggccctggatttctacagcattcatgtgaccaaggagtccacccaccccgtgaagcccctggcccagatcgccggaaacagatacgcctccggacctgtgggaaaggccctgagcgacgcatgtatgggcacaatcgcctccttcctgtctaagtaccaggacatcatcatcgaacaccagaaggtggtgaagggcaaccagaagagactggagagcctgcgggagctggccggcaaggaaaacctggaataccctagcgtgaccctgccacctcagcctcacaccaaggagggcgttgatgcctacaacgaagtgatcgcccgggtgcgaatgtgggtgaacctgaacctgtggcagaagctgaagctaagcagagatgatgccaagcctctgctgagactgaagggattcccttcctttcctctggtcgagagacaggccaacgaagtggactggtgggacatggtgtgtaacgtgaagaagctgatcaacgagaaaaaggaggatggcaaggtgttttggcagaatctggctggctacaagagacaggaagccctgagaccatacctgagcagcgaggaagatcggaagaagggaaagaaattcgctcggtaccagctgggcgacctgctgctgcacctggaaaagaagcacggcgaggactggggaaaggtgtacgacgaggcctgggagcggattgacaagaaagtggaaggcctgagcaagcacatcaagctggaagaggaacggagaagcgaggacgcccagagcaaggccgccctgaccgactggctgcgggctaaggccagcttcgtgatcgagggcctgaaggaggccgacaaggacgagttctgcagatgcgagctgaagctgcagaagtggtacggggacctgcggggaaagcccttcgccatcgaagccgagaacagcatcctggacatcagcggcttcagcaagcagtacaactgtgccttcatctggcagaaggacggcgtgaagaagctgaacctgtacctgatcatcaactacttcaagggcggcaagctgcggttcaagaagatcaaacctgaagccttcgaagccaacagattctacaccgtgatcaacaaaaagagcggcgagatcgtgcccatggaggtgaacttcaacttcgacgaccccaacctgatcatcctgcctctggcctttggcaagagacagggcagagaattcatctggaacgacctgctgtccctggaaaccggcagcctgaagctggccaacggaagagtgatcgagaagacactgtacaacagaagaacccggcaggatgagcctgccctgttcgtggccctgaccttcgagcggcgggaggtcctggactcctccaatatcaaaccaatgaacctgatcggcgtggcaagaggcgaaaacatccccgccgtgatcgccctgaccgaccccgagggctgcccactgagccggtttaaggatagcctgggaaacccaacccacatcctgagaatcggcgagagctataaggagaagcagcggaccatccaggccaagaaggaggtggagcagcggagagccggcggctacagccggaagtacgccagcaaagccaagaatctggcagacgatatggtgagaaacaccgctagagatctgctgtactacgccgtgacccaggatgccatgctgatcttcgccaacctgagccggggcttcggccggcagggcaagcggaccttcatggccgagagacagtacacacggatggaggactggctgaccgccaagctggcctacgagggcctgagcaagacctacctgtccaagacactggcccagtacacctccaagacatgcagcaactgtgggtttaccatcaccagcgccgactacgacagggtgctggagaagctgaagaagacagcaacaggctggatgaccacaattaacggcaaggagctgaaggtggagggccagattacctactacaacagatacaagagacagaacgtagtcaaggacctgtccgtcgagctggatagactgagcgaagaatctgtgaacaacgacatctcctcctggacaaagggcagaagcggagaagctctgagcctcctgaagaaaagattctcccatagacccgtgcaggagaagttcgtgtgcctgaactgcggcttcgagacacacgcagccgagcaagccgccctgaacatcgccagatcctggctgttcctgcggagccaggagtacaagaaataccagacaaacaagacaaccggcaacaccgataagagagccttcgtcgagacctggcagtccttttaccggaagaagcttaaggaggtgtggaaacctgccgtgcggtctggcggatctggcggaggctccaccagccccaagaaaaagagaaaagtctaagctgccttctgcggggcttgccttctggccatgcccttcttctctcccttgcacctgtacctcttggtctttgaataaagcctgagtaggaaggctagcaaaaaaaaaaaaaaaaaaaaaaaaaaaaaaaaaaaaaaaaaaaaaaaaaaaaaaaaaaaaaaaaaaaaaaaaaaaaaaaa

SEQ ID NO: 12710 - RNA, 5785 nt, synthetic construct
  source 1..5785: mol_type = other RNA
aggaaataagagagaaaagaagagtaagaagaaatataagagccaccatggcccctaagaagaagcgtaaagtgagccggatggaacgcctcgtctacgaggtgcggcagaagtgcagaaacatcgaggacatctgcatctcctgcggatctctgaacgtgaccctggagcacccactgttcatcggcggcatgtgccagaactgtaaaaactgttttctggagtgtgcctatcaatacgacgatgacggctaccagagctactgcaccatctgttgcggcggaagagaggtgctgatgtgtggaaataacaactgctgccggtgcttctgcgtggaatgcgtggacctgctggtgggccccggcgccgcccaggccgctattaaggaagatccttggaactgctacatgtgcggccacaagggcacatacggcctgctgagacggagagaggactggcctagcagactgcagatgttcttcgccaataaccacgaccaggagttcgacccccctaaggtgtaccctcccgtccccgccgagaagagaaagcccatccgggtcctgagcctgttcgatggcatcgccaccggtctgctggtgctgaaggacctgggcatccaggtggataggtacattgcctccgaggtgtgcgaggactccatcaccgtgggaatggtgcgtcatcagggcaagatcatgtacgtgggcgacgtgcggagcgtgacacagaagcatatccaggagtggggccctttcgacctggtgatcggcggcagcccttgcaatgacctgagcatcgtgaacccagcccggaagggcctgtacgagggaaccggcagactgttcttcgagttttacagactgctgcacgacgcccggcctaaggaaggcgacgaccggcccttcttttggctgttcgagaatgtggtggccatgggagtcagcgacaagcgggatattagccggttcctggagagcaaccccgtgatgatcgatgccaaggaagtgagcgccgcccaccgggccagatacttctggggcaatctgcctggcatgaacagacccctggccagcaccgtgaacgacaagctggagctgcaggagtgcctggagcacggccggatcgccaagttcagcaaggtgagaaccatcaccacccgaagcaacagcatcaaacaaggcaaggaccagcactttcctgtgttcatgaacgagaaggaggacatcctgtggtgtaccgagatggagagagtgttcgggttcccagtccactacacagatgtcagcaacatgtctagactggccagacagagactgctgggaagaagctggtccgtccctgtgatcagacacctgttcgcccctctgaaggagtacttcgcctgcgtgagcagcggcaacagcaacgccaacagccggggccccagcttctctagcggcctggtgccactgtccctgagagggagccacatgggccccatggagatctacaaaaccgtgagcgcctggaagcggcagcctgtgcgcgtgctgagcctgtttcggaatatcgataaagtcctgaaaagcctgggattcctggagagcggctctggctccggcggtggcaccctgaagtacgtggaggatgtgacaaacgtggtcagacgggatgtggagaagtggggccccttcgatctggtgtacggcagcacccaacccctgggcagctcttgtgaccggtgccctggctggtacatgtttcagttccaccggatcctgcagtacgccctgccgagacaggagtcccagcggccattcttttggattttcatggacaacttgctgctgaccgaggatgaccaggaaactaccactcggttcctgcagaccgaagccgtgaccctgcaggacgtgagaggccgggactaccagaacgccatgcgggtgtggtccaacatccctggactgaaaagcaagcacgcacctctgacccctaaagaagaggagtacctgcaggcccaggtgcggagcagaagcaagctggacgcccctaaggtggatctgctggtgaagaattgcctcctgcccctgagagagtacttcaagtatttcagccagaatagtctgcccctgggaggcagcggcggcggccagggcagcgtgagcttcgaggacgtggccgtgtacttcaccgaggaggagtgggccctgctggacagcagccagagggccctgcacagggaggtgatgctggagaacagcaggaacctggccgccgtgggctacggccaggagcacaagaactaccaggagcccagcctggccctgttccagagcgaggagaggatgctgggcatccagagggtgctgcagaagaccaggaggagctgcctgggcggcccaagcagcggcgcccctcctcccagcggcggcagcccagccggctccccaacctctaccgaggagggcacctctgagtccgccacccccgagagcggccctggcacctccaccgagcccagcgagggcagcgcacccggcagccctgccggcagccccacctccacagaggagggaaccagcaccgagcccagcgaaggcagcgccccaggcaccagcaccgagcctagtgagcaggagattaaacggatcaacaagatcagaagaagacttgtgaaagacagcaacaccaagaaggccggcaagacaggccccatgaaaaccctgctggttagagtgatgacacccgatctgagagagcggctggaaaacctgagaaagaagcctgaaaatatcccccagcccatcagcaatacatctagagccaacctgaataagctgctgaccgattacaccgaaatgaagaaggcgatcctgcatgtgtactgggaagagttccagaaggaccctgtgggcctgatgagccgggtggcccagcctgccagcaagaagatcgatcagaacaagctgaaacctgagatggacgagaagggcaacctgaccaccgccggctttgcctgctctcagtgtggccagcccctgttcgtgtacaagctggagcaggtgtctgagaagggcaaggcttacaccaactacttcggacggtgcaatgtggccgagcacgaaaagctgatcctgctggcccagctgaagcccgagaaggatagcgacgaagccgtgacatatagcctgggaaagtttgggcagagggccctggatttctacagcattcatgtgaccaaggagtccacccaccccgtgaagcccctggcccagatcgccggaaacagatacgcctccggacctgtgggaaaggccctgagcgacgcatgtatgggcacaatcgcctccttcctgtctaagtaccaggacatcatcatcgaacaccagaaggtggtgaagggcaaccagaagagactggagagcctgcgggagctggccggcaaggaaaacctggaataccctagcgtgaccctgccacctcagcctcacaccaaggagggcgttgatgcctacaacgaagtgatcgcccgggtgcgaatgtgggtgaacctgaacctgtggcagaagctgaagctaagcagagatgatgccaagcctctgctgagactgaagggattcccttcctttcctctggtcgagagacaggccaacgaagtggactggtgggacatggtgtgtaacgtgaagaagctgatcaacgagaaaaaggaggatggcaaggtgttttggcagaatctggctggctacaagagacaggaagccctgagaccatacctgagcagcgaggaagatcggaagaagggaaagaaattcgctcggtaccagctgggcgacctgctgctgcacctggaaaagaagcacggcgaggactggggaaaggtgtacgacgaggcctgggagcggattgacaagaaagtggaaggcctgagcaagcacatcaagctggaagaggaacggagaagcgaggacgcccagagcaaggccgccctgaccgactggctgcgggctaaggccagcttcgtgatcgagggcctgaaggaggccgacaaggacgagttctgcagatgcgagctgaagctgcagaagtggtacggggacctgcggggaaagcccttcgccatcgaagccgagaacagcatcctggacatcagcggcttcagcaagcagtacaactgtgccttcatctggcagaaggacggcgtgaagaagctgaacctgtacctgatcatcaactacttcaagggcggcaagctgcggttcaagaagatcaaacctgaagccttcgaagccaacagattctacaccgtgatcaacaaaaagagcggcgagatcgtgcccatggaggtgaacttcaacttcgacgaccccaacctgatcatcctgcctctggcctttggcaagagacagggcagagaattcatctggaacgacctgctgtccctggaaaccggcagcctgaagctggccaacggaagagtgatcgagaagacactgtacaacagaagaacccggcaggatgagcctgccctgttcgtggccctgaccttcgagcggcgggaggtcctggactcctccaatatcaaaccaatgaacctgatcggcgtggcaagaggcgaaaacatccccgccgtgatcgccctgaccgaccccgagggctgcccactgagccggtttaaggatagcctgggaaacccaacccacatcctgagaatcggcgagagctataaggagaagcagcggaccatccaggccaagaaggaggtggagcagcggagagccggcggctacagccggaagtacgccagcaaagccaagaatctggcagacgatatggtgagaaacaccgctagagatctgctgtactacgccgtgacccaggatgccatgctgatcttcgccaacctgagccggggcttcggccggcagggcaagcggaccttcatggccgagagacagtacacacggatggaggactggctgaccgccaagctggcctacgagggcctgagcaagacctacctgtccaagacactggcccagtacacctccaagacatgcagcaactgtgggtttaccatcaccagcgccgactacgacagggtgctggagaagctgaagaagacagcaacaggctggatgaccacaattaacggcaaggagctgaaggtggagggccagattacctactacaacagatacaagagacagaacgtagtcaaggacctgtccgtcgagctggatagactgagcgaagaatctgtgaacaacgacatctcctcctggacaaagggcagaagcggagaagctctgagcctcctgaagaaaagattctcccatagacccgtgcaggagaagttcgtgtgcctgaactgcggcttcgagacacacgcagccgagcaagccgccctgaacatcgccagatcctggctgttcctgcggagccaggagtacaagaaataccagacaaacaagacaaccggcaacaccgataagagagccttcgtcgagacctggcagtccttttaccggaagaagcttaaggaggtgtggaaacctgccgtgcggtctggcggatctggcggaggctccaccagccccaagaaaaagagaaaagtctaagctgccttctgcggggcttgccttctggccatgcccttcttctctcccttgcacctgtacctcttggtctttgaataaagcctgagtaggaaggctagcaaaaaaaaaaaaaaaaaaaaaaaaaaaaaaaaaaaaaaaaaaaaaaaaaaaaaaaaaaaaaaaaaaaaaaaaaaaaaaaa

SEQ ID NO: 12711 - RNA, 5785 nt, synthetic construct
  source 1..5785: mol_type = other RNA
aggaaataagagagaaaagaagagtaagaagaaatataagagccaccatggcccctaagaagaagcgtaaagtgagccggatggaacgcctcgtctacgaggtgcggcagaagtgcagaaacatcgaggacatctgcatctcctgcggatctctgaacgtgaccctggagcacccactgttcatcggcggcatgtgccagaactgtaaaaactgttttctggagtgtgcctatcaatacgacgatgacggctaccagagctactgcaccatctgttgcggcggaagagaggtgctgatgtgtggaaataacaactgctgccggtgcttctgcgtggaatgcgtggacctgctggtgggccccggcgccgcccaggccgctattaaggaagatccttggaactgctacatgtgcggccacaagggcacatacggcctgctgagacggagagaggactggcctagcagactgcagatgttcttcgccaataaccacgaccaggagttcgacccccctaaggtgtaccctcccgtccccgccgagaagagaaagcccatccgggtcctgagcctgttcgatggcatcgccaccggtctgctggtgctgaaggacctgggcatccaggtggataggtacattgcctccgaggtgtgcgaggactccatcaccgtgggaatggtgcgtcatcagggcaagatcatgtacgtgggcgacgtgcggagcgtgacacagaagcatatccaggagtggggccctttcgacctggtgatcggcggcagcccttgcaatgacctgagcatcgtgaacccagcccggaagggcctgtacgagggaaccggcagactgttcttcgagttttacagactgctgcacgacgcccggcctaaggaaggcgacgaccggcccttcttttggctgttcgagaatgtggtggccatgggagtcagcgacaagcgggatattagccggttcctggagagcaaccccgtgatgatcgatgccaaggaagtgagcgccgcccaccgggccagatacttctggggcaatctgcctggcatgaacagacccctggccagcaccgtgaacgacaagctggagctgcaggagtgcctggagcacggccggatcgccaagttcagcaaggtgagaaccatcaccacccgaagcaacagcatcaaacaaggcaaggaccagcactttcctgtgttcatgaacgagaaggaggacatcctgtggtgtaccgagatggagagagtgttcgggttcccagtccactacacagatgtcagcaacatgtctagactggccagacagagactgctgggaagaagctggtccgtccctgtgatcagacacctgttcgcccctctgaaggagtacttcgcctgcgtgagcagcggcaacagcaacgccaacagccggggccccagcttctctagcggcctggtgccactgtccctgagagggagccacatgggccccatggagatctacaaaaccgtgagcgcctggaagcggcagcctgtgcgcgtgctgagcctgtttcggaatatcgataaagtcctgaaaagcctgggattcctggagagcggctctggctccggcggtggcaccctgaagtacgtggaggatgtgacaaacgtggtcagacgggatgtggagaagtggggccccttcgatctggtgtacggcagcacccaacccctgggcagctcttgtgaccggtgccctggctggtacatgtttcagttccaccggatcctgcagtacgccctgccgagacaggagtcccagcggccattcttttggattttcatggacaacttgctgctgaccgaggatgaccaggaaactaccactcggttcctgcagaccgaagccgtgaccctgcaggacgtgagaggccgggactaccagaacgccatgcgggtgtggtccaacatccctggactgaaaagcaagcacgcacctctgacccctaaagaagaggagtacctgcaggcccaggtgcggagcagaagcaagctggacgcccctaaggtggatctgctggtgaagaattgcctcctgcccctgagagagtacttcaagtatttcagccagaatagtctgcccctgggaggcagcggcggcggcggccaggaggaggtgaccttcaaggacgtggccgtggacttcaccagggaggagtggaggctgctgagccccccccagaaggagctgtacaaggaggtgatggtggagaacgccaggaacctgctgagcgtgggcctgcccgcccccaccaaggacgtgctgagctacctgaagaagaggggcgcccccgtgatgctggagcaggagggcctgaggaactacttccccgagggcgagatcaggggcggcccaagcagcggcgcccctcctcccagcggcggcagcccagccggctccccaacctctaccgaggagggcacctctgagtccgccacccccgagagcggccctggcacctccaccgagcccagcgagggcagcgcacccggcagccctgccggcagccccacctccacagaggagggaaccagcaccgagcccagcgaaggcagcgccccaggcaccagcaccgagcctagtgagcaggagattaaacggatcaacaagatcagaagaagacttgtgaaagacagcaacaccaagaaggccggcaagacaggccccatgaaaaccctgctggttagagtgatgacacccgatctgagagagcggctggaaaacctgagaaagaagcctgaaaatatcccccagcccatcagcaatacatctagagccaacctgaataagctgctgaccgattacaccgaaatgaagaaggcgatcctgcatgtgtactgggaagagttccagaaggaccctgtgggcctgatgagccgggtggcccagcctgccagcaagaagatcgatcagaacaagctgaaacctgagatggacgagaagggcaacctgaccaccgccggctttgcctgctctcagtgtggccagcccctgttcgtgtacaagctggagcaggtgtctgagaagggcaaggcttacaccaactacttcggacggtgcaatgtggccgagcacgaaaagctgatcctgctggcccagctgaagcccgagaaggatagcgacgaagccgtgacatatagcctgggaaagtttgggcagagggccctggatttctacagcattcatgtgaccaaggagtccacccaccccgtgaagcccctggcccagatcgccggaaacagatacgcctccggacctgtgggaaaggccctgagcgacgcatgtatgggcacaatcgcctccttcctgtctaagtaccaggacatcatcatcgaacaccagaaggtggtgaagggcaaccagaagagactggagagcctgcgggagctggccggcaaggaaaacctggaataccctagcgtgaccctgccacctcagcctcacaccaaggagggcgttgatgcctacaacgaagtgatcgcccgggtgcgaatgtgggtgaacctgaacctgtggcagaagctgaagctaagcagagatgatgccaagcctctgctgagactgaagggattcccttcctttcctctggtcgagagacaggccaacgaagtggactggtgggacatggtgtgtaacgtgaagaagctgatcaacgagaaaaaggaggatggcaaggtgttttggcagaatctggctggctacaagagacaggaagccctgagaccatacctgagcagcgaggaagatcggaagaagggaaagaaattcgctcggtaccagctgggcgacctgctgctgcacctggaaaagaagcacggcgaggactggggaaaggtgtacgacgaggcctgggagcggattgacaagaaagtggaaggcctgagcaagcacatcaagctggaagaggaacggagaagcgaggacgcccagagcaaggccgccctgaccgactggctgcgggctaaggccagcttcgtgatcgagggcctgaaggaggccgacaaggacgagttctgcagatgcgagctgaagctgcagaagtggtacggggacctgcggggaaagcccttcgccatcgaagccgagaacagcatcctggacatcagcggcttcagcaagcagtacaactgtgccttcatctggcagaaggacggcgtgaagaagctgaacctgtacctgatcatcaactacttcaagggcggcaagctgcggttcaagaagatcaaacctgaagccttcgaagccaacagattctacaccgtgatcaacaaaaagagcggcgagatcgtgcccatggaggtgaacttcaacttcgacgaccccaacctgatcatcctgcctctggcctttggcaagagacagggcagagaattcatctggaacgacctgctgtccctggaaaccggcagcctgaagctggccaacggaagagtgatcgagaagacactgtacaacagaagaacccggcaggatgagcctgccctgttcgtggccctgaccttcgagcggcgggaggtcctggactcctccaatatcaaaccaatgaacctgatcggcgtggcaagaggcgaaaacatccccgccgtgatcgccctgaccgaccccgagggctgcccactgagccggtttaaggatagcctgggaaacccaacccacatcctgagaatcggcgagagctataaggagaagcagcggaccatccaggccaagaaggaggtggagcagcggagagccggcggctacagccggaagtacgccagcaaagccaagaatctggcagacgatatggtgagaaacaccgctagagatctgctgtactacgccgtgacccaggatgccatgctgatcttcgccaacctgagccggggcttcggccggcagggcaagcggaccttcatggccgagagacagtacacacggatggaggactggctgaccgccaagctggcctacgagggcctgagcaagacctacctgtccaagacactggcccagtacacctccaagacatgcagcaactgtgggtttaccatcaccagcgccgactacgacagggtgctggagaagctgaagaagacagcaacaggctggatgaccacaattaacggcaaggagctgaaggtggagggccagattacctactacaacagatacaagagacagaacgtagtcaaggacctgtccgtcgagctggatagactgagcgaagaatctgtgaacaacgacatctcctcctggacaaagggcagaagcggagaagctctgagcctcctgaagaaaagattctcccatagacccgtgcaggagaagttcgtgtgcctgaactgcggcttcgagacacacgcagccgagcaagccgccctgaacatcgccagatcctggctgttcctgcggagccaggagtacaagaaataccagacaaacaagacaaccggcaacaccgataagagagccttcgtcgagacctggcagtccttttaccggaagaagcttaaggaggtgtggaaacctgccgtgcggtctggcggatctggcggaggctccaccagccccaagaaaaagagaaaagtctaagctgccttctgcggggcttgccttctggccatgcccttcttctctcccttgcacctgtacctcttggtctttgaataaagcctgagtaggaaggctagcaaaaaaaaaaaaaaaaaaaaaaaaaaaaaaaaaaaaaaaaaaaaaaaaaaaaaaaaaaaaaaaaaaaaaaaaaaaaaaaa

SEQ ID NO: 12712 - RNA, 5785 nt, synthetic construct
  source 1..5785: mol_type = other RNA
aggaaataagagagaaaagaagagtaagaagaaatataagagccaccatggcccctaagaagaagcgtaaagtgagccggatggaacgcctcgtctacgaggtgcggcagaagtgcagaaacatcgaggacatctgcatctcctgcggatctctgaacgtgaccctggagcacccactgttcatcggcggcatgtgccagaactgtaaaaactgttttctggagtgtgcctatcaatacgacgatgacggctaccagagctactgcaccatctgttgcggcggaagagaggtgctgatgtgtggaaataacaactgctgccggtgcttctgcgtggaatgcgtggacctgctggtgggccccggcgccgcccaggccgctattaaggaagatccttggaactgctacatgtgcggccacaagggcacatacggcctgctgagacggagagaggactggcctagcagactgcagatgttcttcgccaataaccacgaccaggagttcgacccccctaaggtgtaccctcccgtccccgccgagaagagaaagcccatccgggtcctgagcctgttcgatggcatcgccaccggtctgctggtgctgaaggacctgggcatccaggtggataggtacattgcctccgaggtgtgcgaggactccatcaccgtgggaatggtgcgtcatcagggcaagatcatgtacgtgggcgacgtgcggagcgtgacacagaagcatatccaggagtggggccctttcgacctggtgatcggcggcagcccttgcaatgacctgagcatcgtgaacccagcccggaagggcctgtacgagggaaccggcagactgttcttcgagttttacagactgctgcacgacgcccggcctaaggaaggcgacgaccggcccttcttttggctgttcgagaatgtggtggccatgggagtcagcgacaagcgggatattagccggttcctggagagcaaccccgtgatgatcgatgccaaggaagtgagcgccgcccaccgggccagatacttctggggcaatctgcctggcatgaacagacccctggccagcaccgtgaacgacaagctggagctgcaggagtgcctggagcacggccggatcgccaagttcagcaaggtgagaaccatcaccacccgaagcaacagcatcaaacaaggcaaggaccagcactttcctgtgttcatgaacgagaaggaggacatcctgtggtgtaccgagatggagagagtgttcgggttcccagtccactacacagatgtcagcaacatgtctagactggccagacagagactgctgggaagaagctggtccgtccctgtgatcagacacctgttcgcccctctgaaggagtacttcgcctgcgtgagcagcggcaacagcaacgccaacagccggggccccagcttctctagcggcctggtgccactgtccctgagagggagccacatgggccccatggagatctacaaaaccgtgagcgcctggaagcggcagcctgtgcgcgtgctgagcctgtttcggaatatcgataaagtcctgaaaagcctgggattcctggagagcggctctggctccggcggtggcaccctgaagtacgtggaggatgtgacaaacgtggtcagacgggatgtggagaagtggggccccttcgatctggtgtacggcagcacccaacccctgggcagctcttgtgaccggtgccctggctggtacatgtttcagttccaccggatcctgcagtacgccctgccgagacaggagtcccagcggccattcttttggattttcatggacaacttgctgctgaccgaggatgaccaggaaactaccactcggttcctgcagaccgaagccgtgaccctgcaggacgtgagaggccgggactaccagaacgccatgcgggtgtggtccaacatccctggactgaaaagcaagcacgcacctctgacccctaaagaagaggagtacctgcaggcccaggtgcggagcagaagcaagctggacgcccctaaggtggatctgctggtgaagaattgcctcctgcccctgagagagtacttcaagtatttcagccagaatagtctgcccctgggaggcagcggcggcggcgagccctgggccgtgaccttcgccgacgtggccgtgtacttcagcagcgaggagtggaggtgcctgaggcccgcccagagggccctgtacagggacgtgatgagggacacctacggcctgctgagcgccctgggcggcggcggcaccaagcccgccctgatcagctgggtggagggcgaggccgagctgtgggaccccgacgcccaggaccccgaggtggtgaggtggcccgccgaggccgacggcggcccaagcagcggcgcccctcctcccagcggcggcagcccagccggctccccaacctctaccgaggagggcacctctgagtccgccacccccgagagcggccctggcacctccaccgagcccagcgagggcagcgcacccggcagccctgccggcagccccacctccacagaggagggaaccagcaccgagcccagcgaaggcagcgccccaggcaccagcaccgagcctagtgagcaggagattaaacggatcaacaagatcagaagaagacttgtgaaagacagcaacaccaagaaggccggcaagacaggccccatgaaaaccctgctggttagagtgatgacacccgatctgagagagcggctggaaaacctgagaaagaagcctgaaaatatcccccagcccatcagcaatacatctagagccaacctgaataagctgctgaccgattacaccgaaatgaagaaggcgatcctgcatgtgtactgggaagagttccagaaggaccctgtgggcctgatgagccgggtggcccagcctgccagcaagaagatcgatcagaacaagctgaaacctgagatggacgagaagggcaacctgaccaccgccggctttgcctgctctcagtgtggccagcccctgttcgtgtacaagctggagcaggtgtctgagaagggcaaggcttacaccaactacttcggacggtgcaatgtggccgagcacgaaaagctgatcctgctggcccagctgaagcccgagaaggatagcgacgaagccgtgacatatagcctgggaaagtttgggcagagggccctggatttctacagcattcatgtgaccaaggagtccacccaccccgtgaagcccctggcccagatcgccggaaacagatacgcctccggacctgtgggaaaggccctgagcgacgcatgtatgggcacaatcgcctccttcctgtctaagtaccaggacatcatcatcgaacaccagaaggtggtgaagggcaaccagaagagactggagagcctgcgggagctggccggcaaggaaaacctggaataccctagcgtgaccctgccacctcagcctcacaccaaggagggcgttgatgcctacaacgaagtgatcgcccgggtgcgaatgtgggtgaacctgaacctgtggcagaagctgaagctaagcagagatgatgccaagcctctgctgagactgaagggattcccttcctttcctctggtcgagagacaggccaacgaagtggactggtgggacatggtgtgtaacgtgaagaagctgatcaacgagaaaaaggaggatggcaaggtgttttggcagaatctggctggctacaagagacaggaagccctgagaccatacctgagcagcgaggaagatcggaagaagggaaagaaattcgctcggtaccagctgggcgacctgctgctgcacctggaaaagaagcacggcgaggactggggaaaggtgtacgacgaggcctgggagcggattgacaagaaagtggaaggcctgagcaagcacatcaagctggaagaggaacggagaagcgaggacgcccagagcaaggccgccctgaccgactggctgcgggctaaggccagcttcgtgatcgagggcctgaaggaggccgacaaggacgagttctgcagatgcgagctgaagctgcagaagtggtacggggacctgcggggaaagcccttcgccatcgaagccgagaacagcatcctggacatcagcggcttcagcaagcagtacaactgtgccttcatctggcagaaggacggcgtgaagaagctgaacctgtacctgatcatcaactacttcaagggcggcaagctgcggttcaagaagatcaaacctgaagccttcgaagccaacagattctacaccgtgatcaacaaaaagagcggcgagatcgtgcccatggaggtgaacttcaacttcgacgaccccaacctgatcatcctgcctctggcctttggcaagagacagggcagagaattcatctggaacgacctgctgtccctggaaaccggcagcctgaagctggccaacggaagagtgatcgagaagacactgtacaacagaagaacccggcaggatgagcctgccctgttcgtggccctgaccttcgagcggcgggaggtcctggactcctccaatatcaaaccaatgaacctgatcggcgtggcaagaggcgaaaacatccccgccgtgatcgccctgaccgaccccgagggctgcccactgagccggtttaaggatagcctgggaaacccaacccacatcctgagaatcggcgagagctataaggagaagcagcggaccatccaggccaagaaggaggtggagcagcggagagccggcggctacagccggaagtacgccagcaaagccaagaatctggcagacgatatggtgagaaacaccgctagagatctgctgtactacgccgtgacccaggatgccatgctgatcttcgccaacctgagccggggcttcggccggcagggcaagcggaccttcatggccgagagacagtacacacggatggaggactggctgaccgccaagctggcctacgagggcctgagcaagacctacctgtccaagacactggcccagtacacctccaagacatgcagcaactgtgggtttaccatcaccagcgccgactacgacagggtgctggagaagctgaagaagacagcaacaggctggatgaccacaattaacggcaaggagctgaaggtggagggccagattacctactacaacagatacaagagacagaacgtagtcaaggacctgtccgtcgagctggatagactgagcgaagaatctgtgaacaacgacatctcctcctggacaaagggcagaagcggagaagctctgagcctcctgaagaaaagattctcccatagacccgtgcaggagaagttcgtgtgcctgaactgcggcttcgagacacacgcagccgagcaagccgccctgaacatcgccagatcctggctgttcctgcggagccaggagtacaagaaataccagacaaacaagacaaccggcaacaccgataagagagccttcgtcgagacctggcagtccttttaccggaagaagcttaaggaggtgtggaaacctgccgtgcggtctggcggatctggcggaggctccaccagccccaagaaaaagagaaaagtctaagctgccttctgcggggcttgccttctggccatgcccttcttctctcccttgcacctgtacctcttggtctttgaataaagcctgagtaggaaggctagcaaaaaaaaaaaaaaaaaaaaaaaaaaaaaaaaaaaaaaaaaaaaaaaaaaaaaaaaaaaaaaaaaaaaaaaaaaaaaaaa

SEQ ID NO: 12713 - RNA, 5785 nt, synthetic construct
  source 1..5785: mol_type = other RNA
aggaaataagagagaaaagaagagtaagaagaaatataagagccaccatggcccctaagaagaagcgtaaagtgagccggatggaacgcctcgtctacgaggtgcggcagaagtgcagaaacatcgaggacatctgcatctcctgcggatctctgaacgtgaccctggagcacccactgttcatcggcggcatgtgccagaactgtaaaaactgttttctggagtgtgcctatcaatacgacgatgacggctaccagagctactgcaccatctgttgcggcggaagagaggtgctgatgtgtggaaataacaactgctgccggtgcttctgcgtggaatgcgtggacctgctggtgggccccggcgccgcccaggccgctattaaggaagatccttggaactgctacatgtgcggccacaagggcacatacggcctgctgagacggagagaggactggcctagcagactgcagatgttcttcgccaataaccacgaccaggagttcgacccccctaaggtgtaccctcccgtccccgccgagaagagaaagcccatccgggtcctgagcctgttcgatggcatcgccaccggtctgctggtgctgaaggacctgggcatccaggtggataggtacattgcctccgaggtgtgcgaggactccatcaccgtgggaatggtgcgtcatcagggcaagatcatgtacgtgggcgacgtgcggagcgtgacacagaagcatatccaggagtggggccctttcgacctggtgatcggcggcagcccttgcaatgacctgagcatcgtgaacccagcccggaagggcctgtacgagggaaccggcagactgttcttcgagttttacagactgctgcacgacgcccggcctaaggaaggcgacgaccggcccttcttttggctgttcgagaatgtggtggccatgggagtcagcgacaagcgggatattagccggttcctggagagcaaccccgtgatgatcgatgccaaggaagtgagcgccgcccaccgggccagatacttctggggcaatctgcctggcatgaacagacccctggccagcaccgtgaacgacaagctggagctgcaggagtgcctggagcacggccggatcgccaagttcagcaaggtgagaaccatcaccacccgaagcaacagcatcaaacaaggcaaggaccagcactttcctgtgttcatgaacgagaaggaggacatcctgtggtgtaccgagatggagagagtgttcgggttcccagtccactacacagatgtcagcaacatgtctagactggccagacagagactgctgggaagaagctggtccgtccctgtgatcagacacctgttcgcccctctgaaggagtacttcgcctgcgtgagcagcggcaacagcaacgccaacagccggggccccagcttctctagcggcctggtgccactgtccctgagagggagccacatgggccccatggagatctacaaaaccgtgagcgcctggaagcggcagcctgtgcgcgtgctgagcctgtttcggaatatcgataaagtcctgaaaagcctgggattcctggagagcggctctggctccggcggtggcaccctgaagtacgtggaggatgtgacaaacgtggtcagacgggatgtggagaagtggggccccttcgatctggtgtacggcagcacccaacccctgggcagctcttgtgaccggtgccctggctggtacatgtttcagttccaccggatcctgcagtacgccctgccgagacaggagtcccagcggccattcttttggattttcatggacaacttgctgctgaccgaggatgaccaggaaactaccactcggttcctgcagaccgaagccgtgaccctgcaggacgtgagaggccgggactaccagaacgccatgcgggtgtggtccaacatccctggactgaaaagcaagcacgcacctctgacccctaaagaagaggagtacctgcaggcccaggtgcggagcagaagcaagctggacgcccctaaggtggatctgctggtgaagaattgcctcctgcccctgagagagtacttcaagtatttcagccagaatagtctgcccctgggaggcagcggcggcggcgtgcagagccacgtggtgttcgaggacgtggccatctacttcagccaggaggagtggggcctgctggacgaggcccagaggttcctgtaccacgccgtgatgctggagaacttcgccctgctgagcagcctgggctgctggcacggcgcccaggacgagcaggccctgagcgagcagggcgtgagcgtgggcggcagccaggtgaggacccccaagcccgcccccagcatccagaagagccagggcggcccaagcagcggcgcccctcctcccagcggcggcagcccagccggctccccaacctctaccgaggagggcacctctgagtccgccacccccgagagcggccctggcacctccaccgagcccagcgagggcagcgcacccggcagccctgccggcagccccacctccacagaggagggaaccagcaccgagcccagcgaaggcagcgccccaggcaccagcaccgagcctagtgagcaggagattaaacggatcaacaagatcagaagaagacttgtgaaagacagcaacaccaagaaggccggcaagacaggccccatgaaaaccctgctggttagagtgatgacacccgatctgagagagcggctggaaaacctgagaaagaagcctgaaaatatcccccagcccatcagcaatacatctagagccaacctgaataagctgctgaccgattacaccgaaatgaagaaggcgatcctgcatgtgtactgggaagagttccagaaggaccctgtgggcctgatgagccgggtggcccagcctgccagcaagaagatcgatcagaacaagctgaaacctgagatggacgagaagggcaacctgaccaccgccggctttgcctgctctcagtgtggccagcccctgttcgtgtacaagctggagcaggtgtctgagaagggcaaggcttacaccaactacttcggacggtgcaatgtggccgagcacgaaaagctgatcctgctggcccagctgaagcccgagaaggatagcgacgaagccgtgacatatagcctgggaaagtttgggcagagggccctggatttctacagcattcatgtgaccaaggagtccacccaccccgtgaagcccctggcccagatcgccggaaacagatacgcctccggacctgtgggaaaggccctgagcgacgcatgtatgggcacaatcgcctccttcctgtctaagtaccaggacatcatcatcgaacaccagaaggtggtgaagggcaaccagaagagactggagagcctgcgggagctggccggcaaggaaaacctggaataccctagcgtgaccctgccacctcagcctcacaccaaggagggcgttgatgcctacaacgaagtgatcgcccgggtgcgaatgtgggtgaacctgaacctgtggcagaagctgaagctaagcagagatgatgccaagcctctgctgagactgaagggattcccttcctttcctctggtcgagagacaggccaacgaagtggactggtgggacatggtgtgtaacgtgaagaagctgatcaacgagaaaaaggaggatggcaaggtgttttggcagaatctggctggctacaagagacaggaagccctgagaccatacctgagcagcgaggaagatcggaagaagggaaagaaattcgctcggtaccagctgggcgacctgctgctgcacctggaaaagaagcacggcgaggactggggaaaggtgtacgacgaggcctgggagcggattgacaagaaagtggaaggcctgagcaagcacatcaagctggaagaggaacggagaagcgaggacgcccagagcaaggccgccctgaccgactggctgcgggctaaggccagcttcgtgatcgagggcctgaaggaggccgacaaggacgagttctgcagatgcgagctgaagctgcagaagtggtacggggacctgcggggaaagcccttcgccatcgaagccgagaacagcatcctggacatcagcggcttcagcaagcagtacaactgtgccttcatctggcagaaggacggcgtgaagaagctgaacctgtacctgatcatcaactacttcaagggcggcaagctgcggttcaagaagatcaaacctgaagccttcgaagccaacagattctacaccgtgatcaacaaaaagagcggcgagatcgtgcccatggaggtgaacttcaacttcgacgaccccaacctgatcatcctgcctctggcctttggcaagagacagggcagagaattcatctggaacgacctgctgtccctggaaaccggcagcctgaagctggccaacggaagagtgatcgagaagacactgtacaacagaagaacccggcaggatgagcctgccctgttcgtggccctgaccttcgagcggcgggaggtcctggactcctccaatatcaaaccaatgaacctgatcggcgtggcaagaggcgaaaacatccccgccgtgatcgccctgaccgaccccgagggctgcccactgagccggtttaaggatagcctgggaaacccaacccacatcctgagaatcggcgagagctataaggagaagcagcggaccatccaggccaagaaggaggtggagcagcggagagccggcggctacagccggaagtacgccagcaaagccaagaatctggcagacgatatggtgagaaacaccgctagagatctgctgtactacgccgtgacccaggatgccatgctgatcttcgccaacctgagccggggcttcggccggcagggcaagcggaccttcatggccgagagacagtacacacggatggaggactggctgaccgccaagctggcctacgagggcctgagcaagacctacctgtccaagacactggcccagtacacctccaagacatgcagcaactgtgggtttaccatcaccagcgccgactacgacagggtgctggagaagctgaagaagacagcaacaggctggatgaccacaattaacggcaaggagctgaaggtggagggccagattacctactacaacagatacaagagacagaacgtagtcaaggacctgtccgtcgagctggatagactgagcgaagaatctgtgaacaacgacatctcctcctggacaaagggcagaagcggagaagctctgagcctcctgaagaaaagattctcccatagacccgtgcaggagaagttcgtgtgcctgaactgcggcttcgagacacacgcagccgagcaagccgccctgaacatcgccagatcctggctgttcctgcggagccaggagtacaagaaataccagacaaacaagacaaccggcaacaccgataagagagccttcgtcgagacctggcagtccttttaccggaagaagcttaaggaggtgtggaaacctgccgtgcggtctggcggatctggcggaggctccaccagccccaagaaaaagagaaaagtctaagctgccttctgcggggcttgccttctggccatgcccttcttctctcccttgcacctgtacctcttggtctttgaataaagcctgagtaggaaggctagcaaaaaaaaaaaaaaaaaaaaaaaaaaaaaaaaaaaaaaaaaaaaaaaaaaaaaaaaaaaaaaaaaaaaaaaaaaaaaaaa

SEQ ID NO: 12714 - RNA, 5785 nt, synthetic construct
  source 1..5785: mol_type = other RNA
aggaaataagagagaaaagaagagtaagaagaaatataagagccaccatggcccctaagaagaagcgtaaagtgagccggatggaacgcctcgtctacgaggtgcggcagaagtgcagaaacatcgaggacatctgcatctcctgcggatctctgaacgtgaccctggagcacccactgttcatcggcggcatgtgccagaactgtaaaaactgttttctggagtgtgcctatcaatacgacgatgacggctaccagagctactgcaccatctgttgcggcggaagagaggtgctgatgtgtggaaataacaactgctgccggtgcttctgcgtggaatgcgtggacctgctggtgggccccggcgccgcccaggccgctattaaggaagatccttggaactgctacatgtgcggccacaagggcacatacggcctgctgagacggagagaggactggcctagcagactgcagatgttcttcgccaataaccacgaccaggagttcgacccccctaaggtgtaccctcccgtccccgccgagaagagaaagcccatccgggtcctgagcctgttcgatggcatcgccaccggtctgctggtgctgaaggacctgggcatccaggtggataggtacattgcctccgaggtgtgcgaggactccatcaccgtgggaatggtgcgtcatcagggcaagatcatgtacgtgggcgacgtgcggagcgtgacacagaagcatatccaggagtggggccctttcgacctggtgatcggcggcagcccttgcaatgacctgagcatcgtgaacccagcccggaagggcctgtacgagggaaccggcagactgttcttcgagttttacagactgctgcacgacgcccggcctaaggaaggcgacgaccggcccttcttttggctgttcgagaatgtggtggccatgggagtcagcgacaagcgggatattagccggttcctggagagcaaccccgtgatgatcgatgccaaggaagtgagcgccgcccaccgggccagatacttctggggcaatctgcctggcatgaacagacccctggccagcaccgtgaacgacaagctggagctgcaggagtgcctggagcacggccggatcgccaagttcagcaaggtgagaaccatcaccacccgaagcaacagcatcaaacaaggcaaggaccagcactttcctgtgttcatgaacgagaaggaggacatcctgtggtgtaccgagatggagagagtgttcgggttcccagtccactacacagatgtcagcaacatgtctagactggccagacagagactgctgggaagaagctggtccgtccctgtgatcagacacctgttcgcccctctgaaggagtacttcgcctgcgtgagcagcggcaacagcaacgccaacagccggggccccagcttctctagcggcctggtgccactgtccctgagagggagccacatgggccccatggagatctacaaaaccgtgagcgcctggaagcggcagcctgtgcgcgtgctgagcctgtttcggaatatcgataaagtcctgaaaagcctgggattcctggagagcggctctggctccggcggtggcaccctgaagtacgtggaggatgtgacaaacgtggtcagacgggatgtggagaagtggggccccttcgatctggtgtacggcagcacccaacccctgggcagctcttgtgaccggtgccctggctggtacatgtttcagttccaccggatcctgcagtacgccctgccgagacaggagtcccagcggccattcttttggattttcatggacaacttgctgctgaccgaggatgaccaggaaactaccactcggttcctgcagaccgaagccgtgaccctgcaggacgtgagaggccgggactaccagaacgccatgcgggtgtggtccaacatccctggactgaaaagcaagcacgcacctctgacccctaaagaagaggagtacctgcaggcccaggtgcggagcagaagcaagctggacgcccctaaggtggatctgctggtgaagaattgcctcctgcccctgagagagtacttcaagtatttcagccagaatagtctgcccctgggaggcagcggcggcggcctgcaggagctgctgagcttcgaggacctgagcgtggacttcacccagaaggagtggcagctgctgaacccctaccagaagaacctgtacaaggacgtgatgctggagaactacagcagcctggtgagcctgggctacgaggtgatcaagcccgacgtgatcttcaagctggagcagggcgaggagccctggatcagggacgccgagatgcccagcagccccagcctggaggtgtggcaggtgggcggcccaagcagcggcgcccctcctcccagcggcggcagcccagccggctccccaacctctaccgaggagggcacctctgagtccgccacccccgagagcggccctggcacctccaccgagcccagcgagggcagcgcacccggcagccctgccggcagccccacctccacagaggagggaaccagcaccgagcccagcgaaggcagcgccccaggcaccagcaccgagcctagtgagcaggagattaaacggatcaacaagatcagaagaagacttgtgaaagacagcaacaccaagaaggccggcaagacaggccccatgaaaaccctgctggttagagtgatgacacccgatctgagagagcggctggaaaacctgagaaagaagcctgaaaatatcccccagcccatcagcaatacatctagagccaacctgaataagctgctgaccgattacaccgaaatgaagaaggcgatcctgcatgtgtactgggaagagttccagaaggaccctgtgggcctgatgagccgggtggcccagcctgccagcaagaagatcgatcagaacaagctgaaacctgagatggacgagaagggcaacctgaccaccgccggctttgcctgctctcagtgtggccagcccctgttcgtgtacaagctggagcaggtgtctgagaagggcaaggcttacaccaactacttcggacggtgcaatgtggccgagcacgaaaagctgatcctgctggcccagctgaagcccgagaaggatagcgacgaagccgtgacatatagcctgggaaagtttgggcagagggccctggatttctacagcattcatgtgaccaaggagtccacccaccccgtgaagcccctggcccagatcgccggaaacagatacgcctccggacctgtgggaaaggccctgagcgacgcatgtatgggcacaatcgcctccttcctgtctaagtaccaggacatcatcatcgaacaccagaaggtggtgaagggcaaccagaagagactggagagcctgcgggagctggccggcaaggaaaacctggaataccctagcgtgaccctgccacctcagcctcacaccaaggagggcgttgatgcctacaacgaagtgatcgcccgggtgcgaatgtgggtgaacctgaacctgtggcagaagctgaagctaagcagagatgatgccaagcctctgctgagactgaagggattcccttcctttcctctggtcgagagacaggccaacgaagtggactggtgggacatggtgtgtaacgtgaagaagctgatcaacgagaaaaaggaggatggcaaggtgttttggcagaatctggctggctacaagagacaggaagccctgagaccatacctgagcagcgaggaagatcggaagaagggaaagaaattcgctcggtaccagctgggcgacctgctgctgcacctggaaaagaagcacggcgaggactggggaaaggtgtacgacgaggcctgggagcggattgacaagaaagtggaaggcctgagcaagcacatcaagctggaagaggaacggagaagcgaggacgcccagagcaaggccgccctgaccgactggctgcgggctaaggccagcttcgtgatcgagggcctgaaggaggccgacaaggacgagttctgcagatgcgagctgaagctgcagaagtggtacggggacctgcggggaaagcccttcgccatcgaagccgagaacagcatcctggacatcagcggcttcagcaagcagtacaactgtgccttcatctggcagaaggacggcgtgaagaagctgaacctgtacctgatcatcaactacttcaagggcggcaagctgcggttcaagaagatcaaacctgaagccttcgaagccaacagattctacaccgtgatcaacaaaaagagcggcgagatcgtgcccatggaggtgaacttcaacttcgacgaccccaacctgatcatcctgcctctggcctttggcaagagacagggcagagaattcatctggaacgacctgctgtccctggaaaccggcagcctgaagctggccaacggaagagtgatcgagaagacactgtacaacagaagaacccggcaggatgagcctgccctgttcgtggccctgaccttcgagcggcgggaggtcctggactcctccaatatcaaaccaatgaacctgatcggcgtggcaagaggcgaaaacatccccgccgtgatcgccctgaccgaccccgagggctgcccactgagccggtttaaggatagcctgggaaacccaacccacatcctgagaatcggcgagagctataaggagaagcagcggaccatccaggccaagaaggaggtggagcagcggagagccggcggctacagccggaagtacgccagcaaagccaagaatctggcagacgatatggtgagaaacaccgctagagatctgctgtactacgccgtgacccaggatgccatgctgatcttcgccaacctgagccggggcttcggccggcagggcaagcggaccttcatggccgagagacagtacacacggatggaggactggctgaccgccaagctggcctacgagggcctgagcaagacctacctgtccaagacactggcccagtacacctccaagacatgcagcaactgtgggtttaccatcaccagcgccgactacgacagggtgctggagaagctgaagaagacagcaacaggctggatgaccacaattaacggcaaggagctgaaggtggagggccagattacctactacaacagatacaagagacagaacgtagtcaaggacctgtccgtcgagctggatagactgagcgaagaatctgtgaacaacgacatctcctcctggacaaagggcagaagcggagaagctctgagcctcctgaagaaaagattctcccatagacccgtgcaggagaagttcgtgtgcctgaactgcggcttcgagacacacgcagccgagcaagccgccctgaacatcgccagatcctggctgttcctgcggagccaggagtacaagaaataccagacaaacaagacaaccggcaacaccgataagagagccttcgtcgagacctggcagtccttttaccggaagaagcttaaggaggtgtggaaacctgccgtgcggtctggcggatctggcggaggctccaccagccccaagaaaaagagaaaagtctaagctgccttctgcggggcttgccttctggccatgcccttcttctctcccttgcacctgtacctcttggtctttgaataaagcctgagtaggaaggctagcaaaaaaaaaaaaaaaaaaaaaaaaaaaaaaaaaaaaaaaaaaaaaaaaaaaaaaaaaaaaaaaaaaaaaaaaaaaaaaaa

SEQ ID NO: 12715 - RNA, 5785 nt, synthetic construct
  source 1..5785: mol_type = other RNA
aggaaataagagagaaaagaagagtaagaagaaatataagagccaccatggcccctaagaagaagcgtaaagtgagccggatggaacgcctcgtctacgaggtgcggcagaagtgcagaaacatcgaggacatctgcatctcctgcggatctctgaacgtgaccctggagcacccactgttcatcggcggcatgtgccagaactgtaaaaactgttttctggagtgtgcctatcaatacgacgatgacggctaccagagctactgcaccatctgttgcggcggaagagaggtgctgatgtgtggaaataacaactgctgccggtgcttctgcgtggaatgcgtggacctgctggtgggccccggcgccgcccaggccgctattaaggaagatccttggaactgctacatgtgcggccacaagggcacatacggcctgctgagacggagagaggactggcctagcagactgcagatgttcttcgccaataaccacgaccaggagttcgacccccctaaggtgtaccctcccgtccccgccgagaagagaaagcccatccgggtcctgagcctgttcgatggcatcgccaccggtctgctggtgctgaaggacctgggcatccaggtggataggtacattgcctccgaggtgtgcgaggactccatcaccgtgggaatggtgcgtcatcagggcaagatcatgtacgtgggcgacgtgcggagcgtgacacagaagcatatccaggagtggggccctttcgacctggtgatcggcggcagcccttgcaatgacctgagcatcgtgaacccagcccggaagggcctgtacgagggaaccggcagactgttcttcgagttttacagactgctgcacgacgcccggcctaaggaaggcgacgaccggcccttcttttggctgttcgagaatgtggtggccatgggagtcagcgacaagcgggatattagccggttcctggagagcaaccccgtgatgatcgatgccaaggaagtgagcgccgcccaccgggccagatacttctggggcaatctgcctggcatgaacagacccctggccagcaccgtgaacgacaagctggagctgcaggagtgcctggagcacggccggatcgccaagttcagcaaggtgagaaccatcaccacccgaagcaacagcatcaaacaaggcaaggaccagcactttcctgtgttcatgaacgagaaggaggacatcctgtggtgtaccgagatggagagagtgttcgggttcccagtccactacacagatgtcagcaacatgtctagactggccagacagagactgctgggaagaagctggtccgtccctgtgatcagacacctgttcgcccctctgaaggagtacttcgcctgcgtgagcagcggcaacagcaacgccaacagccggggccccagcttctctagcggcctggtgccactgtccctgagagggagccacatgggccccatggagatctacaaaaccgtgagcgcctggaagcggcagcctgtgcgcgtgctgagcctgtttcggaatatcgataaagtcctgaaaagcctgggattcctggagagcggctctggctccggcggtggcaccctgaagtacgtggaggatgtgacaaacgtggtcagacgggatgtggagaagtggggccccttcgatctggtgtacggcagcacccaacccctgggcagctcttgtgaccggtgccctggctggtacatgtttcagttccaccggatcctgcagtacgccctgccgagacaggagtcccagcggccattcttttggattttcatggacaacttgctgctgaccgaggatgaccaggaaactaccactcggttcctgcagaccgaagccgtgaccctgcaggacgtgagaggccgggactaccagaacgccatgcgggtgtggtccaacatccctggactgaaaagcaagcacgcacctctgacccctaaagaagaggagtacctgcaggcccaggtgcggagcagaagcaagctggacgcccctaaggtggatctgctggtgaagaattgcctcctgcccctgagagagtacttcaagtatttcagccagaatagtctgcccctgggaggcagcggcggcggccaggccgccgtgaccttcgaggacgtggccgtgctgctgagcagggaggagtggtgcaggctggcccccgcccagagggacctgtacagggacgtgatgctggagacctacaggaacctgatcagcctgggcaccggcctgaccggccccaagcccggcgtgatcagccagctggagaggggccacgagccctgggtgctggacgtgcagagcaccaagggcagggtggacggcagcgactgcggcggcccaagcagcggcgcccctcctcccagcggcggcagcccagccggctccccaacctctaccgaggagggcacctctgagtccgccacccccgagagcggccctggcacctccaccgagcccagcgagggcagcgcacccggcagccctgccggcagccccacctccacagaggagggaaccagcaccgagcccagcgaaggcagcgccccaggcaccagcaccgagcctagtgagcaggagattaaacggatcaacaagatcagaagaagacttgtgaaagacagcaacaccaagaaggccggcaagacaggccccatgaaaaccctgctggttagagtgatgacacccgatctgagagagcggctggaaaacctgagaaagaagcctgaaaatatcccccagcccatcagcaatacatctagagccaacctgaataagctgctgaccgattacaccgaaatgaagaaggcgatcctgcatgtgtactgggaagagttccagaaggaccctgtgggcctgatgagccgggtggcccagcctgccagcaagaagatcgatcagaacaagctgaaacctgagatggacgagaagggcaacctgaccaccgccggctttgcctgctctcagtgtggccagcccctgttcgtgtacaagctggagcaggtgtctgagaagggcaaggcttacaccaactacttcggacggtgcaatgtggccgagcacgaaaagctgatcctgctggcccagctgaagcccgagaaggatagcgacgaagccgtgacatatagcctgggaaagtttgggcagagggccctggatttctacagcattcatgtgaccaaggagtccacccaccccgtgaagcccctggcccagatcgccggaaacagatacgcctccggacctgtgggaaaggccctgagcgacgcatgtatgggcacaatcgcctccttcctgtctaagtaccaggacatcatcatcgaacaccagaaggtggtgaagggcaaccagaagagactggagagcctgcgggagctggccggcaaggaaaacctggaataccctagcgtgaccctgccacctcagcctcacaccaaggagggcgttgatgcctacaacgaagtgatcgcccgggtgcgaatgtgggtgaacctgaacctgtggcagaagctgaagctaagcagagatgatgccaagcctctgctgagactgaagggattcccttcctttcctctggtcgagagacaggccaacgaagtggactggtgggacatggtgtgtaacgtgaagaagctgatcaacgagaaaaaggaggatggcaaggtgttttggcagaatctggctggctacaagagacaggaagccctgagaccatacctgagcagcgaggaagatcggaagaagggaaagaaattcgctcggtaccagctgggcgacctgctgctgcacctggaaaagaagcacggcgaggactggggaaaggtgtacgacgaggcctgggagcggattgacaagaaagtggaaggcctgagcaagcacatcaagctggaagaggaacggagaagcgaggacgcccagagcaaggccgccctgaccgactggctgcgggctaaggccagcttcgtgatcgagggcctgaaggaggccgacaaggacgagttctgcagatgcgagctgaagctgcagaagtggtacggggacctgcggggaaagcccttcgccatcgaagccgagaacagcatcctggacatcagcggcttcagcaagcagtacaactgtgccttcatctggcagaaggacggcgtgaagaagctgaacctgtacctgatcatcaactacttcaagggcggcaagctgcggttcaagaagatcaaacctgaagccttcgaagccaacagattctacaccgtgatcaacaaaaagagcggcgagatcgtgcccatggaggtgaacttcaacttcgacgaccccaacctgatcatcctgcctctggcctttggcaagagacagggcagagaattcatctggaacgacctgctgtccctggaaaccggcagcctgaagctggccaacggaagagtgatcgagaagacactgtacaacagaagaacccggcaggatgagcctgccctgttcgtggccctgaccttcgagcggcgggaggtcctggactcctccaatatcaaaccaatgaacctgatcggcgtggcaagaggcgaaaacatccccgccgtgatcgccctgaccgaccccgagggctgcccactgagccggtttaaggatagcctgggaaacccaacccacatcctgagaatcggcgagagctataaggagaagcagcggaccatccaggccaagaaggaggtggagcagcggagagccggcggctacagccggaagtacgccagcaaagccaagaatctggcagacgatatggtgagaaacaccgctagagatctgctgtactacgccgtgacccaggatgccatgctgatcttcgccaacctgagccggggcttcggccggcagggcaagcggaccttcatggccgagagacagtacacacggatggaggactggctgaccgccaagctggcctacgagggcctgagcaagacctacctgtccaagacactggcccagtacacctccaagacatgcagcaactgtgggtttaccatcaccagcgccgactacgacagggtgctggagaagctgaagaagacagcaacaggctggatgaccacaattaacggcaaggagctgaaggtggagggccagattacctactacaacagatacaagagacagaacgtagtcaaggacctgtccgtcgagctggatagactgagcgaagaatctgtgaacaacgacatctcctcctggacaaagggcagaagcggagaagctctgagcctcctgaagaaaagattctcccatagacccgtgcaggagaagttcgtgtgcctgaactgcggcttcgagacacacgcagccgagcaagccgccctgaacatcgccagatcctggctgttcctgcggagccaggagtacaagaaataccagacaaacaagacaaccggcaacaccgataagagagccttcgtcgagacctggcagtccttttaccggaagaagcttaaggaggtgtggaaacctgccgtgcggtctggcggatctggcggaggctccaccagccccaagaaaaagagaaaagtctaagctgccttctgcggggcttgccttctggccatgcccttcttctctcccttgcacctgtacctcttggtctttgaataaagcctgagtaggaaggctagcaaaaaaaaaaaaaaaaaaaaaaaaaaaaaaaaaaaaaaaaaaaaaaaaaaaaaaaaaaaaaaaaaaaaaaaaaaaaaaaa

SEQ ID NO: 12716 - RNA, 5785 nt, synthetic construct
  source 1..5785: mol_type = other RNA
aggaaataagagagaaaagaagagtaagaagaaatataagagccaccatggcccctaagaagaagcgtaaagtgagccggatggaacgcctcgtctacgaggtgcggcagaagtgcagaaacatcgaggacatctgcatctcctgcggatctctgaacgtgaccctggagcacccactgttcatcggcggcatgtgccagaactgtaaaaactgttttctggagtgtgcctatcaatacgacgatgacggctaccagagctactgcaccatctgttgcggcggaagagaggtgctgatgtgtggaaataacaactgctgccggtgcttctgcgtggaatgcgtggacctgctggtgggccccggcgccgcccaggccgctattaaggaagatccttggaactgctacatgtgcggccacaagggcacatacggcctgctgagacggagagaggactggcctagcagactgcagatgttcttcgccaataaccacgaccaggagttcgacccccctaaggtgtaccctcccgtccccgccgagaagagaaagcccatccgggtcctgagcctgttcgatggcatcgccaccggtctgctggtgctgaaggacctgggcatccaggtggataggtacattgcctccgaggtgtgcgaggactccatcaccgtgggaatggtgcgtcatcagggcaagatcatgtacgtgggcgacgtgcggagcgtgacacagaagcatatccaggagtggggccctttcgacctggtgatcggcggcagcccttgcaatgacctgagcatcgtgaacccagcccggaagggcctgtacgagggaaccggcagactgttcttcgagttttacagactgctgcacgacgcccggcctaaggaaggcgacgaccggcccttcttttggctgttcgagaatgtggtggccatgggagtcagcgacaagcgggatattagccggttcctggagagcaaccccgtgatgatcgatgccaaggaagtgagcgccgcccaccgggccagatacttctggggcaatctgcctggcatgaacagacccctggccagcaccgtgaacgacaagctggagctgcaggagtgcctggagcacggccggatcgccaagttcagcaaggtgagaaccatcaccacccgaagcaacagcatcaaacaaggcaaggaccagcactttcctgtgttcatgaacgagaaggaggacatcctgtggtgtaccgagatggagagagtgttcgggttcccagtccactacacagatgtcagcaacatgtctagactggccagacagagactgctgggaagaagctggtccgtccctgtgatcagacacctgttcgcccctctgaaggagtacttcgcctgcgtgagcagcggcaacagcaacgccaacagccggggccccagcttctctagcggcctggtgccactgtccctgagagggagccacatgggccccatggagatctacaaaaccgtgagcgcctggaagcggcagcctgtgcgcgtgctgagcctgtttcggaatatcgataaagtcctgaaaagcctgggattcctggagagcggctctggctccggcggtggcaccctgaagtacgtggaggatgtgacaaacgtggtcagacgggatgtggagaagtggggccccttcgatctggtgtacggcagcacccaacccctgggcagctcttgtgaccggtgccctggctggtacatgtttcagttccaccggatcctgcagtacgccctgccgagacaggagtcccagcggccattcttttggattttcatggacaacttgctgctgaccgaggatgaccaggaaactaccactcggttcctgcagaccgaagccgtgaccctgcaggacgtgagaggccgggactaccagaacgccatgcgggtgtggtccaacatccctggactgaaaagcaagcacgcacctctgacccctaaagaagaggagtacctgcaggcccaggtgcggagcagaagcaagctggacgcccctaaggtggatctgctggtgaagaattgcctcctgcccctgagagagtacttcaagtatttcagccagaatagtctgcccctgggaggcagcggcggcggcagccaggaggccgtgaccttcgaggacgtggccgtgaacttcagcaacgaggagtggcagtgcctgacccacgcccagaggcacctgtacaaggacgtgatgctggagaactacggcaacgtggtgagcctgggcttccccttccccaagccccccctgatcagccacctggagcaggaggccgagctgtgcgtgcaggacggccaggacagggagttcctgagctgcagccaccccgtgagcggcggcccaagcagcggcgcccctcctcccagcggcggcagcccagccggctccccaacctctaccgaggagggcacctctgagtccgccacccccgagagcggccctggcacctccaccgagcccagcgagggcagcgcacccggcagccctgccggcagccccacctccacagaggagggaaccagcaccgagcccagcgaaggcagcgccccaggcaccagcaccgagcctagtgagcaggagattaaacggatcaacaagatcagaagaagacttgtgaaagacagcaacaccaagaaggccggcaagacaggccccatgaaaaccctgctggttagagtgatgacacccgatctgagagagcggctggaaaacctgagaaagaagcctgaaaatatcccccagcccatcagcaatacatctagagccaacctgaataagctgctgaccgattacaccgaaatgaagaaggcgatcctgcatgtgtactgggaagagttccagaaggaccctgtgggcctgatgagccgggtggcccagcctgccagcaagaagatcgatcagaacaagctgaaacctgagatggacgagaagggcaacctgaccaccgccggctttgcctgctctcagtgtggccagcccctgttcgtgtacaagctggagcaggtgtctgagaagggcaaggcttacaccaactacttcggacggtgcaatgtggccgagcacgaaaagctgatcctgctggcccagctgaagcccgagaaggatagcgacgaagccgtgacatatagcctgggaaagtttgggcagagggccctggatttctacagcattcatgtgaccaaggagtccacccaccccgtgaagcccctggcccagatcgccggaaacagatacgcctccggacctgtgggaaaggccctgagcgacgcatgtatgggcacaatcgcctccttcctgtctaagtaccaggacatcatcatcgaacaccagaaggtggtgaagggcaaccagaagagactggagagcctgcgggagctggccggcaaggaaaacctggaataccctagcgtgaccctgccacctcagcctcacaccaaggagggcgttgatgcctacaacgaagtgatcgcccgggtgcgaatgtgggtgaacctgaacctgtggcagaagctgaagctaagcagagatgatgccaagcctctgctgagactgaagggattcccttcctttcctctggtcgagagacaggccaacgaagtggactggtgggacatggtgtgtaacgtgaagaagctgatcaacgagaaaaaggaggatggcaaggtgttttggcagaatctggctggctacaagagacaggaagccctgagaccatacctgagcagcgaggaagatcggaagaagggaaagaaattcgctcggtaccagctgggcgacctgctgctgcacctggaaaagaagcacggcgaggactggggaaaggtgtacgacgaggcctgggagcggattgacaagaaagtggaaggcctgagcaagcacatcaagctggaagaggaacggagaagcgaggacgcccagagcaaggccgccctgaccgactggctgcgggctaaggccagcttcgtgatcgagggcctgaaggaggccgacaaggacgagttctgcagatgcgagctgaagctgcagaagtggtacggggacctgcggggaaagcccttcgccatcgaagccgagaacagcatcctggacatcagcggcttcagcaagcagtacaactgtgccttcatctggcagaaggacggcgtgaagaagctgaacctgtacctgatcatcaactacttcaagggcggcaagctgcggttcaagaagatcaaacctgaagccttcgaagccaacagattctacaccgtgatcaacaaaaagagcggcgagatcgtgcccatggaggtgaacttcaacttcgacgaccccaacctgatcatcctgcctctggcctttggcaagagacagggcagagaattcatctggaacgacctgctgtccctggaaaccggcagcctgaagctggccaacggaagagtgatcgagaagacactgtacaacagaagaacccggcaggatgagcctgccctgttcgtggccctgaccttcgagcggcgggaggtcctggactcctccaatatcaaaccaatgaacctgatcggcgtggcaagaggcgaaaacatccccgccgtgatcgccctgaccgaccccgagggctgcccactgagccggtttaaggatagcctgggaaacccaacccacatcctgagaatcggcgagagctataaggagaagcagcggaccatccaggccaagaaggaggtggagcagcggagagccggcggctacagccggaagtacgccagcaaagccaagaatctggcagacgatatggtgagaaacaccgctagagatctgctgtactacgccgtgacccaggatgccatgctgatcttcgccaacctgagccggggcttcggccggcagggcaagcggaccttcatggccgagagacagtacacacggatggaggactggctgaccgccaagctggcctacgagggcctgagcaagacctacctgtccaagacactggcccagtacacctccaagacatgcagcaactgtgggtttaccatcaccagcgccgactacgacagggtgctggagaagctgaagaagacagcaacaggctggatgaccacaattaacggcaaggagctgaaggtggagggccagattacctactacaacagatacaagagacagaacgtagtcaaggacctgtccgtcgagctggatagactgagcgaagaatctgtgaacaacgacatctcctcctggacaaagggcagaagcggagaagctctgagcctcctgaagaaaagattctcccatagacccgtgcaggagaagttcgtgtgcctgaactgcggcttcgagacacacgcagccgagcaagccgccctgaacatcgccagatcctggctgttcctgcggagccaggagtacaagaaataccagacaaacaagacaaccggcaacaccgataagagagccttcgtcgagacctggcagtccttttaccggaagaagcttaaggaggtgtggaaacctgccgtgcggtctggcggatctggcggaggctccaccagccccaagaaaaagagaaaagtctaagctgccttctgcggggcttgccttctggccatgcccttcttctctcccttgcacctgtacctcttggtctttgaataaagcctgagtaggaaggctagcaaaaaaaaaaaaaaaaaaaaaaaaaaaaaaaaaaaaaaaaaaaaaaaaaaaaaaaaaaaaaaaaaaaaaaaaaaaaaaaa

SEQ ID NO: 12717 - RNA, 5785 nt, synthetic construct
  source 1..5785: mol_type = other RNA
aggaaataagagagaaaagaagagtaagaagaaatataagagccaccatggcccctaagaagaagcgtaaagtgagccggatggaacgcctcgtctacgaggtgcggcagaagtgcagaaacatcgaggacatctgcatctcctgcggatctctgaacgtgaccctggagcacccactgttcatcggcggcatgtgccagaactgtaaaaactgttttctggagtgtgcctatcaatacgacgatgacggctaccagagctactgcaccatctgttgcggcggaagagaggtgctgatgtgtggaaataacaactgctgccggtgcttctgcgtggaatgcgtggacctgctggtgggccccggcgccgcccaggccgctattaaggaagatccttggaactgctacatgtgcggccacaagggcacatacggcctgctgagacggagagaggactggcctagcagactgcagatgttcttcgccaataaccacgaccaggagttcgacccccctaaggtgtaccctcccgtccccgccgagaagagaaagcccatccgggtcctgagcctgttcgatggcatcgccaccggtctgctggtgctgaaggacctgggcatccaggtggataggtacattgcctccgaggtgtgcgaggactccatcaccgtgggaatggtgcgtcatcagggcaagatcatgtacgtgggcgacgtgcggagcgtgacacagaagcatatccaggagtggggccctttcgacctggtgatcggcggcagcccttgcaatgacctgagcatcgtgaacccagcccggaagggcctgtacgagggaaccggcagactgttcttcgagttttacagactgctgcacgacgcccggcctaaggaaggcgacgaccggcccttcttttggctgttcgagaatgtggtggccatgggagtcagcgacaagcgggatattagccggttcctggagagcaaccccgtgatgatcgatgccaaggaagtgagcgccgcccaccgggccagatacttctggggcaatctgcctggcatgaacagacccctggccagcaccgtgaacgacaagctggagctgcaggagtgcctggagcacggccggatcgccaagttcagcaaggtgagaaccatcaccacccgaagcaacagcatcaaacaaggcaaggaccagcactttcctgtgttcatgaacgagaaggaggacatcctgtggtgtaccgagatggagagagtgttcgggttcccagtccactacacagatgtcagcaacatgtctagactggccagacagagactgctgggaagaagctggtccgtccctgtgatcagacacctgttcgcccctctgaaggagtacttcgcctgcgtgagcagcggcaacagcaacgccaacagccggggccccagcttctctagcggcctggtgccactgtccctgagagggagccacatgggccccatggagatctacaaaaccgtgagcgcctggaagcggcagcctgtgcgcgtgctgagcctgtttcggaatatcgataaagtcctgaaaagcctgggattcctggagagcggctctggctccggcggtggcaccctgaagtacgtggaggatgtgacaaacgtggtcagacgggatgtggagaagtggggccccttcgatctggtgtacggcagcacccaacccctgggcagctcttgtgaccggtgccctggctggtacatgtttcagttccaccggatcctgcagtacgccctgccgagacaggagtcccagcggccattcttttggattttcatggacaacttgctgctgaccgaggatgaccaggaaactaccactcggttcctgcagaccgaagccgtgaccctgcaggacgtgagaggccgggactaccagaacgccatgcgggtgtggtccaacatccctggactgaaaagcaagcacgcacctctgacccctaaagaagaggagtacctgcaggcccaggtgcggagcagaagcaagctggacgcccctaaggtggatctgctggtgaagaattgcctcctgcccctgagagagtacttcaagtatttcagccagaatagtctgcccctgggaggcagcggcggcggcaagcccctggccgtgaggttcgccgacgtggccgtgtacttcagccccgaggagtggggctgcctgctgcccgcccagagggccctgtacagggacgtgatgagggagacctacggccacctgggcgccctgggcttccccggccccaagcccgccctgatcagctggatggagcaggagagcgaggcctggagccccgacgcccaggaccccgaggagggcgagagcctgggcggcgccctgggcggcccaagcagcggcgcccctcctcccagcggcggcagcccagccggctccccaacctctaccgaggagggcacctctgagtccgccacccccgagagcggccctggcacctccaccgagcccagcgagggcagcgcacccggcagccctgccggcagccccacctccacagaggagggaaccagcaccgagcccagcgaaggcagcgccccaggcaccagcaccgagcctagtgagcaggagattaaacggatcaacaagatcagaagaagacttgtgaaagacagcaacaccaagaaggccggcaagacaggccccatgaaaaccctgctggttagagtgatgacacccgatctgagagagcggctggaaaacctgagaaagaagcctgaaaatatcccccagcccatcagcaatacatctagagccaacctgaataagctgctgaccgattacaccgaaatgaagaaggcgatcctgcatgtgtactgggaagagttccagaaggaccctgtgggcctgatgagccgggtggcccagcctgccagcaagaagatcgatcagaacaagctgaaacctgagatggacgagaagggcaacctgaccaccgccggctttgcctgctctcagtgtggccagcccctgttcgtgtacaagctggagcaggtgtctgagaagggcaaggcttacaccaactacttcggacggtgcaatgtggccgagcacgaaaagctgatcctgctggcccagctgaagcccgagaaggatagcgacgaagccgtgacatatagcctgggaaagtttgggcagagggccctggatttctacagcattcatgtgaccaaggagtccacccaccccgtgaagcccctggcccagatcgccggaaacagatacgcctccggacctgtgggaaaggccctgagcgacgcatgtatgggcacaatcgcctccttcctgtctaagtaccaggacatcatcatcgaacaccagaaggtggtgaagggcaaccagaagagactggagagcctgcgggagctggccggcaaggaaaacctggaataccctagcgtgaccctgccacctcagcctcacaccaaggagggcgttgatgcctacaacgaagtgatcgcccgggtgcgaatgtgggtgaacctgaacctgtggcagaagctgaagctaagcagagatgatgccaagcctctgctgagactgaagggattcccttcctttcctctggtcgagagacaggccaacgaagtggactggtgggacatggtgtgtaacgtgaagaagctgatcaacgagaaaaaggaggatggcaaggtgttttggcagaatctggctggctacaagagacaggaagccctgagaccatacctgagcagcgaggaagatcggaagaagggaaagaaattcgctcggtaccagctgggcgacctgctgctgcacctggaaaagaagcacggcgaggactggggaaaggtgtacgacgaggcctgggagcggattgacaagaaagtggaaggcctgagcaagcacatcaagctggaagaggaacggagaagcgaggacgcccagagcaaggccgccctgaccgactggctgcgggctaaggccagcttcgtgatcgagggcctgaaggaggccgacaaggacgagttctgcagatgcgagctgaagctgcagaagtggtacggggacctgcggggaaagcccttcgccatcgaagccgagaacagcatcctggacatcagcggcttcagcaagcagtacaactgtgccttcatctggcagaaggacggcgtgaagaagctgaacctgtacctgatcatcaactacttcaagggcggcaagctgcggttcaagaagatcaaacctgaagccttcgaagccaacagattctacaccgtgatcaacaaaaagagcggcgagatcgtgcccatggaggtgaacttcaacttcgacgaccccaacctgatcatcctgcctctggcctttggcaagagacagggcagagaattcatctggaacgacctgctgtccctggaaaccggcagcctgaagctggccaacggaagagtgatcgagaagacactgtacaacagaagaacccggcaggatgagcctgccctgttcgtggccctgaccttcgagcggcgggaggtcctggactcctccaatatcaaaccaatgaacctgatcggcgtggcaagaggcgaaaacatccccgccgtgatcgccctgaccgaccccgagggctgcccactgagccggtttaaggatagcctgggaaacccaacccacatcctgagaatcggcgagagctataaggagaagcagcggaccatccaggccaagaaggaggtggagcagcggagagccggcggctacagccggaagtacgccagcaaagccaagaatctggcagacgatatggtgagaaacaccgctagagatctgctgtactacgccgtgacccaggatgccatgctgatcttcgccaacctgagccggggcttcggccggcagggcaagcggaccttcatggccgagagacagtacacacggatggaggactggctgaccgccaagctggcctacgagggcctgagcaagacctacctgtccaagacactggcccagtacacctccaagacatgcagcaactgtgggtttaccatcaccagcgccgactacgacagggtgctggagaagctgaagaagacagcaacaggctggatgaccacaattaacggcaaggagctgaaggtggagggccagattacctactacaacagatacaagagacagaacgtagtcaaggacctgtccgtcgagctggatagactgagcgaagaatctgtgaacaacgacatctcctcctggacaaagggcagaagcggagaagctctgagcctcctgaagaaaagattctcccatagacccgtgcaggagaagttcgtgtgcctgaactgcggcttcgagacacacgcagccgagcaagccgccctgaacatcgccagatcctggctgttcctgcggagccaggagtacaagaaataccagacaaacaagacaaccggcaacaccgataagagagccttcgtcgagacctggcagtccttttaccggaagaagcttaaggaggtgtggaaacctgccgtgcggtctggcggatctggcggaggctccaccagccccaagaaaaagagaaaagtctaagctgccttctgcggggcttgccttctggccatgcccttcttctctcccttgcacctgtacctcttggtctttgaataaagcctgagtaggaaggctagcaaaaaaaaaaaaaaaaaaaaaaaaaaaaaaaaaaaaaaaaaaaaaaaaaaaaaaaaaaaaaaaaaaaaaaaaaaaaaaaa

SEQ ID NO: 12718 - RNA, 5785 nt, synthetic construct
  source 1..5785: mol_type = other RNA
aggaaataagagagaaaagaagagtaagaagaaatataagagccaccatggcccctaagaagaagcgtaaagtgagccggatggaacgcctcgtctacgaggtgcggcagaagtgcagaaacatcgaggacatctgcatctcctgcggatctctgaacgtgaccctggagcacccactgttcatcggcggcatgtgccagaactgtaaaaactgttttctggagtgtgcctatcaatacgacgatgacggctaccagagctactgcaccatctgttgcggcggaagagaggtgctgatgtgtggaaataacaactgctgccggtgcttctgcgtggaatgcgtggacctgctggtgggccccggcgccgcccaggccgctattaaggaagatccttggaactgctacatgtgcggccacaagggcacatacggcctgctgagacggagagaggactggcctagcagactgcagatgttcttcgccaataaccacgaccaggagttcgacccccctaaggtgtaccctcccgtccccgccgagaagagaaagcccatccgggtcctgagcctgttcgatggcatcgccaccggtctgctggtgctgaaggacctgggcatccaggtggataggtacattgcctccgaggtgtgcgaggactccatcaccgtgggaatggtgcgtcatcagggcaagatcatgtacgtgggcgacgtgcggagcgtgacacagaagcatatccaggagtggggccctttcgacctggtgatcggcggcagcccttgcaatgacctgagcatcgtgaacccagcccggaagggcctgtacgagggaaccggcagactgttcttcgagttttacagactgctgcacgacgcccggcctaaggaaggcgacgaccggcccttcttttggctgttcgagaatgtggtggccatgggagtcagcgacaagcgggatattagccggttcctggagagcaaccccgtgatgatcgatgccaaggaagtgagcgccgcccaccgggccagatacttctggggcaatctgcctggcatgaacagacccctggccagcaccgtgaacgacaagctggagctgcaggagtgcctggagcacggccggatcgccaagttcagcaaggtgagaaccatcaccacccgaagcaacagcatcaaacaaggcaaggaccagcactttcctgtgttcatgaacgagaaggaggacatcctgtggtgtaccgagatggagagagtgttcgggttcccagtccactacacagatgtcagcaacatgtctagactggccagacagagactgctgggaagaagctggtccgtccctgtgatcagacacctgttcgcccctctgaaggagtacttcgcctgcgtgagcagcggcaacagcaacgccaacagccggggccccagcttctctagcggcctggtgccactgtccctgagagggagccacatgggccccatggagatctacaaaaccgtgagcgcctggaagcggcagcctgtgcgcgtgctgagcctgtttcggaatatcgataaagtcctgaaaagcctgggattcctggagagcggctctggctccggcggtggcaccctgaagtacgtggaggatgtgacaaacgtggtcagacgggatgtggagaagtggggccccttcgatctggtgtacggcagcacccaacccctgggcagctcttgtgaccggtgccctggctggtacatgtttcagttccaccggatcctgcagtacgccctgccgagacaggagtcccagcggccattcttttggattttcatggacaacttgctgctgaccgaggatgaccaggaaactaccactcggttcctgcagaccgaagccgtgaccctgcaggacgtgagaggccgggactaccagaacgccatgcgggtgtggtccaacatccctggactgaaaagcaagcacgcacctctgacccctaaagaagaggagtacctgcaggcccaggtgcggagcagaagcaagctggacgcccctaaggtggatctgctggtgaagaattgcctcctgcccctgagagagtacttcaagtatttcagccagaatagtctgcccctgggaggcagcggcggcggcctgaagggcctggtgaccttcgaggacgtggccgtggagttcacccaggaggagtgggccctgctggaccccgcccagaggaccctgtacagggacgtgatgctggagaacttcaggaacctggccagcctgggcgaccaggtggacaagcccggcctgatcgcccagctggagcaggaggacaaggtgatgaccgaggagaggggcatcctgcccggcacctgccccgacgtggagaaccccggcggcccaagcagcggcgcccctcctcccagcggcggcagcccagccggctccccaacctctaccgaggagggcacctctgagtccgccacccccgagagcggccctggcacctccaccgagcccagcgagggcagcgcacccggcagccctgccggcagccccacctccacagaggagggaaccagcaccgagcccagcgaaggcagcgccccaggcaccagcaccgagcctagtgagcaggagattaaacggatcaacaagatcagaagaagacttgtgaaagacagcaacaccaagaaggccggcaagacaggccccatgaaaaccctgctggttagagtgatgacacccgatctgagagagcggctggaaaacctgagaaagaagcctgaaaatatcccccagcccatcagcaatacatctagagccaacctgaataagctgctgaccgattacaccgaaatgaagaaggcgatcctgcatgtgtactgggaagagttccagaaggaccctgtgggcctgatgagccgggtggcccagcctgccagcaagaagatcgatcagaacaagctgaaacctgagatggacgagaagggcaacctgaccaccgccggctttgcctgctctcagtgtggccagcccctgttcgtgtacaagctggagcaggtgtctgagaagggcaaggcttacaccaactacttcggacggtgcaatgtggccgagcacgaaaagctgatcctgctggcccagctgaagcccgagaaggatagcgacgaagccgtgacatatagcctgggaaagtttgggcagagggccctggatttctacagcattcatgtgaccaaggagtccacccaccccgtgaagcccctggcccagatcgccggaaacagatacgcctccggacctgtgggaaaggccctgagcgacgcatgtatgggcacaatcgcctccttcctgtctaagtaccaggacatcatcatcgaacaccagaaggtggtgaagggcaaccagaagagactggagagcctgcgggagctggccggcaaggaaaacctggaataccctagcgtgaccctgccacctcagcctcacaccaaggagggcgttgatgcctacaacgaagtgatcgcccgggtgcgaatgtgggtgaacctgaacctgtggcagaagctgaagctaagcagagatgatgccaagcctctgctgagactgaagggattcccttcctttcctctggtcgagagacaggccaacgaagtggactggtgggacatggtgtgtaacgtgaagaagctgatcaacgagaaaaaggaggatggcaaggtgttttggcagaatctggctggctacaagagacaggaagccctgagaccatacctgagcagcgaggaagatcggaagaagggaaagaaattcgctcggtaccagctgggcgacctgctgctgcacctggaaaagaagcacggcgaggactggggaaaggtgtacgacgaggcctgggagcggattgacaagaaagtggaaggcctgagcaagcacatcaagctggaagaggaacggagaagcgaggacgcccagagcaaggccgccctgaccgactggctgcgggctaaggccagcttcgtgatcgagggcctgaaggaggccgacaaggacgagttctgcagatgcgagctgaagctgcagaagtggtacggggacctgcggggaaagcccttcgccatcgaagccgagaacagcatcctggacatcagcggcttcagcaagcagtacaactgtgccttcatctggcagaaggacggcgtgaagaagctgaacctgtacctgatcatcaactacttcaagggcggcaagctgcggttcaagaagatcaaacctgaagccttcgaagccaacagattctacaccgtgatcaacaaaaagagcggcgagatcgtgcccatggaggtgaacttcaacttcgacgaccccaacctgatcatcctgcctctggcctttggcaagagacagggcagagaattcatctggaacgacctgctgtccctggaaaccggcagcctgaagctggccaacggaagagtgatcgagaagacactgtacaacagaagaacccggcaggatgagcctgccctgttcgtggccctgaccttcgagcggcgggaggtcctggactcctccaatatcaaaccaatgaacctgatcggcgtggcaagaggcgaaaacatccccgccgtgatcgccctgaccgaccccgagggctgcccactgagccggtttaaggatagcctgggaaacccaacccacatcctgagaatcggcgagagctataaggagaagcagcggaccatccaggccaagaaggaggtggagcagcggagagccggcggctacagccggaagtacgccagcaaagccaagaatctggcagacgatatggtgagaaacaccgctagagatctgctgtactacgccgtgacccaggatgccatgctgatcttcgccaacctgagccggggcttcggccggcagggcaagcggaccttcatggccgagagacagtacacacggatggaggactggctgaccgccaagctggcctacgagggcctgagcaagacctacctgtccaagacactggcccagtacacctccaagacatgcagcaactgtgggtttaccatcaccagcgccgactacgacagggtgctggagaagctgaagaagacagcaacaggctggatgaccacaattaacggcaaggagctgaaggtggagggccagattacctactacaacagatacaagagacagaacgtagtcaaggacctgtccgtcgagctggatagactgagcgaagaatctgtgaacaacgacatctcctcctggacaaagggcagaagcggagaagctctgagcctcctgaagaaaagattctcccatagacccgtgcaggagaagttcgtgtgcctgaactgcggcttcgagacacacgcagccgagcaagccgccctgaacatcgccagatcctggctgttcctgcggagccaggagtacaagaaataccagacaaacaagacaaccggcaacaccgataagagagccttcgtcgagacctggcagtccttttaccggaagaagcttaaggaggtgtggaaacctgccgtgcggtctggcggatctggcggaggctccaccagccccaagaaaaagagaaaagtctaagctgccttctgcggggcttgccttctggccatgcccttcttctctcccttgcacctgtacctcttggtctttgaataaagcctgagtaggaaggctagcaaaaaaaaaaaaaaaaaaaaaaaaaaaaaaaaaaaaaaaaaaaaaaaaaaaaaaaaaaaaaaaaaaaaaaaaaaaaaaaa

SEQ ID NO: 12719 - RNA, 5785 nt, synthetic construct
  source 1..5785: mol_type = other RNA
aggaaataagagagaaaagaagagtaagaagaaatataagagccaccatggcccctaagaagaagcgtaaagtgagccggatggaacgcctcgtctacgaggtgcggcagaagtgcagaaacatcgaggacatctgcatctcctgcggatctctgaacgtgaccctggagcacccactgttcatcggcggcatgtgccagaactgtaaaaactgttttctggagtgtgcctatcaatacgacgatgacggctaccagagctactgcaccatctgttgcggcggaagagaggtgctgatgtgtggaaataacaactgctgccggtgcttctgcgtggaatgcgtggacctgctggtgggccccggcgccgcccaggccgctattaaggaagatccttggaactgctacatgtgcggccacaagggcacatacggcctgctgagacggagagaggactggcctagcagactgcagatgttcttcgccaataaccacgaccaggagttcgacccccctaaggtgtaccctcccgtccccgccgagaagagaaagcccatccgggtcctgagcctgttcgatggcatcgccaccggtctgctggtgctgaaggacctgggcatccaggtggataggtacattgcctccgaggtgtgcgaggactccatcaccgtgggaatggtgcgtcatcagggcaagatcatgtacgtgggcgacgtgcggagcgtgacacagaagcatatccaggagtggggccctttcgacctggtgatcggcggcagcccttgcaatgacctgagcatcgtgaacccagcccggaagggcctgtacgagggaaccggcagactgttcttcgagttttacagactgctgcacgacgcccggcctaaggaaggcgacgaccggcccttcttttggctgttcgagaatgtggtggccatgggagtcagcgacaagcgggatattagccggttcctggagagcaaccccgtgatgatcgatgccaaggaagtgagcgccgcccaccgggccagatacttctggggcaatctgcctggcatgaacagacccctggccagcaccgtgaacgacaagctggagctgcaggagtgcctggagcacggccggatcgccaagttcagcaaggtgagaaccatcaccacccgaagcaacagcatcaaacaaggcaaggaccagcactttcctgtgttcatgaacgagaaggaggacatcctgtggtgtaccgagatggagagagtgttcgggttcccagtccactacacagatgtcagcaacatgtctagactggccagacagagactgctgggaagaagctggtccgtccctgtgatcagacacctgttcgcccctctgaaggagtacttcgcctgcgtgagcagcggcaacagcaacgccaacagccggggccccagcttctctagcggcctggtgccactgtccctgagagggagccacatgggccccatggagatctacaaaaccgtgagcgcctggaagcggcagcctgtgcgcgtgctgagcctgtttcggaatatcgataaagtcctgaaaagcctgggattcctggagagcggctctggctccggcggtggcaccctgaagtacgtggaggatgtgacaaacgtggtcagacgggatgtggagaagtggggccccttcgatctggtgtacggcagcacccaacccctgggcagctcttgtgaccggtgccctggctggtacatgtttcagttccaccggatcctgcagtacgccctgccgagacaggagtcccagcggccattcttttggattttcatggacaacttgctgctgaccgaggatgaccaggaaactaccactcggttcctgcagaccgaagccgtgaccctgcaggacgtgagaggccgggactaccagaacgccatgcgggtgtggtccaacatccctggactgaaaagcaagcacgcacctctgacccctaaagaagaggagtacctgcaggcccaggtgcggagcagaagcaagctggacgcccctaaggtggatctgctggtgaagaattgcctcctgcccctgagagagtacttcaagtatttcagccagaatagtctgcccctgggaggcagcggcggcggcatgatcaacgcccaggagctgctgaccctggaggacgtgaccgtggagttcacctgggaggagtggcagctgctggaccccttccagaaggacctgtacagggacgtgatgctggagatctacagcaacctggtgagcatcggctaccaggtgagcaagcccgacgccctgagcaagctggagaggggcgaggagccctggaccgtggaggacgagaggcacagccagatctgccccgagaacggcggcccaagcagcggcgcccctcctcccagcggcggcagcccagccggctccccaacctctaccgaggagggcacctctgagtccgccacccccgagagcggccctggcacctccaccgagcccagcgagggcagcgcacccggcagccctgccggcagccccacctccacagaggagggaaccagcaccgagcccagcgaaggcagcgccccaggcaccagcaccgagcctagtgagcaggagattaaacggatcaacaagatcagaagaagacttgtgaaagacagcaacaccaagaaggccggcaagacaggccccatgaaaaccctgctggttagagtgatgacacccgatctgagagagcggctggaaaacctgagaaagaagcctgaaaatatcccccagcccatcagcaatacatctagagccaacctgaataagctgctgaccgattacaccgaaatgaagaaggcgatcctgcatgtgtactgggaagagttccagaaggaccctgtgggcctgatgagccgggtggcccagcctgccagcaagaagatcgatcagaacaagctgaaacctgagatggacgagaagggcaacctgaccaccgccggctttgcctgctctcagtgtggccagcccctgttcgtgtacaagctggagcaggtgtctgagaagggcaaggcttacaccaactacttcggacggtgcaatgtggccgagcacgaaaagctgatcctgctggcccagctgaagcccgagaaggatagcgacgaagccgtgacatatagcctgggaaagtttgggcagagggccctggatttctacagcattcatgtgaccaaggagtccacccaccccgtgaagcccctggcccagatcgccggaaacagatacgcctccggacctgtgggaaaggccctgagcgacgcatgtatgggcacaatcgcctccttcctgtctaagtaccaggacatcatcatcgaacaccagaaggtggtgaagggcaaccagaagagactggagagcctgcgggagctggccggcaaggaaaacctggaataccctagcgtgaccctgccacctcagcctcacaccaaggagggcgttgatgcctacaacgaagtgatcgcccgggtgcgaatgtgggtgaacctgaacctgtggcagaagctgaagctaagcagagatgatgccaagcctctgctgagactgaagggattcccttcctttcctctggtcgagagacaggccaacgaagtggactggtgggacatggtgtgtaacgtgaagaagctgatcaacgagaaaaaggaggatggcaaggtgttttggcagaatctggctggctacaagagacaggaagccctgagaccatacctgagcagcgaggaagatcggaagaagggaaagaaattcgctcggtaccagctgggcgacctgctgctgcacctggaaaagaagcacggcgaggactggggaaaggtgtacgacgaggcctgggagcggattgacaagaaagtggaaggcctgagcaagcacatcaagctggaagaggaacggagaagcgaggacgcccagagcaaggccgccctgaccgactggctgcgggctaaggccagcttcgtgatcgagggcctgaaggaggccgacaaggacgagttctgcagatgcgagctgaagctgcagaagtggtacggggacctgcggggaaagcccttcgccatcgaagccgagaacagcatcctggacatcagcggcttcagcaagcagtacaactgtgccttcatctggcagaaggacggcgtgaagaagctgaacctgtacctgatcatcaactacttcaagggcggcaagctgcggttcaagaagatcaaacctgaagccttcgaagccaacagattctacaccgtgatcaacaaaaagagcggcgagatcgtgcccatggaggtgaacttcaacttcgacgaccccaacctgatcatcctgcctctggcctttggcaagagacagggcagagaattcatctggaacgacctgctgtccctggaaaccggcagcctgaagctggccaacggaagagtgatcgagaagacactgtacaacagaagaacccggcaggatgagcctgccctgttcgtggccctgaccttcgagcggcgggaggtcctggactcctccaatatcaaaccaatgaacctgatcggcgtggcaagaggcgaaaacatccccgccgtgatcgccctgaccgaccccgagggctgcccactgagccggtttaaggatagcctgggaaacccaacccacatcctgagaatcggcgagagctataaggagaagcagcggaccatccaggccaagaaggaggtggagcagcggagagccggcggctacagccggaagtacgccagcaaagccaagaatctggcagacgatatggtgagaaacaccgctagagatctgctgtactacgccgtgacccaggatgccatgctgatcttcgccaacctgagccggggcttcggccggcagggcaagcggaccttcatggccgagagacagtacacacggatggaggactggctgaccgccaagctggcctacgagggcctgagcaagacctacctgtccaagacactggcccagtacacctccaagacatgcagcaactgtgggtttaccatcaccagcgccgactacgacagggtgctggagaagctgaagaagacagcaacaggctggatgaccacaattaacggcaaggagctgaaggtggagggccagattacctactacaacagatacaagagacagaacgtagtcaaggacctgtccgtcgagctggatagactgagcgaagaatctgtgaacaacgacatctcctcctggacaaagggcagaagcggagaagctctgagcctcctgaagaaaagattctcccatagacccgtgcaggagaagttcgtgtgcctgaactgcggcttcgagacacacgcagccgagcaagccgccctgaacatcgccagatcctggctgttcctgcggagccaggagtacaagaaataccagacaaacaagacaaccggcaacaccgataagagagccttcgtcgagacctggcagtccttttaccggaagaagcttaaggaggtgtggaaacctgccgtgcggtctggcggatctggcggaggctccaccagccccaagaaaaagagaaaagtctaagctgccttctgcggggcttgccttctggccatgcccttcttctctcccttgcacctgtacctcttggtctttgaataaagcctgagtaggaaggctagcaaaaaaaaaaaaaaaaaaaaaaaaaaaaaaaaaaaaaaaaaaaaaaaaaaaaaaaaaaaaaaaaaaaaaaaaaaaaaaaa

SEQ ID NO: 12720 - RNA, 5785 nt, synthetic construct
  source 1..5785: mol_type = other RNA
aggaaataagagagaaaagaagagtaagaagaaatataagagccaccatggcccctaagaagaagcgtaaagtgagccggatggaacgcctcgtctacgaggtgcggcagaagtgcagaaacatcgaggacatctgcatctcctgcggatctctgaacgtgaccctggagcacccactgttcatcggcggcatgtgccagaactgtaaaaactgttttctggagtgtgcctatcaatacgacgatgacggctaccagagctactgcaccatctgttgcggcggaagagaggtgctgatgtgtggaaataacaactgctgccggtgcttctgcgtggaatgcgtggacctgctggtgggccccggcgccgcccaggccgctattaaggaagatccttggaactgctacatgtgcggccacaagggcacatacggcctgctgagacggagagaggactggcctagcagactgcagatgttcttcgccaataaccacgaccaggagttcgacccccctaaggtgtaccctcccgtccccgccgagaagagaaagcccatccgggtcctgagcctgttcgatggcatcgccaccggtctgctggtgctgaaggacctgggcatccaggtggataggtacattgcctccgaggtgtgcgaggactccatcaccgtgggaatggtgcgtcatcagggcaagatcatgtacgtgggcgacgtgcggagcgtgacacagaagcatatccaggagtggggccctttcgacctggtgatcggcggcagcccttgcaatgacctgagcatcgtgaacccagcccggaagggcctgtacgagggaaccggcagactgttcttcgagttttacagactgctgcacgacgcccggcctaaggaaggcgacgaccggcccttcttttggctgttcgagaatgtggtggccatgggagtcagcgacaagcgggatattagccggttcctggagagcaaccccgtgatgatcgatgccaaggaagtgagcgccgcccaccgggccagatacttctggggcaatctgcctggcatgaacagacccctggccagcaccgtgaacgacaagctggagctgcaggagtgcctggagcacggccggatcgccaagttcagcaaggtgagaaccatcaccacccgaagcaacagcatcaaacaaggcaaggaccagcactttcctgtgttcatgaacgagaaggaggacatcctgtggtgtaccgagatggagagagtgttcgggttcccagtccactacacagatgtcagcaacatgtctagactggccagacagagactgctgggaagaagctggtccgtccctgtgatcagacacctgttcgcccctctgaaggagtacttcgcctgcgtgagcagcggcaacagcaacgccaacagccggggccccagcttctctagcggcctggtgccactgtccctgagagggagccacatgggccccatggagatctacaaaaccgtgagcgcctggaagcggcagcctgtgcgcgtgctgagcctgtttcggaatatcgataaagtcctgaaaagcctgggattcctggagagcggctctggctccggcggtggcaccctgaagtacgtggaggatgtgacaaacgtggtcagacgggatgtggagaagtggggccccttcgatctggtgtacggcagcacccaacccctgggcagctcttgtgaccggtgccctggctggtacatgtttcagttccaccggatcctgcagtacgccctgccgagacaggagtcccagcggccattcttttggattttcatggacaacttgctgctgaccgaggatgaccaggaaactaccactcggttcctgcagaccgaagccgtgaccctgcaggacgtgagaggccgggactaccagaacgccatgcgggtgtggtccaacatccctggactgaaaagcaagcacgcacctctgacccctaaagaagaggagtacctgcaggcccaggtgcggagcagaagcaagctggacgcccctaaggtggatctgctggtgaagaattgcctcctgcccctgagagagtacttcaagtatttcagccagaatagtctgcccctgggaggcagcggcggcggcatggacgtggcccaggagcaggtgaccttccaggacgtggccatctacttcagctgggaggagtgggagtgcctggagcccagccagagggccctgtacagggacgtgatgctggacaacttcagcaacgtggccgccctgggcttctgcagccccaggcccgacctggtgagcaggctggagcagtgggaggagccctgggtggaggacagggacaggcccgagctgcaggccgtgcagaggggcggcccaagcagcggcgcccctcctcccagcggcggcagcccagccggctccccaacctctaccgaggagggcacctctgagtccgccacccccgagagcggccctggcacctccaccgagcccagcgagggcagcgcacccggcagccctgccggcagccccacctccacagaggagggaaccagcaccgagcccagcgaaggcagcgccccaggcaccagcaccgagcctagtgagcaggagattaaacggatcaacaagatcagaagaagacttgtgaaagacagcaacaccaagaaggccggcaagacaggccccatgaaaaccctgctggttagagtgatgacacccgatctgagagagcggctggaaaacctgagaaagaagcctgaaaatatcccccagcccatcagcaatacatctagagccaacctgaataagctgctgaccgattacaccgaaatgaagaaggcgatcctgcatgtgtactgggaagagttccagaaggaccctgtgggcctgatgagccgggtggcccagcctgccagcaagaagatcgatcagaacaagctgaaacctgagatggacgagaagggcaacctgaccaccgccggctttgcctgctctcagtgtggccagcccctgttcgtgtacaagctggagcaggtgtctgagaagggcaaggcttacaccaactacttcggacggtgcaatgtggccgagcacgaaaagctgatcctgctggcccagctgaagcccgagaaggatagcgacgaagccgtgacatatagcctgggaaagtttgggcagagggccctggatttctacagcattcatgtgaccaaggagtccacccaccccgtgaagcccctggcccagatcgccggaaacagatacgcctccggacctgtgggaaaggccctgagcgacgcatgtatgggcacaatcgcctccttcctgtctaagtaccaggacatcatcatcgaacaccagaaggtggtgaagggcaaccagaagagactggagagcctgcgggagctggccggcaaggaaaacctggaataccctagcgtgaccctgccacctcagcctcacaccaaggagggcgttgatgcctacaacgaagtgatcgcccgggtgcgaatgtgggtgaacctgaacctgtggcagaagctgaagctaagcagagatgatgccaagcctctgctgagactgaagggattcccttcctttcctctggtcgagagacaggccaacgaagtggactggtgggacatggtgtgtaacgtgaagaagctgatcaacgagaaaaaggaggatggcaaggtgttttggcagaatctggctggctacaagagacaggaagccctgagaccatacctgagcagcgaggaagatcggaagaagggaaagaaattcgctcggtaccagctgggcgacctgctgctgcacctggaaaagaagcacggcgaggactggggaaaggtgtacgacgaggcctgggagcggattgacaagaaagtggaaggcctgagcaagcacatcaagctggaagaggaacggagaagcgaggacgcccagagcaaggccgccctgaccgactggctgcgggctaaggccagcttcgtgatcgagggcctgaaggaggccgacaaggacgagttctgcagatgcgagctgaagctgcagaagtggtacggggacctgcggggaaagcccttcgccatcgaagccgagaacagcatcctggacatcagcggcttcagcaagcagtacaactgtgccttcatctggcagaaggacggcgtgaagaagctgaacctgtacctgatcatcaactacttcaagggcggcaagctgcggttcaagaagatcaaacctgaagccttcgaagccaacagattctacaccgtgatcaacaaaaagagcggcgagatcgtgcccatggaggtgaacttcaacttcgacgaccccaacctgatcatcctgcctctggcctttggcaagagacagggcagagaattcatctggaacgacctgctgtccctggaaaccggcagcctgaagctggccaacggaagagtgatcgagaagacactgtacaacagaagaacccggcaggatgagcctgccctgttcgtggccctgaccttcgagcggcgggaggtcctggactcctccaatatcaaaccaatgaacctgatcggcgtggcaagaggcgaaaacatccccgccgtgatcgccctgaccgaccccgagggctgcccactgagccggtttaaggatagcctgggaaacccaacccacatcctgagaatcggcgagagctataaggagaagcagcggaccatccaggccaagaaggaggtggagcagcggagagccggcggctacagccggaagtacgccagcaaagccaagaatctggcagacgatatggtgagaaacaccgctagagatctgctgtactacgccgtgacccaggatgccatgctgatcttcgccaacctgagccggggcttcggccggcagggcaagcggaccttcatggccgagagacagtacacacggatggaggactggctgaccgccaagctggcctacgagggcctgagcaagacctacctgtccaagacactggcccagtacacctccaagacatgcagcaactgtgggtttaccatcaccagcgccgactacgacagggtgctggagaagctgaagaagacagcaacaggctggatgaccacaattaacggcaaggagctgaaggtggagggccagattacctactacaacagatacaagagacagaacgtagtcaaggacctgtccgtcgagctggatagactgagcgaagaatctgtgaacaacgacatctcctcctggacaaagggcagaagcggagaagctctgagcctcctgaagaaaagattctcccatagacccgtgcaggagaagttcgtgtgcctgaactgcggcttcgagacacacgcagccgagcaagccgccctgaacatcgccagatcctggctgttcctgcggagccaggagtacaagaaataccagacaaacaagacaaccggcaacaccgataagagagccttcgtcgagacctggcagtccttttaccggaagaagcttaaggaggtgtggaaacctgccgtgcggtctggcggatctggcggaggctccaccagccccaagaaaaagagaaaagtctaagctgccttctgcggggcttgccttctggccatgcccttcttctctcccttgcacctgtacctcttggtctttgaataaagcctgagtaggaaggctagcaaaaaaaaaaaaaaaaaaaaaaaaaaaaaaaaaaaaaaaaaaaaaaaaaaaaaaaaaaaaaaaaaaaaaaaaaaaaaaaa

SEQ ID NO: 12721 - RNA, 5785 nt, synthetic construct
  source 1..5785: mol_type = other RNA
aggaaataagagagaaaagaagagtaagaagaaatataagagccaccatggcccctaagaagaagcgtaaagtgagccggatggaacgcctcgtctacgaggtgcggcagaagtgcagaaacatcgaggacatctgcatctcctgcggatctctgaacgtgaccctggagcacccactgttcatcggcggcatgtgccagaactgtaaaaactgttttctggagtgtgcctatcaatacgacgatgacggctaccagagctactgcaccatctgttgcggcggaagagaggtgctgatgtgtggaaataacaactgctgccggtgcttctgcgtggaatgcgtggacctgctggtgggccccggcgccgcccaggccgctattaaggaagatccttggaactgctacatgtgcggccacaagggcacatacggcctgctgagacggagagaggactggcctagcagactgcagatgttcttcgccaataaccacgaccaggagttcgacccccctaaggtgtaccctcccgtccccgccgagaagagaaagcccatccgggtcctgagcctgttcgatggcatcgccaccggtctgctggtgctgaaggacctgggcatccaggtggataggtacattgcctccgaggtgtgcgaggactccatcaccgtgggaatggtgcgtcatcagggcaagatcatgtacgtgggcgacgtgcggagcgtgacacagaagcatatccaggagtggggccctttcgacctggtgatcggcggcagcccttgcaatgacctgagcatcgtgaacccagcccggaagggcctgtacgagggaaccggcagactgttcttcgagttttacagactgctgcacgacgcccggcctaaggaaggcgacgaccggcccttcttttggctgttcgagaatgtggtggccatgggagtcagcgacaagcgggatattagccggttcctggagagcaaccccgtgatgatcgatgccaaggaagtgagcgccgcccaccgggccagatacttctggggcaatctgcctggcatgaacagacccctggccagcaccgtgaacgacaagctggagctgcaggagtgcctggagcacggccggatcgccaagttcagcaaggtgagaaccatcaccacccgaagcaacagcatcaaacaaggcaaggaccagcactttcctgtgttcatgaacgagaaggaggacatcctgtggtgtaccgagatggagagagtgttcgggttcccagtccactacacagatgtcagcaacatgtctagactggccagacagagactgctgggaagaagctggtccgtccctgtgatcagacacctgttcgcccctctgaaggagtacttcgcctgcgtgagcagcggcaacagcaacgccaacagccggggccccagcttctctagcggcctggtgccactgtccctgagagggagccacatgggccccatggagatctacaaaaccgtgagcgcctggaagcggcagcctgtgcgcgtgctgagcctgtttcggaatatcgataaagtcctgaaaagcctgggattcctggagagcggctctggctccggcggtggcaccctgaagtacgtggaggatgtgacaaacgtggtcagacgggatgtggagaagtggggccccttcgatctggtgtacggcagcacccaacccctgggcagctcttgtgaccggtgccctggctggtacatgtttcagttccaccggatcctgcagtacgccctgccgagacaggagtcccagcggccattcttttggattttcatggacaacttgctgctgaccgaggatgaccaggaaactaccactcggttcctgcagaccgaagccgtgaccctgcaggacgtgagaggccgggactaccagaacgccatgcgggtgtggtccaacatccctggactgaaaagcaagcacgcacctctgacccctaaagaagaggagtacctgcaggcccaggtgcggagcagaagcaagctggacgcccctaaggtggatctgctggtgaagaattgcctcctgcccctgagagagtacttcaagtatttcagccagaatagtctgcccctgggaggcagcggcggcggcgaggagctgcccgtggtgttcgaggacgtggccgtgtacttcaccagggaggagtggggcatgctggacaagaggcagaaggagctgtacagggacgtgatgaggatgaactacgagctgctggccagcctgggccccgccgccgccaagcccgacctgatcagcaagctggagaggagggccgccccctggatcaaggaccccaacggccccaagtggggcaagggcaggccccccggcaacggcggcccaagcagcggcgcccctcctcccagcggcggcagcccagccggctccccaacctctaccgaggagggcacctctgagtccgccacccccgagagcggccctggcacctccaccgagcccagcgagggcagcgcacccggcagccctgccggcagccccacctccacagaggagggaaccagcaccgagcccagcgaaggcagcgccccaggcaccagcaccgagcctagtgagcaggagattaaacggatcaacaagatcagaagaagacttgtgaaagacagcaacaccaagaaggccggcaagacaggccccatgaaaaccctgctggttagagtgatgacacccgatctgagagagcggctggaaaacctgagaaagaagcctgaaaatatcccccagcccatcagcaatacatctagagccaacctgaataagctgctgaccgattacaccgaaatgaagaaggcgatcctgcatgtgtactgggaagagttccagaaggaccctgtgggcctgatgagccgggtggcccagcctgccagcaagaagatcgatcagaacaagctgaaacctgagatggacgagaagggcaacctgaccaccgccggctttgcctgctctcagtgtggccagcccctgttcgtgtacaagctggagcaggtgtctgagaagggcaaggcttacaccaactacttcggacggtgcaatgtggccgagcacgaaaagctgatcctgctggcccagctgaagcccgagaaggatagcgacgaagccgtgacatatagcctgggaaagtttgggcagagggccctggatttctacagcattcatgtgaccaaggagtccacccaccccgtgaagcccctggcccagatcgccggaaacagatacgcctccggacctgtgggaaaggccctgagcgacgcatgtatgggcacaatcgcctccttcctgtctaagtaccaggacatcatcatcgaacaccagaaggtggtgaagggcaaccagaagagactggagagcctgcgggagctggccggcaaggaaaacctggaataccctagcgtgaccctgccacctcagcctcacaccaaggagggcgttgatgcctacaacgaagtgatcgcccgggtgcgaatgtgggtgaacctgaacctgtggcagaagctgaagctaagcagagatgatgccaagcctctgctgagactgaagggattcccttcctttcctctggtcgagagacaggccaacgaagtggactggtgggacatggtgtgtaacgtgaagaagctgatcaacgagaaaaaggaggatggcaaggtgttttggcagaatctggctggctacaagagacaggaagccctgagaccatacctgagcagcgaggaagatcggaagaagggaaagaaattcgctcggtaccagctgggcgacctgctgctgcacctggaaaagaagcacggcgaggactggggaaaggtgtacgacgaggcctgggagcggattgacaagaaagtggaaggcctgagcaagcacatcaagctggaagaggaacggagaagcgaggacgcccagagcaaggccgccctgaccgactggctgcgggctaaggccagcttcgtgatcgagggcctgaaggaggccgacaaggacgagttctgcagatgcgagctgaagctgcagaagtggtacggggacctgcggggaaagcccttcgccatcgaagccgagaacagcatcctggacatcagcggcttcagcaagcagtacaactgtgccttcatctggcagaaggacggcgtgaagaagctgaacctgtacctgatcatcaactacttcaagggcggcaagctgcggttcaagaagatcaaacctgaagccttcgaagccaacagattctacaccgtgatcaacaaaaagagcggcgagatcgtgcccatggaggtgaacttcaacttcgacgaccccaacctgatcatcctgcctctggcctttggcaagagacagggcagagaattcatctggaacgacctgctgtccctggaaaccggcagcctgaagctggccaacggaagagtgatcgagaagacactgtacaacagaagaacccggcaggatgagcctgccctgttcgtggccctgaccttcgagcggcgggaggtcctggactcctccaatatcaaaccaatgaacctgatcggcgtggcaagaggcgaaaacatccccgccgtgatcgccctgaccgaccccgagggctgcccactgagccggtttaaggatagcctgggaaacccaacccacatcctgagaatcggcgagagctataaggagaagcagcggaccatccaggccaagaaggaggtggagcagcggagagccggcggctacagccggaagtacgccagcaaagccaagaatctggcagacgatatggtgagaaacaccgctagagatctgctgtactacgccgtgacccaggatgccatgctgatcttcgccaacctgagccggggcttcggccggcagggcaagcggaccttcatggccgagagacagtacacacggatggaggactggctgaccgccaagctggcctacgagggcctgagcaagacctacctgtccaagacactggcccagtacacctccaagacatgcagcaactgtgggtttaccatcaccagcgccgactacgacagggtgctggagaagctgaagaagacagcaacaggctggatgaccacaattaacggcaaggagctgaaggtggagggccagattacctactacaacagatacaagagacagaacgtagtcaaggacctgtccgtcgagctggatagactgagcgaagaatctgtgaacaacgacatctcctcctggacaaagggcagaagcggagaagctctgagcctcctgaagaaaagattctcccatagacccgtgcaggagaagttcgtgtgcctgaactgcggcttcgagacacacgcagccgagcaagccgccctgaacatcgccagatcctggctgttcctgcggagccaggagtacaagaaataccagacaaacaagacaaccggcaacaccgataagagagccttcgtcgagacctggcagtccttttaccggaagaagcttaaggaggtgtggaaacctgccgtgcggtctggcggatctggcggaggctccaccagccccaagaaaaagagaaaagtctaagctgccttctgcggggcttgccttctggccatgcccttcttctctcccttgcacctgtacctcttggtctttgaataaagcctgagtaggaaggctagcaaaaaaaaaaaaaaaaaaaaaaaaaaaaaaaaaaaaaaaaaaaaaaaaaaaaaaaaaaaaaaaaaaaaaaaaaaaaaaaa

SEQ ID NO: 12722 - RNA, 5785 nt, synthetic construct
  source 1..5785: mol_type = other RNA
aggaaataagagagaaaagaagagtaagaagaaatataagagccaccatggcccctaagaagaagcgtaaagtgagccggatggaacgcctcgtctacgaggtgcggcagaagtgcagaaacatcgaggacatctgcatctcctgcggatctctgaacgtgaccctggagcacccactgttcatcggcggcatgtgccagaactgtaaaaactgttttctggagtgtgcctatcaatacgacgatgacggctaccagagctactgcaccatctgttgcggcggaagagaggtgctgatgtgtggaaataacaactgctgccggtgcttctgcgtggaatgcgtggacctgctggtgggccccggcgccgcccaggccgctattaaggaagatccttggaactgctacatgtgcggccacaagggcacatacggcctgctgagacggagagaggactggcctagcagactgcagatgttcttcgccaataaccacgaccaggagttcgacccccctaaggtgtaccctcccgtccccgccgagaagagaaagcccatccgggtcctgagcctgttcgatggcatcgccaccggtctgctggtgctgaaggacctgggcatccaggtggataggtacattgcctccgaggtgtgcgaggactccatcaccgtgggaatggtgcgtcatcagggcaagatcatgtacgtgggcgacgtgcggagcgtgacacagaagcatatccaggagtggggccctttcgacctggtgatcggcggcagcccttgcaatgacctgagcatcgtgaacccagcccggaagggcctgtacgagggaaccggcagactgttcttcgagttttacagactgctgcacgacgcccggcctaaggaaggcgacgaccggcccttcttttggctgttcgagaatgtggtggccatgggagtcagcgacaagcgggatattagccggttcctggagagcaaccccgtgatgatcgatgccaaggaagtgagcgccgcccaccgggccagatacttctggggcaatctgcctggcatgaacagacccctggccagcaccgtgaacgacaagctggagctgcaggagtgcctggagcacggccggatcgccaagttcagcaaggtgagaaccatcaccacccgaagcaacagcatcaaacaaggcaaggaccagcactttcctgtgttcatgaacgagaaggaggacatcctgtggtgtaccgagatggagagagtgttcgggttcccagtccactacacagatgtcagcaacatgtctagactggccagacagagactgctgggaagaagctggtccgtccctgtgatcagacacctgttcgcccctctgaaggagtacttcgcctgcgtgagcagcggcaacagcaacgccaacagccggggccccagcttctctagcggcctggtgccactgtccctgagagggagccacatgggccccatggagatctacaaaaccgtgagcgcctggaagcggcagcctgtgcgcgtgctgagcctgtttcggaatatcgataaagtcctgaaaagcctgggattcctggagagcggctctggctccggcggtggcaccctgaagtacgtggaggatgtgacaaacgtggtcagacgggatgtggagaagtggggccccttcgatctggtgtacggcagcacccaacccctgggcagctcttgtgaccggtgccctggctggtacatgtttcagttccaccggatcctgcagtacgccctgccgagacaggagtcccagcggccattcttttggattttcatggacaacttgctgctgaccgaggatgaccaggaaactaccactcggttcctgcagaccgaagccgtgaccctgcaggacgtgagaggccgggactaccagaacgccatgcgggtgtggtccaacatccctggactgaaaagcaagcacgcacctctgacccctaaagaagaggagtacctgcaggcccaggtgcggagcagaagcaagctggacgcccctaaggtggatctgctggtgaagaattgcctcctgcccctgagagagtacttcaagtatttcagccagaatagtctgcccctgggaggcagcggcggcggcccccaggagagcgtgaccttcaaggacatcgccgtggacttcacccaggaggagtgggccctgctggacaccagccagaggaagctgtacagggacgtgatgctggagaacatcagccacctggtgagcgtgggctaccacctgtgcaagagcgacgtgatcagccagctggagcagggcgtggagctgtggagggagggcaggggcttcccccagggccccaaccccgacaggaagagcggcggcggcccaagcagcggcgcccctcctcccagcggcggcagcccagccggctccccaacctctaccgaggagggcacctctgagtccgccacccccgagagcggccctggcacctccaccgagcccagcgagggcagcgcacccggcagccctgccggcagccccacctccacagaggagggaaccagcaccgagcccagcgaaggcagcgccccaggcaccagcaccgagcctagtgagcaggagattaaacggatcaacaagatcagaagaagacttgtgaaagacagcaacaccaagaaggccggcaagacaggccccatgaaaaccctgctggttagagtgatgacacccgatctgagagagcggctggaaaacctgagaaagaagcctgaaaatatcccccagcccatcagcaatacatctagagccaacctgaataagctgctgaccgattacaccgaaatgaagaaggcgatcctgcatgtgtactgggaagagttccagaaggaccctgtgggcctgatgagccgggtggcccagcctgccagcaagaagatcgatcagaacaagctgaaacctgagatggacgagaagggcaacctgaccaccgccggctttgcctgctctcagtgtggccagcccctgttcgtgtacaagctggagcaggtgtctgagaagggcaaggcttacaccaactacttcggacggtgcaatgtggccgagcacgaaaagctgatcctgctggcccagctgaagcccgagaaggatagcgacgaagccgtgacatatagcctgggaaagtttgggcagagggccctggatttctacagcattcatgtgaccaaggagtccacccaccccgtgaagcccctggcccagatcgccggaaacagatacgcctccggacctgtgggaaaggccctgagcgacgcatgtatgggcacaatcgcctccttcctgtctaagtaccaggacatcatcatcgaacaccagaaggtggtgaagggcaaccagaagagactggagagcctgcgggagctggccggcaaggaaaacctggaataccctagcgtgaccctgccacctcagcctcacaccaaggagggcgttgatgcctacaacgaagtgatcgcccgggtgcgaatgtgggtgaacctgaacctgtggcagaagctgaagctaagcagagatgatgccaagcctctgctgagactgaagggattcccttcctttcctctggtcgagagacaggccaacgaagtggactggtgggacatggtgtgtaacgtgaagaagctgatcaacgagaaaaaggaggatggcaaggtgttttggcagaatctggctggctacaagagacaggaagccctgagaccatacctgagcagcgaggaagatcggaagaagggaaagaaattcgctcggtaccagctgggcgacctgctgctgcacctggaaaagaagcacggcgaggactggggaaaggtgtacgacgaggcctgggagcggattgacaagaaagtggaaggcctgagcaagcacatcaagctggaagaggaacggagaagcgaggacgcccagagcaaggccgccctgaccgactggctgcgggctaaggccagcttcgtgatcgagggcctgaaggaggccgacaaggacgagttctgcagatgcgagctgaagctgcagaagtggtacggggacctgcggggaaagcccttcgccatcgaagccgagaacagcatcctggacatcagcggcttcagcaagcagtacaactgtgccttcatctggcagaaggacggcgtgaagaagctgaacctgtacctgatcatcaactacttcaagggcggcaagctgcggttcaagaagatcaaacctgaagccttcgaagccaacagattctacaccgtgatcaacaaaaagagcggcgagatcgtgcccatggaggtgaacttcaacttcgacgaccccaacctgatcatcctgcctctggcctttggcaagagacagggcagagaattcatctggaacgacctgctgtccctggaaaccggcagcctgaagctggccaacggaagagtgatcgagaagacactgtacaacagaagaacccggcaggatgagcctgccctgttcgtggccctgaccttcgagcggcgggaggtcctggactcctccaatatcaaaccaatgaacctgatcggcgtggcaagaggcgaaaacatccccgccgtgatcgccctgaccgaccccgagggctgcccactgagccggtttaaggatagcctgggaaacccaacccacatcctgagaatcggcgagagctataaggagaagcagcggaccatccaggccaagaaggaggtggagcagcggagagccggcggctacagccggaagtacgccagcaaagccaagaatctggcagacgatatggtgagaaacaccgctagagatctgctgtactacgccgtgacccaggatgccatgctgatcttcgccaacctgagccggggcttcggccggcagggcaagcggaccttcatggccgagagacagtacacacggatggaggactggctgaccgccaagctggcctacgagggcctgagcaagacctacctgtccaagacactggcccagtacacctccaagacatgcagcaactgtgggtttaccatcaccagcgccgactacgacagggtgctggagaagctgaagaagacagcaacaggctggatgaccacaattaacggcaaggagctgaaggtggagggccagattacctactacaacagatacaagagacagaacgtagtcaaggacctgtccgtcgagctggatagactgagcgaagaatctgtgaacaacgacatctcctcctggacaaagggcagaagcggagaagctctgagcctcctgaagaaaagattctcccatagacccgtgcaggagaagttcgtgtgcctgaactgcggcttcgagacacacgcagccgagcaagccgccctgaacatcgccagatcctggctgttcctgcggagccaggagtacaagaaataccagacaaacaagacaaccggcaacaccgataagagagccttcgtcgagacctggcagtccttttaccggaagaagcttaaggaggtgtggaaacctgccgtgcggtctggcggatctggcggaggctccaccagccccaagaaaaagagaaaagtctaagctgccttctgcggggcttgccttctggccatgcccttcttctctcccttgcacctgtacctcttggtctttgaataaagcctgagtaggaaggctagcaaaaaaaaaaaaaaaaaaaaaaaaaaaaaaaaaaaaaaaaaaaaaaaaaaaaaaaaaaaaaaaaaaaaaaaaaaaaaaaa

SEQ ID NO: 12723 - RNA, 5785 nt, synthetic construct
  source 1..5785: mol_type = other RNA
aggaaataagagagaaaagaagagtaagaagaaatataagagccaccatggcccctaagaagaagcgtaaagtgagccggatggaacgcctcgtctacgaggtgcggcagaagtgcagaaacatcgaggacatctgcatctcctgcggatctctgaacgtgaccctggagcacccactgttcatcggcggcatgtgccagaactgtaaaaactgttttctggagtgtgcctatcaatacgacgatgacggctaccagagctactgcaccatctgttgcggcggaagagaggtgctgatgtgtggaaataacaactgctgccggtgcttctgcgtggaatgcgtggacctgctggtgggccccggcgccgcccaggccgctattaaggaagatccttggaactgctacatgtgcggccacaagggcacatacggcctgctgagacggagagaggactggcctagcagactgcagatgttcttcgccaataaccacgaccaggagttcgacccccctaaggtgtaccctcccgtccccgccgagaagagaaagcccatccgggtcctgagcctgttcgatggcatcgccaccggtctgctggtgctgaaggacctgggcatccaggtggataggtacattgcctccgaggtgtgcgaggactccatcaccgtgggaatggtgcgtcatcagggcaagatcatgtacgtgggcgacgtgcggagcgtgacacagaagcatatccaggagtggggccctttcgacctggtgatcggcggcagcccttgcaatgacctgagcatcgtgaacccagcccggaagggcctgtacgagggaaccggcagactgttcttcgagttttacagactgctgcacgacgcccggcctaaggaaggcgacgaccggcccttcttttggctgttcgagaatgtggtggccatgggagtcagcgacaagcgggatattagccggttcctggagagcaaccccgtgatgatcgatgccaaggaagtgagcgccgcccaccgggccagatacttctggggcaatctgcctggcatgaacagacccctggccagcaccgtgaacgacaagctggagctgcaggagtgcctggagcacggccggatcgccaagttcagcaaggtgagaaccatcaccacccgaagcaacagcatcaaacaaggcaaggaccagcactttcctgtgttcatgaacgagaaggaggacatcctgtggtgtaccgagatggagagagtgttcgggttcccagtccactacacagatgtcagcaacatgtctagactggccagacagagactgctgggaagaagctggtccgtccctgtgatcagacacctgttcgcccctctgaaggagtacttcgcctgcgtgagcagcggcaacagcaacgccaacagccggggccccagcttctctagcggcctggtgccactgtccctgagagggagccacatgggccccatggagatctacaaaaccgtgagcgcctggaagcggcagcctgtgcgcgtgctgagcctgtttcggaatatcgataaagtcctgaaaagcctgggattcctggagagcggctctggctccggcggtggcaccctgaagtacgtggaggatgtgacaaacgtggtcagacgggatgtggagaagtggggccccttcgatctggtgtacggcagcacccaacccctgggcagctcttgtgaccggtgccctggctggtacatgtttcagttccaccggatcctgcagtacgccctgccgagacaggagtcccagcggccattcttttggattttcatggacaacttgctgctgaccgaggatgaccaggaaactaccactcggttcctgcagaccgaagccgtgaccctgcaggacgtgagaggccgggactaccagaacgccatgcgggtgtggtccaacatccctggactgaaaagcaagcacgcacctctgacccctaaagaagaggagtacctgcaggcccaggtgcggagcagaagcaagctggacgcccctaaggtggatctgctggtgaagaattgcctcctgcccctgagagagtacttcaagtatttcagccagaatagtctgcccctgggaggcagcggcggcggcatggccgccctgttcctgagcgcccccccccaggccgaggtgaccttcgaggacgtggccgtgtacctgagcagggaggagtggggcaggctgggccccgcccagaggggcctgtacagggacgtgatgctggagacctacggcaacctggtgagcctgggcgtgggccccgccggccccaagcccggcgtgatcagccagctggagaggggcgacgagccctgggtgctggacgtgcagggcggcggcccaagcagcggcgcccctcctcccagcggcggcagcccagccggctccccaacctctaccgaggagggcacctctgagtccgccacccccgagagcggccctggcacctccaccgagcccagcgagggcagcgcacccggcagccctgccggcagccccacctccacagaggagggaaccagcaccgagcccagcgaaggcagcgccccaggcaccagcaccgagcctagtgagcaggagattaaacggatcaacaagatcagaagaagacttgtgaaagacagcaacaccaagaaggccggcaagacaggccccatgaaaaccctgctggttagagtgatgacacccgatctgagagagcggctggaaaacctgagaaagaagcctgaaaatatcccccagcccatcagcaatacatctagagccaacctgaataagctgctgaccgattacaccgaaatgaagaaggcgatcctgcatgtgtactgggaagagttccagaaggaccctgtgggcctgatgagccgggtggcccagcctgccagcaagaagatcgatcagaacaagctgaaacctgagatggacgagaagggcaacctgaccaccgccggctttgcctgctctcagtgtggccagcccctgttcgtgtacaagctggagcaggtgtctgagaagggcaaggcttacaccaactacttcggacggtgcaatgtggccgagcacgaaaagctgatcctgctggcccagctgaagcccgagaaggatagcgacgaagccgtgacatatagcctgggaaagtttgggcagagggccctggatttctacagcattcatgtgaccaaggagtccacccaccccgtgaagcccctggcccagatcgccggaaacagatacgcctccggacctgtgggaaaggccctgagcgacgcatgtatgggcacaatcgcctccttcctgtctaagtaccaggacatcatcatcgaacaccagaaggtggtgaagggcaaccagaagagactggagagcctgcgggagctggccggcaaggaaaacctggaataccctagcgtgaccctgccacctcagcctcacaccaaggagggcgttgatgcctacaacgaagtgatcgcccgggtgcgaatgtgggtgaacctgaacctgtggcagaagctgaagctaagcagagatgatgccaagcctctgctgagactgaagggattcccttcctttcctctggtcgagagacaggccaacgaagtggactggtgggacatggtgtgtaacgtgaagaagctgatcaacgagaaaaaggaggatggcaaggtgttttggcagaatctggctggctacaagagacaggaagccctgagaccatacctgagcagcgaggaagatcggaagaagggaaagaaattcgctcggtaccagctgggcgacctgctgctgcacctggaaaagaagcacggcgaggactggggaaaggtgtacgacgaggcctgggagcggattgacaagaaagtggaaggcctgagcaagcacatcaagctggaagaggaacggagaagcgaggacgcccagagcaaggccgccctgaccgactggctgcgggctaaggccagcttcgtgatcgagggcctgaaggaggccgacaaggacgagttctgcagatgcgagctgaagctgcagaagtggtacggggacctgcggggaaagcccttcgccatcgaagccgagaacagcatcctggacatcagcggcttcagcaagcagtacaactgtgccttcatctggcagaaggacggcgtgaagaagctgaacctgtacctgatcatcaactacttcaagggcggcaagctgcggttcaagaagatcaaacctgaagccttcgaagccaacagattctacaccgtgatcaacaaaaagagcggcgagatcgtgcccatggaggtgaacttcaacttcgacgaccccaacctgatcatcctgcctctggcctttggcaagagacagggcagagaattcatctggaacgacctgctgtccctggaaaccggcagcctgaagctggccaacggaagagtgatcgagaagacactgtacaacagaagaacccggcaggatgagcctgccctgttcgtggccctgaccttcgagcggcgggaggtcctggactcctccaatatcaaaccaatgaacctgatcggcgtggcaagaggcgaaaacatccccgccgtgatcgccctgaccgaccccgagggctgcccactgagccggtttaaggatagcctgggaaacccaacccacatcctgagaatcggcgagagctataaggagaagcagcggaccatccaggccaagaaggaggtggagcagcggagagccggcggctacagccggaagtacgccagcaaagccaagaatctggcagacgatatggtgagaaacaccgctagagatctgctgtactacgccgtgacccaggatgccatgctgatcttcgccaacctgagccggggcttcggccggcagggcaagcggaccttcatggccgagagacagtacacacggatggaggactggctgaccgccaagctggcctacgagggcctgagcaagacctacctgtccaagacactggcccagtacacctccaagacatgcagcaactgtgggtttaccatcaccagcgccgactacgacagggtgctggagaagctgaagaagacagcaacaggctggatgaccacaattaacggcaaggagctgaaggtggagggccagattacctactacaacagatacaagagacagaacgtagtcaaggacctgtccgtcgagctggatagactgagcgaagaatctgtgaacaacgacatctcctcctggacaaagggcagaagcggagaagctctgagcctcctgaagaaaagattctcccatagacccgtgcaggagaagttcgtgtgcctgaactgcggcttcgagacacacgcagccgagcaagccgccctgaacatcgccagatcctggctgttcctgcggagccaggagtacaagaaataccagacaaacaagacaaccggcaacaccgataagagagccttcgtcgagacctggcagtccttttaccggaagaagcttaaggaggtgtggaaacctgccgtgcggtctggcggatctggcggaggctccaccagccccaagaaaaagagaaaagtctaagctgccttctgcggggcttgccttctggccatgcccttcttctctcccttgcacctgtacctcttggtctttgaataaagcctgagtaggaaggctagcaaaaaaaaaaaaaaaaaaaaaaaaaaaaaaaaaaaaaaaaaaaaaaaaaaaaaaaaaaaaaaaaaaaaaaaaaaaaaaaa

SEQ ID NO: 12724 - RNA, 5785 nt, synthetic construct
  source 1..5785: mol_type = other RNA
aggaaataagagagaaaagaagagtaagaagaaatataagagccaccatggcccctaagaagaagcgtaaagtgagccggatggaacgcctcgtctacgaggtgcggcagaagtgcagaaacatcgaggacatctgcatctcctgcggatctctgaacgtgaccctggagcacccactgttcatcggcggcatgtgccagaactgtaaaaactgttttctggagtgtgcctatcaatacgacgatgacggctaccagagctactgcaccatctgttgcggcggaagagaggtgctgatgtgtggaaataacaactgctgccggtgcttctgcgtggaatgcgtggacctgctggtgggccccggcgccgcccaggccgctattaaggaagatccttggaactgctacatgtgcggccacaagggcacatacggcctgctgagacggagagaggactggcctagcagactgcagatgttcttcgccaataaccacgaccaggagttcgacccccctaaggtgtaccctcccgtccccgccgagaagagaaagcccatccgggtcctgagcctgttcgatggcatcgccaccggtctgctggtgctgaaggacctgggcatccaggtggataggtacattgcctccgaggtgtgcgaggactccatcaccgtgggaatggtgcgtcatcagggcaagatcatgtacgtgggcgacgtgcggagcgtgacacagaagcatatccaggagtggggccctttcgacctggtgatcggcggcagcccttgcaatgacctgagcatcgtgaacccagcccggaagggcctgtacgagggaaccggcagactgttcttcgagttttacagactgctgcacgacgcccggcctaaggaaggcgacgaccggcccttcttttggctgttcgagaatgtggtggccatgggagtcagcgacaagcgggatattagccggttcctggagagcaaccccgtgatgatcgatgccaaggaagtgagcgccgcccaccgggccagatacttctggggcaatctgcctggcatgaacagacccctggccagcaccgtgaacgacaagctggagctgcaggagtgcctggagcacggccggatcgccaagttcagcaaggtgagaaccatcaccacccgaagcaacagcatcaaacaaggcaaggaccagcactttcctgtgttcatgaacgagaaggaggacatcctgtggtgtaccgagatggagagagtgttcgggttcccagtccactacacagatgtcagcaacatgtctagactggccagacagagactgctgggaagaagctggtccgtccctgtgatcagacacctgttcgcccctctgaaggagtacttcgcctgcgtgagcagcggcaacagcaacgccaacagccggggccccagcttctctagcggcctggtgccactgtccctgagagggagccacatgggccccatggagatctacaaaaccgtgagcgcctggaagcggcagcctgtgcgcgtgctgagcctgtttcggaatatcgataaagtcctgaaaagcctgggattcctggagagcggctctggctccggcggtggcaccctgaagtacgtggaggatgtgacaaacgtggtcagacgggatgtggagaagtggggccccttcgatctggtgtacggcagcacccaacccctgggcagctcttgtgaccggtgccctggctggtacatgtttcagttccaccggatcctgcagtacgccctgccgagacaggagtcccagcggccattcttttggattttcatggacaacttgctgctgaccgaggatgaccaggaaactaccactcggttcctgcagaccgaagccgtgaccctgcaggacgtgagaggccgggactaccagaacgccatgcgggtgtggtccaacatccctggactgaaaagcaagcacgcacctctgacccctaaagaagaggagtacctgcaggcccaggtgcggagcagaagcaagctggacgcccctaaggtggatctgctggtgaagaattgcctcctgcccctgagagagtacttcaagtatttcagccagaatagtctgcccctgggaggcagcggcggcggcaagcccggcatcgtgaggttcgccgacgtggccgtgtacttcagcagggaggagtgggcctgcctgaggcccgcccagagggccctgtacagggacgtgatgagggagacctacggccacctgggcgccctgggcttccccggccccaagcccgccctgatcagctggatggagagggagagcgaggcctggagccccgccgcccaggagcccaaggagggcgagaacctgggcggcgcccccggcggcccaagcagcggcgcccctcctcccagcggcggcagcccagccggctccccaacctctaccgaggagggcacctctgagtccgccacccccgagagcggccctggcacctccaccgagcccagcgagggcagcgcacccggcagccctgccggcagccccacctccacagaggagggaaccagcaccgagcccagcgaaggcagcgccccaggcaccagcaccgagcctagtgagcaggagattaaacggatcaacaagatcagaagaagacttgtgaaagacagcaacaccaagaaggccggcaagacaggccccatgaaaaccctgctggttagagtgatgacacccgatctgagagagcggctggaaaacctgagaaagaagcctgaaaatatcccccagcccatcagcaatacatctagagccaacctgaataagctgctgaccgattacaccgaaatgaagaaggcgatcctgcatgtgtactgggaagagttccagaaggaccctgtgggcctgatgagccgggtggcccagcctgccagcaagaagatcgatcagaacaagctgaaacctgagatggacgagaagggcaacctgaccaccgccggctttgcctgctctcagtgtggccagcccctgttcgtgtacaagctggagcaggtgtctgagaagggcaaggcttacaccaactacttcggacggtgcaatgtggccgagcacgaaaagctgatcctgctggcccagctgaagcccgagaaggatagcgacgaagccgtgacatatagcctgggaaagtttgggcagagggccctggatttctacagcattcatgtgaccaaggagtccacccaccccgtgaagcccctggcccagatcgccggaaacagatacgcctccggacctgtgggaaaggccctgagcgacgcatgtatgggcacaatcgcctccttcctgtctaagtaccaggacatcatcatcgaacaccagaaggtggtgaagggcaaccagaagagactggagagcctgcgggagctggccggcaaggaaaacctggaataccctagcgtgaccctgccacctcagcctcacaccaaggagggcgttgatgcctacaacgaagtgatcgcccgggtgcgaatgtgggtgaacctgaacctgtggcagaagctgaagctaagcagagatgatgccaagcctctgctgagactgaagggattcccttcctttcctctggtcgagagacaggccaacgaagtggactggtgggacatggtgtgtaacgtgaagaagctgatcaacgagaaaaaggaggatggcaaggtgttttggcagaatctggctggctacaagagacaggaagccctgagaccatacctgagcagcgaggaagatcggaagaagggaaagaaattcgctcggtaccagctgggcgacctgctgctgcacctggaaaagaagcacggcgaggactggggaaaggtgtacgacgaggcctgggagcggattgacaagaaagtggaaggcctgagcaagcacatcaagctggaagaggaacggagaagcgaggacgcccagagcaaggccgccctgaccgactggctgcgggctaaggccagcttcgtgatcgagggcctgaaggaggccgacaaggacgagttctgcagatgcgagctgaagctgcagaagtggtacggggacctgcggggaaagcccttcgccatcgaagccgagaacagcatcctggacatcagcggcttcagcaagcagtacaactgtgccttcatctggcagaaggacggcgtgaagaagctgaacctgtacctgatcatcaactacttcaagggcggcaagctgcggttcaagaagatcaaacctgaagccttcgaagccaacagattctacaccgtgatcaacaaaaagagcggcgagatcgtgcccatggaggtgaacttcaacttcgacgaccccaacctgatcatcctgcctctggcctttggcaagagacagggcagagaattcatctggaacgacctgctgtccctggaaaccggcagcctgaagctggccaacggaagagtgatcgagaagacactgtacaacagaagaacccggcaggatgagcctgccctgttcgtggccctgaccttcgagcggcgggaggtcctggactcctccaatatcaaaccaatgaacctgatcggcgtggcaagaggcgaaaacatccccgccgtgatcgccctgaccgaccccgagggctgcccactgagccggtttaaggatagcctgggaaacccaacccacatcctgagaatcggcgagagctataaggagaagcagcggaccatccaggccaagaaggaggtggagcagcggagagccggcggctacagccggaagtacgccagcaaagccaagaatctggcagacgatatggtgagaaacaccgctagagatctgctgtactacgccgtgacccaggatgccatgctgatcttcgccaacctgagccggggcttcggccggcagggcaagcggaccttcatggccgagagacagtacacacggatggaggactggctgaccgccaagctggcctacgagggcctgagcaagacctacctgtccaagacactggcccagtacacctccaagacatgcagcaactgtgggtttaccatcaccagcgccgactacgacagggtgctggagaagctgaagaagacagcaacaggctggatgaccacaattaacggcaaggagctgaaggtggagggccagattacctactacaacagatacaagagacagaacgtagtcaaggacctgtccgtcgagctggatagactgagcgaagaatctgtgaacaacgacatctcctcctggacaaagggcagaagcggagaagctctgagcctcctgaagaaaagattctcccatagacccgtgcaggagaagttcgtgtgcctgaactgcggcttcgagacacacgcagccgagcaagccgccctgaacatcgccagatcctggctgttcctgcggagccaggagtacaagaaataccagacaaacaagacaaccggcaacaccgataagagagccttcgtcgagacctggcagtccttttaccggaagaagcttaaggaggtgtggaaacctgccgtgcggtctggcggatctggcggaggctccaccagccccaagaaaaagagaaaagtctaagctgccttctgcggggcttgccttctggccatgcccttcttctctcccttgcacctgtacctcttggtctttgaataaagcctgagtaggaaggctagcaaaaaaaaaaaaaaaaaaaaaaaaaaaaaaaaaaaaaaaaaaaaaaaaaaaaaaaaaaaaaaaaaaaaaaaaaaaaaaaa

SEQ ID NO: 12725 - RNA, 5785 nt, synthetic construct
  source 1..5785: mol_type = other RNA
aggaaataagagagaaaagaagagtaagaagaaatataagagccaccatggcccctaagaagaagcgtaaagtgagccggatggaacgcctcgtctacgaggtgcggcagaagtgcagaaacatcgaggacatctgcatctcctgcggatctctgaacgtgaccctggagcacccactgttcatcggcggcatgtgccagaactgtaaaaactgttttctggagtgtgcctatcaatacgacgatgacggctaccagagctactgcaccatctgttgcggcggaagagaggtgctgatgtgtggaaataacaactgctgccggtgcttctgcgtggaatgcgtggacctgctggtgggccccggcgccgcccaggccgctattaaggaagatccttggaactgctacatgtgcggccacaagggcacatacggcctgctgagacggagagaggactggcctagcagactgcagatgttcttcgccaataaccacgaccaggagttcgacccccctaaggtgtaccctcccgtccccgccgagaagagaaagcccatccgggtcctgagcctgttcgatggcatcgccaccggtctgctggtgctgaaggacctgggcatccaggtggataggtacattgcctccgaggtgtgcgaggactccatcaccgtgggaatggtgcgtcatcagggcaagatcatgtacgtgggcgacgtgcggagcgtgacacagaagcatatccaggagtggggccctttcgacctggtgatcggcggcagcccttgcaatgacctgagcatcgtgaacccagcccggaagggcctgtacgagggaaccggcagactgttcttcgagttttacagactgctgcacgacgcccggcctaaggaaggcgacgaccggcccttcttttggctgttcgagaatgtggtggccatgggagtcagcgacaagcgggatattagccggttcctggagagcaaccccgtgatgatcgatgccaaggaagtgagcgccgcccaccgggccagatacttctggggcaatctgcctggcatgaacagacccctggccagcaccgtgaacgacaagctggagctgcaggagtgcctggagcacggccggatcgccaagttcagcaaggtgagaaccatcaccacccgaagcaacagcatcaaacaaggcaaggaccagcactttcctgtgttcatgaacgagaaggaggacatcctgtggtgtaccgagatggagagagtgttcgggttcccagtccactacacagatgtcagcaacatgtctagactggccagacagagactgctgggaagaagctggtccgtccctgtgatcagacacctgttcgcccctctgaaggagtacttcgcctgcgtgagcagcggcaacagcaacgccaacagccggggccccagcttctctagcggcctggtgccactgtccctgagagggagccacatgggccccatggagatctacaaaaccgtgagcgcctggaagcggcagcctgtgcgcgtgctgagcctgtttcggaatatcgataaagtcctgaaaagcctgggattcctggagagcggctctggctccggcggtggcaccctgaagtacgtggaggatgtgacaaacgtggtcagacgggatgtggagaagtggggccccttcgatctggtgtacggcagcacccaacccctgggcagctcttgtgaccggtgccctggctggtacatgtttcagttccaccggatcctgcagtacgccctgccgagacaggagtcccagcggccattcttttggattttcatggacaacttgctgctgaccgaggatgaccaggaaactaccactcggttcctgcagaccgaagccgtgaccctgcaggacgtgagaggccgggactaccagaacgccatgcgggtgtggtccaacatccctggactgaaaagcaagcacgcacctctgacccctaaagaagaggagtacctgcaggcccaggtgcggagcagaagcaagctggacgcccctaaggtggatctgctggtgaagaattgcctcctgcccctgagagagtacttcaagtatttcagccagaatagtctgcccctgggaggcagcggcggcggcatggcccacgccctggtgaccttcagggacgtggccatcgacttcagccagaaggagtgggagtgcctggacaccacccagaggaagctgtacagggacgtgatgctggagaactacaacaacctggtgagcctgggctacagcggcagcaagcccgacgtgatcaccctgctggagcagggcaaggagccctgcatggccgccagggacgtgaccggcaggcagtaccccggcctgctgagcggcggcccaagcagcggcgcccctcctcccagcggcggcagcccagccggctccccaacctctaccgaggagggcacctctgagtccgccacccccgagagcggccctggcacctccaccgagcccagcgagggcagcgcacccggcagccctgccggcagccccacctccacagaggagggaaccagcaccgagcccagcgaaggcagcgccccaggcaccagcaccgagcctagtgagcaggagattaaacggatcaacaagatcagaagaagacttgtgaaagacagcaacaccaagaaggccggcaagacaggccccatgaaaaccctgctggttagagtgatgacacccgatctgagagagcggctggaaaacctgagaaagaagcctgaaaatatcccccagcccatcagcaatacatctagagccaacctgaataagctgctgaccgattacaccgaaatgaagaaggcgatcctgcatgtgtactgggaagagttccagaaggaccctgtgggcctgatgagccgggtggcccagcctgccagcaagaagatcgatcagaacaagctgaaacctgagatggacgagaagggcaacctgaccaccgccggctttgcctgctctcagtgtggccagcccctgttcgtgtacaagctggagcaggtgtctgagaagggcaaggcttacaccaactacttcggacggtgcaatgtggccgagcacgaaaagctgatcctgctggcccagctgaagcccgagaaggatagcgacgaagccgtgacatatagcctgggaaagtttgggcagagggccctggatttctacagcattcatgtgaccaaggagtccacccaccccgtgaagcccctggcccagatcgccggaaacagatacgcctccggacctgtgggaaaggccctgagcgacgcatgtatgggcacaatcgcctccttcctgtctaagtaccaggacatcatcatcgaacaccagaaggtggtgaagggcaaccagaagagactggagagcctgcgggagctggccggcaaggaaaacctggaataccctagcgtgaccctgccacctcagcctcacaccaaggagggcgttgatgcctacaacgaagtgatcgcccgggtgcgaatgtgggtgaacctgaacctgtggcagaagctgaagctaagcagagatgatgccaagcctctgctgagactgaagggattcccttcctttcctctggtcgagagacaggccaacgaagtggactggtgggacatggtgtgtaacgtgaagaagctgatcaacgagaaaaaggaggatggcaaggtgttttggcagaatctggctggctacaagagacaggaagccctgagaccatacctgagcagcgaggaagatcggaagaagggaaagaaattcgctcggtaccagctgggcgacctgctgctgcacctggaaaagaagcacggcgaggactggggaaaggtgtacgacgaggcctgggagcggattgacaagaaagtggaaggcctgagcaagcacatcaagctggaagaggaacggagaagcgaggacgcccagagcaaggccgccctgaccgactggctgcgggctaaggccagcttcgtgatcgagggcctgaaggaggccgacaaggacgagttctgcagatgcgagctgaagctgcagaagtggtacggggacctgcggggaaagcccttcgccatcgaagccgagaacagcatcctggacatcagcggcttcagcaagcagtacaactgtgccttcatctggcagaaggacggcgtgaagaagctgaacctgtacctgatcatcaactacttcaagggcggcaagctgcggttcaagaagatcaaacctgaagccttcgaagccaacagattctacaccgtgatcaacaaaaagagcggcgagatcgtgcccatggaggtgaacttcaacttcgacgaccccaacctgatcatcctgcctctggcctttggcaagagacagggcagagaattcatctggaacgacctgctgtccctggaaaccggcagcctgaagctggccaacggaagagtgatcgagaagacactgtacaacagaagaacccggcaggatgagcctgccctgttcgtggccctgaccttcgagcggcgggaggtcctggactcctccaatatcaaaccaatgaacctgatcggcgtggcaagaggcgaaaacatccccgccgtgatcgccctgaccgaccccgagggctgcccactgagccggtttaaggatagcctgggaaacccaacccacatcctgagaatcggcgagagctataaggagaagcagcggaccatccaggccaagaaggaggtggagcagcggagagccggcggctacagccggaagtacgccagcaaagccaagaatctggcagacgatatggtgagaaacaccgctagagatctgctgtactacgccgtgacccaggatgccatgctgatcttcgccaacctgagccggggcttcggccggcagggcaagcggaccttcatggccgagagacagtacacacggatggaggactggctgaccgccaagctggcctacgagggcctgagcaagacctacctgtccaagacactggcccagtacacctccaagacatgcagcaactgtgggtttaccatcaccagcgccgactacgacagggtgctggagaagctgaagaagacagcaacaggctggatgaccacaattaacggcaaggagctgaaggtggagggccagattacctactacaacagatacaagagacagaacgtagtcaaggacctgtccgtcgagctggatagactgagcgaagaatctgtgaacaacgacatctcctcctggacaaagggcagaagcggagaagctctgagcctcctgaagaaaagattctcccatagacccgtgcaggagaagttcgtgtgcctgaactgcggcttcgagacacacgcagccgagcaagccgccctgaacatcgccagatcctggctgttcctgcggagccaggagtacaagaaataccagacaaacaagacaaccggcaacaccgataagagagccttcgtcgagacctggcagtccttttaccggaagaagcttaaggaggtgtggaaacctgccgtgcggtctggcggatctggcggaggctccaccagccccaagaaaaagagaaaagtctaagctgccttctgcggggcttgccttctggccatgcccttcttctctcccttgcacctgtacctcttggtctttgaataaagcctgagtaggaaggctagcaaaaaaaaaaaaaaaaaaaaaaaaaaaaaaaaaaaaaaaaaaaaaaaaaaaaaaaaaaaaaaaaaaaaaaaaaaaaaaaa

SEQ ID NO: 12726 - RNA, 5785 nt, synthetic construct
  source 1..5785: mol_type = other RNA
aggaaataagagagaaaagaagagtaagaagaaatataagagccaccatggcccctaagaagaagcgtaaagtgagccggatggaacgcctcgtctacgaggtgcggcagaagtgcagaaacatcgaggacatctgcatctcctgcggatctctgaacgtgaccctggagcacccactgttcatcggcggcatgtgccagaactgtaaaaactgttttctggagtgtgcctatcaatacgacgatgacggctaccagagctactgcaccatctgttgcggcggaagagaggtgctgatgtgtggaaataacaactgctgccggtgcttctgcgtggaatgcgtggacctgctggtgggccccggcgccgcccaggccgctattaaggaagatccttggaactgctacatgtgcggccacaagggcacatacggcctgctgagacggagagaggactggcctagcagactgcagatgttcttcgccaataaccacgaccaggagttcgacccccctaaggtgtaccctcccgtccccgccgagaagagaaagcccatccgggtcctgagcctgttcgatggcatcgccaccggtctgctggtgctgaaggacctgggcatccaggtggataggtacattgcctccgaggtgtgcgaggactccatcaccgtgggaatggtgcgtcatcagggcaagatcatgtacgtgggcgacgtgcggagcgtgacacagaagcatatccaggagtggggccctttcgacctggtgatcggcggcagcccttgcaatgacctgagcatcgtgaacccagcccggaagggcctgtacgagggaaccggcagactgttcttcgagttttacagactgctgcacgacgcccggcctaaggaaggcgacgaccggcccttcttttggctgttcgagaatgtggtggccatgggagtcagcgacaagcgggatattagccggttcctggagagcaaccccgtgatgatcgatgccaaggaagtgagcgccgcccaccgggccagatacttctggggcaatctgcctggcatgaacagacccctggccagcaccgtgaacgacaagctggagctgcaggagtgcctggagcacggccggatcgccaagttcagcaaggtgagaaccatcaccacccgaagcaacagcatcaaacaaggcaaggaccagcactttcctgtgttcatgaacgagaaggaggacatcctgtggtgtaccgagatggagagagtgttcgggttcccagtccactacacagatgtcagcaacatgtctagactggccagacagagactgctgggaagaagctggtccgtccctgtgatcagacacctgttcgcccctctgaaggagtacttcgcctgcgtgagcagcggcaacagcaacgccaacagccggggccccagcttctctagcggcctggtgccactgtccctgagagggagccacatgggccccatggagatctacaaaaccgtgagcgcctggaagcggcagcctgtgcgcgtgctgagcctgtttcggaatatcgataaagtcctgaaaagcctgggattcctggagagcggctctggctccggcggtggcaccctgaagtacgtggaggatgtgacaaacgtggtcagacgggatgtggagaagtggggccccttcgatctggtgtacggcagcacccaacccctgggcagctcttgtgaccggtgccctggctggtacatgtttcagttccaccggatcctgcagtacgccctgccgagacaggagtcccagcggccattcttttggattttcatggacaacttgctgctgaccgaggatgaccaggaaactaccactcggttcctgcagaccgaagccgtgaccctgcaggacgtgagaggccgggactaccagaacgccatgcgggtgtggtccaacatccctggactgaaaagcaagcacgcacctctgacccctaaagaagaggagtacctgcaggcccaggtgcggagcagaagcaagctggacgcccctaaggtggatctgctggtgaagaattgcctcctgcccctgagagagtacttcaagtatttcagccagaatagtctgcccctgggaggcagcggcggcggcatgcccgtgaccttcgaggacgtggccgtgtacttcacccagggccagggcgccctgctggaccccacccagagggccctgtacagggacgtgatgcaggagaactacgagaccgtgaccagcctgggcaagagcgtgaagggcttccccctggccaagcccgacctgatcaccaggctggagaggggcgaggagccctgggtgagcgacctgcaggccaccggcgacgagaggatgagcgagggcggcccaagcagcggcgcccctcctcccagcggcggcagcccagccggctccccaacctctaccgaggagggcacctctgagtccgccacccccgagagcggccctggcacctccaccgagcccagcgagggcagcgcacccggcagccctgccggcagccccacctccacagaggagggaaccagcaccgagcccagcgaaggcagcgccccaggcaccagcaccgagcctagtgagcaggagattaaacggatcaacaagatcagaagaagacttgtgaaagacagcaacaccaagaaggccggcaagacaggccccatgaaaaccctgctggttagagtgatgacacccgatctgagagagcggctggaaaacctgagaaagaagcctgaaaatatcccccagcccatcagcaatacatctagagccaacctgaataagctgctgaccgattacaccgaaatgaagaaggcgatcctgcatgtgtactgggaagagttccagaaggaccctgtgggcctgatgagccgggtggcccagcctgccagcaagaagatcgatcagaacaagctgaaacctgagatggacgagaagggcaacctgaccaccgccggctttgcctgctctcagtgtggccagcccctgttcgtgtacaagctggagcaggtgtctgagaagggcaaggcttacaccaactacttcggacggtgcaatgtggccgagcacgaaaagctgatcctgctggcccagctgaagcccgagaaggatagcgacgaagccgtgacatatagcctgggaaagtttgggcagagggccctggatttctacagcattcatgtgaccaaggagtccacccaccccgtgaagcccctggcccagatcgccggaaacagatacgcctccggacctgtgggaaaggccctgagcgacgcatgtatgggcacaatcgcctccttcctgtctaagtaccaggacatcatcatcgaacaccagaaggtggtgaagggcaaccagaagagactggagagcctgcgggagctggccggcaaggaaaacctggaataccctagcgtgaccctgccacctcagcctcacaccaaggagggcgttgatgcctacaacgaagtgatcgcccgggtgcgaatgtgggtgaacctgaacctgtggcagaagctgaagctaagcagagatgatgccaagcctctgctgagactgaagggattcccttcctttcctctggtcgagagacaggccaacgaagtggactggtgggacatggtgtgtaacgtgaagaagctgatcaacgagaaaaaggaggatggcaaggtgttttggcagaatctggctggctacaagagacaggaagccctgagaccatacctgagcagcgaggaagatcggaagaagggaaagaaattcgctcggtaccagctgggcgacctgctgctgcacctggaaaagaagcacggcgaggactggggaaaggtgtacgacgaggcctgggagcggattgacaagaaagtggaaggcctgagcaagcacatcaagctggaagaggaacggagaagcgaggacgcccagagcaaggccgccctgaccgactggctgcgggctaaggccagcttcgtgatcgagggcctgaaggaggccgacaaggacgagttctgcagatgcgagctgaagctgcagaagtggtacggggacctgcggggaaagcccttcgccatcgaagccgagaacagcatcctggacatcagcggcttcagcaagcagtacaactgtgccttcatctggcagaaggacggcgtgaagaagctgaacctgtacctgatcatcaactacttcaagggcggcaagctgcggttcaagaagatcaaacctgaagccttcgaagccaacagattctacaccgtgatcaacaaaaagagcggcgagatcgtgcccatggaggtgaacttcaacttcgacgaccccaacctgatcatcctgcctctggcctttggcaagagacagggcagagaattcatctggaacgacctgctgtccctggaaaccggcagcctgaagctggccaacggaagagtgatcgagaagacactgtacaacagaagaacccggcaggatgagcctgccctgttcgtggccctgaccttcgagcggcgggaggtcctggactcctccaatatcaaaccaatgaacctgatcggcgtggcaagaggcgaaaacatccccgccgtgatcgccctgaccgaccccgagggctgcccactgagccggtttaaggatagcctgggaaacccaacccacatcctgagaatcggcgagagctataaggagaagcagcggaccatccaggccaagaaggaggtggagcagcggagagccggcggctacagccggaagtacgccagcaaagccaagaatctggcagacgatatggtgagaaacaccgctagagatctgctgtactacgccgtgacccaggatgccatgctgatcttcgccaacctgagccggggcttcggccggcagggcaagcggaccttcatggccgagagacagtacacacggatggaggactggctgaccgccaagctggcctacgagggcctgagcaagacctacctgtccaagacactggcccagtacacctccaagacatgcagcaactgtgggtttaccatcaccagcgccgactacgacagggtgctggagaagctgaagaagacagcaacaggctggatgaccacaattaacggcaaggagctgaaggtggagggccagattacctactacaacagatacaagagacagaacgtagtcaaggacctgtccgtcgagctggatagactgagcgaagaatctgtgaacaacgacatctcctcctggacaaagggcagaagcggagaagctctgagcctcctgaagaaaagattctcccatagacccgtgcaggagaagttcgtgtgcctgaactgcggcttcgagacacacgcagccgagcaagccgccctgaacatcgccagatcctggctgttcctgcggagccaggagtacaagaaataccagacaaacaagacaaccggcaacaccgataagagagccttcgtcgagacctggcagtccttttaccggaagaagcttaaggaggtgtggaaacctgccgtgcggtctggcggatctggcggaggctccaccagccccaagaaaaagagaaaagtctaagctgccttctgcggggcttgccttctggccatgcccttcttctctcccttgcacctgtacctcttggtctttgaataaagcctgagtaggaaggctagcaaaaaaaaaaaaaaaaaaaaaaaaaaaaaaaaaaaaaaaaaaaaaaaaaaaaaaaaaaaaaaaaaaaaaaaaaaaaaaaa

SEQ ID NO: 12727 - RNA, 5785 nt, synthetic construct
  source 1..5785: mol_type = other RNA
aggaaataagagagaaaagaagagtaagaagaaatataagagccaccatggcccctaagaagaagcgtaaagtgagccggatggaacgcctcgtctacgaggtgcggcagaagtgcagaaacatcgaggacatctgcatctcctgcggatctctgaacgtgaccctggagcacccactgttcatcggcggcatgtgccagaactgtaaaaactgttttctggagtgtgcctatcaatacgacgatgacggctaccagagctactgcaccatctgttgcggcggaagagaggtgctgatgtgtggaaataacaactgctgccggtgcttctgcgtggaatgcgtggacctgctggtgggccccggcgccgcccaggccgctattaaggaagatccttggaactgctacatgtgcggccacaagggcacatacggcctgctgagacggagagaggactggcctagcagactgcagatgttcttcgccaataaccacgaccaggagttcgacccccctaaggtgtaccctcccgtccccgccgagaagagaaagcccatccgggtcctgagcctgttcgatggcatcgccaccggtctgctggtgctgaaggacctgggcatccaggtggataggtacattgcctccgaggtgtgcgaggactccatcaccgtgggaatggtgcgtcatcagggcaagatcatgtacgtgggcgacgtgcggagcgtgacacagaagcatatccaggagtggggccctttcgacctggtgatcggcggcagcccttgcaatgacctgagcatcgtgaacccagcccggaagggcctgtacgagggaaccggcagactgttcttcgagttttacagactgctgcacgacgcccggcctaaggaaggcgacgaccggcccttcttttggctgttcgagaatgtggtggccatgggagtcagcgacaagcgggatattagccggttcctggagagcaaccccgtgatgatcgatgccaaggaagtgagcgccgcccaccgggccagatacttctggggcaatctgcctggcatgaacagacccctggccagcaccgtgaacgacaagctggagctgcaggagtgcctggagcacggccggatcgccaagttcagcaaggtgagaaccatcaccacccgaagcaacagcatcaaacaaggcaaggaccagcactttcctgtgttcatgaacgagaaggaggacatcctgtggtgtaccgagatggagagagtgttcgggttcccagtccactacacagatgtcagcaacatgtctagactggccagacagagactgctgggaagaagctggtccgtccctgtgatcagacacctgttcgcccctctgaaggagtacttcgcctgcgtgagcagcggcaacagcaacgccaacagccggggccccagcttctctagcggcctggtgccactgtccctgagagggagccacatgggccccatggagatctacaaaaccgtgagcgcctggaagcggcagcctgtgcgcgtgctgagcctgtttcggaatatcgataaagtcctgaaaagcctgggattcctggagagcggctctggctccggcggtggcaccctgaagtacgtggaggatgtgacaaacgtggtcagacgggatgtggagaagtggggccccttcgatctggtgtacggcagcacccaacccctgggcagctcttgtgaccggtgccctggctggtacatgtttcagttccaccggatcctgcagtacgccctgccgagacaggagtcccagcggccattcttttggattttcatggacaacttgctgctgaccgaggatgaccaggaaactaccactcggttcctgcagaccgaagccgtgaccctgcaggacgtgagaggccgggactaccagaacgccatgcgggtgtggtccaacatccctggactgaaaagcaagcacgcacctctgacccctaaagaagaggagtacctgcaggcccaggtgcggagcagaagcaagctggacgcccctaaggtggatctgctggtgaagaattgcctcctgcccctgagagagtacttcaagtatttcagccagaatagtctgcccctgggaggcagcggcggcggcggcaagatgagcgtgaccttcgaggacgtggccctgtacttcagccccgaggagtgggccaagctgagcggctgccagaggcagctgtacagggaggtgatgctggagaactaccagatggtggccagcctgggctgggccaacatcaagcccgagatcatctgcaagatggagagggaggagaccctgtgcgtgcccgccccccccagggagtggcagagggaccagagccccgtgcccgccggcggcccaagcagcggcgcccctcctcccagcggcggcagcccagccggctccccaacctctaccgaggagggcacctctgagtccgccacccccgagagcggccctggcacctccaccgagcccagcgagggcagcgcacccggcagccctgccggcagccccacctccacagaggagggaaccagcaccgagcccagcgaaggcagcgccccaggcaccagcaccgagcctagtgagcaggagattaaacggatcaacaagatcagaagaagacttgtgaaagacagcaacaccaagaaggccggcaagacaggccccatgaaaaccctgctggttagagtgatgacacccgatctgagagagcggctggaaaacctgagaaagaagcctgaaaatatcccccagcccatcagcaatacatctagagccaacctgaataagctgctgaccgattacaccgaaatgaagaaggcgatcctgcatgtgtactgggaagagttccagaaggaccctgtgggcctgatgagccgggtggcccagcctgccagcaagaagatcgatcagaacaagctgaaacctgagatggacgagaagggcaacctgaccaccgccggctttgcctgctctcagtgtggccagcccctgttcgtgtacaagctggagcaggtgtctgagaagggcaaggcttacaccaactacttcggacggtgcaatgtggccgagcacgaaaagctgatcctgctggcccagctgaagcccgagaaggatagcgacgaagccgtgacatatagcctgggaaagtttgggcagagggccctggatttctacagcattcatgtgaccaaggagtccacccaccccgtgaagcccctggcccagatcgccggaaacagatacgcctccggacctgtgggaaaggccctgagcgacgcatgtatgggcacaatcgcctccttcctgtctaagtaccaggacatcatcatcgaacaccagaaggtggtgaagggcaaccagaagagactggagagcctgcgggagctggccggcaaggaaaacctggaataccctagcgtgaccctgccacctcagcctcacaccaaggagggcgttgatgcctacaacgaagtgatcgcccgggtgcgaatgtgggtgaacctgaacctgtggcagaagctgaagctaagcagagatgatgccaagcctctgctgagactgaagggattcccttcctttcctctggtcgagagacaggccaacgaagtggactggtgggacatggtgtgtaacgtgaagaagctgatcaacgagaaaaaggaggatggcaaggtgttttggcagaatctggctggctacaagagacaggaagccctgagaccatacctgagcagcgaggaagatcggaagaagggaaagaaattcgctcggtaccagctgggcgacctgctgctgcacctggaaaagaagcacggcgaggactggggaaaggtgtacgacgaggcctgggagcggattgacaagaaagtggaaggcctgagcaagcacatcaagctggaagaggaacggagaagcgaggacgcccagagcaaggccgccctgaccgactggctgcgggctaaggccagcttcgtgatcgagggcctgaaggaggccgacaaggacgagttctgcagatgcgagctgaagctgcagaagtggtacggggacctgcggggaaagcccttcgccatcgaagccgagaacagcatcctggacatcagcggcttcagcaagcagtacaactgtgccttcatctggcagaaggacggcgtgaagaagctgaacctgtacctgatcatcaactacttcaagggcggcaagctgcggttcaagaagatcaaacctgaagccttcgaagccaacagattctacaccgtgatcaacaaaaagagcggcgagatcgtgcccatggaggtgaacttcaacttcgacgaccccaacctgatcatcctgcctctggcctttggcaagagacagggcagagaattcatctggaacgacctgctgtccctggaaaccggcagcctgaagctggccaacggaagagtgatcgagaagacactgtacaacagaagaacccggcaggatgagcctgccctgttcgtggccctgaccttcgagcggcgggaggtcctggactcctccaatatcaaaccaatgaacctgatcggcgtggcaagaggcgaaaacatccccgccgtgatcgccctgaccgaccccgagggctgcccactgagccggtttaaggatagcctgggaaacccaacccacatcctgagaatcggcgagagctataaggagaagcagcggaccatccaggccaagaaggaggtggagcagcggagagccggcggctacagccggaagtacgccagcaaagccaagaatctggcagacgatatggtgagaaacaccgctagagatctgctgtactacgccgtgacccaggatgccatgctgatcttcgccaacctgagccggggcttcggccggcagggcaagcggaccttcatggccgagagacagtacacacggatggaggactggctgaccgccaagctggcctacgagggcctgagcaagacctacctgtccaagacactggcccagtacacctccaagacatgcagcaactgtgggtttaccatcaccagcgccgactacgacagggtgctggagaagctgaagaagacagcaacaggctggatgaccacaattaacggcaaggagctgaaggtggagggccagattacctactacaacagatacaagagacagaacgtagtcaaggacctgtccgtcgagctggatagactgagcgaagaatctgtgaacaacgacatctcctcctggacaaagggcagaagcggagaagctctgagcctcctgaagaaaagattctcccatagacccgtgcaggagaagttcgtgtgcctgaactgcggcttcgagacacacgcagccgagcaagccgccctgaacatcgccagatcctggctgttcctgcggagccaggagtacaagaaataccagacaaacaagacaaccggcaacaccgataagagagccttcgtcgagacctggcagtccttttaccggaagaagcttaaggaggtgtggaaacctgccgtgcggtctggcggatctggcggaggctccaccagccccaagaaaaagagaaaagtctaagctgccttctgcggggcttgccttctggccatgcccttcttctctcccttgcacctgtacctcttggtctttgaataaagcctgagtaggaaggctagcaaaaaaaaaaaaaaaaaaaaaaaaaaaaaaaaaaaaaaaaaaaaaaaaaaaaaaaaaaaaaaaaaaaaaaaaaaaaaaaa

SEQ ID NO: 12728 - RNA, 5785 nt, synthetic construct
  source 1..5785: mol_type = other RNA
aggaaataagagagaaaagaagagtaagaagaaatataagagccaccatggcccctaagaagaagcgtaaagtgagccggatggaacgcctcgtctacgaggtgcggcagaagtgcagaaacatcgaggacatctgcatctcctgcggatctctgaacgtgaccctggagcacccactgttcatcggcggcatgtgccagaactgtaaaaactgttttctggagtgtgcctatcaatacgacgatgacggctaccagagctactgcaccatctgttgcggcggaagagaggtgctgatgtgtggaaataacaactgctgccggtgcttctgcgtggaatgcgtggacctgctggtgggccccggcgccgcccaggccgctattaaggaagatccttggaactgctacatgtgcggccacaagggcacatacggcctgctgagacggagagaggactggcctagcagactgcagatgttcttcgccaataaccacgaccaggagttcgacccccctaaggtgtaccctcccgtccccgccgagaagagaaagcccatccgggtcctgagcctgttcgatggcatcgccaccggtctgctggtgctgaaggacctgggcatccaggtggataggtacattgcctccgaggtgtgcgaggactccatcaccgtgggaatggtgcgtcatcagggcaagatcatgtacgtgggcgacgtgcggagcgtgacacagaagcatatccaggagtggggccctttcgacctggtgatcggcggcagcccttgcaatgacctgagcatcgtgaacccagcccggaagggcctgtacgagggaaccggcagactgttcttcgagttttacagactgctgcacgacgcccggcctaaggaaggcgacgaccggcccttcttttggctgttcgagaatgtggtggccatgggagtcagcgacaagcgggatattagccggttcctggagagcaaccccgtgatgatcgatgccaaggaagtgagcgccgcccaccgggccagatacttctggggcaatctgcctggcatgaacagacccctggccagcaccgtgaacgacaagctggagctgcaggagtgcctggagcacggccggatcgccaagttcagcaaggtgagaaccatcaccacccgaagcaacagcatcaaacaaggcaaggaccagcactttcctgtgttcatgaacgagaaggaggacatcctgtggtgtaccgagatggagagagtgttcgggttcccagtccactacacagatgtcagcaacatgtctagactggccagacagagactgctgggaagaagctggtccgtccctgtgatcagacacctgttcgcccctctgaaggagtacttcgcctgcgtgagcagcggcaacagcaacgccaacagccggggccccagcttctctagcggcctggtgccactgtccctgagagggagccacatgggccccatggagatctacaaaaccgtgagcgcctggaagcggcagcctgtgcgcgtgctgagcctgtttcggaatatcgataaagtcctgaaaagcctgggattcctggagagcggctctggctccggcggtggcaccctgaagtacgtggaggatgtgacaaacgtggtcagacgggatgtggagaagtggggccccttcgatctggtgtacggcagcacccaacccctgggcagctcttgtgaccggtgccctggctggtacatgtttcagttccaccggatcctgcagtacgccctgccgagacaggagtcccagcggccattcttttggattttcatggacaacttgctgctgaccgaggatgaccaggaaactaccactcggttcctgcagaccgaagccgtgaccctgcaggacgtgagaggccgggactaccagaacgccatgcgggtgtggtccaacatccctggactgaaaagcaagcacgcacctctgacccctaaagaagaggagtacctgcaggcccaggtgcggagcagaagcaagctggacgcccctaaggtggatctgctggtgaagaattgcctcctgcccctgagagagtacttcaagtatttcagccagaatagtctgcccctgggaggcagcggcggcggcatgaacaacagccagggcagggtgaccttcgaggacgtgaccgtgaacttcacccagggcgagtggcagaggctgaaccccgagcagaggaacctgtacagggacgtgatgctggagaactacagcaacctggtgagcgtgggccagagggagaccaccaagcccgacgtgatcctgaggctggagcagggcaaggagccctggagcgaggaggaggaggtgctgggcagcggcagggccgagggcggcccaagcagcggcgcccctcctcccagcggcggcagcccagccggctccccaacctctaccgaggagggcacctctgagtccgccacccccgagagcggccctggcacctccaccgagcccagcgagggcagcgcacccggcagccctgccggcagccccacctccacagaggagggaaccagcaccgagcccagcgaaggcagcgccccaggcaccagcaccgagcctagtgagcaggagattaaacggatcaacaagatcagaagaagacttgtgaaagacagcaacaccaagaaggccggcaagacaggccccatgaaaaccctgctggttagagtgatgacacccgatctgagagagcggctggaaaacctgagaaagaagcctgaaaatatcccccagcccatcagcaatacatctagagccaacctgaataagctgctgaccgattacaccgaaatgaagaaggcgatcctgcatgtgtactgggaagagttccagaaggaccctgtgggcctgatgagccgggtggcccagcctgccagcaagaagatcgatcagaacaagctgaaacctgagatggacgagaagggcaacctgaccaccgccggctttgcctgctctcagtgtggccagcccctgttcgtgtacaagctggagcaggtgtctgagaagggcaaggcttacaccaactacttcggacggtgcaatgtggccgagcacgaaaagctgatcctgctggcccagctgaagcccgagaaggatagcgacgaagccgtgacatatagcctgggaaagtttgggcagagggccctggatttctacagcattcatgtgaccaaggagtccacccaccccgtgaagcccctggcccagatcgccggaaacagatacgcctccggacctgtgggaaaggccctgagcgacgcatgtatgggcacaatcgcctccttcctgtctaagtaccaggacatcatcatcgaacaccagaaggtggtgaagggcaaccagaagagactggagagcctgcgggagctggccggcaaggaaaacctggaataccctagcgtgaccctgccacctcagcctcacaccaaggagggcgttgatgcctacaacgaagtgatcgcccgggtgcgaatgtgggtgaacctgaacctgtggcagaagctgaagctaagcagagatgatgccaagcctctgctgagactgaagggattcccttcctttcctctggtcgagagacaggccaacgaagtggactggtgggacatggtgtgtaacgtgaagaagctgatcaacgagaaaaaggaggatggcaaggtgttttggcagaatctggctggctacaagagacaggaagccctgagaccatacctgagcagcgaggaagatcggaagaagggaaagaaattcgctcggtaccagctgggcgacctgctgctgcacctggaaaagaagcacggcgaggactggggaaaggtgtacgacgaggcctgggagcggattgacaagaaagtggaaggcctgagcaagcacatcaagctggaagaggaacggagaagcgaggacgcccagagcaaggccgccctgaccgactggctgcgggctaaggccagcttcgtgatcgagggcctgaaggaggccgacaaggacgagttctgcagatgcgagctgaagctgcagaagtggtacggggacctgcggggaaagcccttcgccatcgaagccgagaacagcatcctggacatcagcggcttcagcaagcagtacaactgtgccttcatctggcagaaggacggcgtgaagaagctgaacctgtacctgatcatcaactacttcaagggcggcaagctgcggttcaagaagatcaaacctgaagccttcgaagccaacagattctacaccgtgatcaacaaaaagagcggcgagatcgtgcccatggaggtgaacttcaacttcgacgaccccaacctgatcatcctgcctctggcctttggcaagagacagggcagagaattcatctggaacgacctgctgtccctggaaaccggcagcctgaagctggccaacggaagagtgatcgagaagacactgtacaacagaagaacccggcaggatgagcctgccctgttcgtggccctgaccttcgagcggcgggaggtcctggactcctccaatatcaaaccaatgaacctgatcggcgtggcaagaggcgaaaacatccccgccgtgatcgccctgaccgaccccgagggctgcccactgagccggtttaaggatagcctgggaaacccaacccacatcctgagaatcggcgagagctataaggagaagcagcggaccatccaggccaagaaggaggtggagcagcggagagccggcggctacagccggaagtacgccagcaaagccaagaatctggcagacgatatggtgagaaacaccgctagagatctgctgtactacgccgtgacccaggatgccatgctgatcttcgccaacctgagccggggcttcggccggcagggcaagcggaccttcatggccgagagacagtacacacggatggaggactggctgaccgccaagctggcctacgagggcctgagcaagacctacctgtccaagacactggcccagtacacctccaagacatgcagcaactgtgggtttaccatcaccagcgccgactacgacagggtgctggagaagctgaagaagacagcaacaggctggatgaccacaattaacggcaaggagctgaaggtggagggccagattacctactacaacagatacaagagacagaacgtagtcaaggacctgtccgtcgagctggatagactgagcgaagaatctgtgaacaacgacatctcctcctggacaaagggcagaagcggagaagctctgagcctcctgaagaaaagattctcccatagacccgtgcaggagaagttcgtgtgcctgaactgcggcttcgagacacacgcagccgagcaagccgccctgaacatcgccagatcctggctgttcctgcggagccaggagtacaagaaataccagacaaacaagacaaccggcaacaccgataagagagccttcgtcgagacctggcagtccttttaccggaagaagcttaaggaggtgtggaaacctgccgtgcggtctggcggatctggcggaggctccaccagccccaagaaaaagagaaaagtctaagctgccttctgcggggcttgccttctggccatgcccttcttctctcccttgcacctgtacctcttggtctttgaataaagcctgagtaggaaggctagcaaaaaaaaaaaaaaaaaaaaaaaaaaaaaaaaaaaaaaaaaaaaaaaaaaaaaaaaaaaaaaaaaaaaaaaaaaaaaaaa

SEQ ID NO: 12729 - RNA, 5785 nt, synthetic construct
  source 1..5785: mol_type = other RNA
aggaaataagagagaaaagaagagtaagaagaaatataagagccaccatggcccctaagaagaagcgtaaagtgagccggatggaacgcctcgtctacgaggtgcggcagaagtgcagaaacatcgaggacatctgcatctcctgcggatctctgaacgtgaccctggagcacccactgttcatcggcggcatgtgccagaactgtaaaaactgttttctggagtgtgcctatcaatacgacgatgacggctaccagagctactgcaccatctgttgcggcggaagagaggtgctgatgtgtggaaataacaactgctgccggtgcttctgcgtggaatgcgtggacctgctggtgggccccggcgccgcccaggccgctattaaggaagatccttggaactgctacatgtgcggccacaagggcacatacggcctgctgagacggagagaggactggcctagcagactgcagatgttcttcgccaataaccacgaccaggagttcgacccccctaaggtgtaccctcccgtccccgccgagaagagaaagcccatccgggtcctgagcctgttcgatggcatcgccaccggtctgctggtgctgaaggacctgggcatccaggtggataggtacattgcctccgaggtgtgcgaggactccatcaccgtgggaatggtgcgtcatcagggcaagatcatgtacgtgggcgacgtgcggagcgtgacacagaagcatatccaggagtggggccctttcgacctggtgatcggcggcagcccttgcaatgacctgagcatcgtgaacccagcccggaagggcctgtacgagggaaccggcagactgttcttcgagttttacagactgctgcacgacgcccggcctaaggaaggcgacgaccggcccttcttttggctgttcgagaatgtggtggccatgggagtcagcgacaagcgggatattagccggttcctggagagcaaccccgtgatgatcgatgccaaggaagtgagcgccgcccaccgggccagatacttctggggcaatctgcctggcatgaacagacccctggccagcaccgtgaacgacaagctggagctgcaggagtgcctggagcacggccggatcgccaagttcagcaaggtgagaaccatcaccacccgaagcaacagcatcaaacaaggcaaggaccagcactttcctgtgttcatgaacgagaaggaggacatcctgtggtgtaccgagatggagagagtgttcgggttcccagtccactacacagatgtcagcaacatgtctagactggccagacagagactgctgggaagaagctggtccgtccctgtgatcagacacctgttcgcccctctgaaggagtacttcgcctgcgtgagcagcggcaacagcaacgccaacagccggggccccagcttctctagcggcctggtgccactgtccctgagagggagccacatgggccccatggagatctacaaaaccgtgagcgcctggaagcggcagcctgtgcgcgtgctgagcctgtttcggaatatcgataaagtcctgaaaagcctgggattcctggagagcggctctggctccggcggtggcaccctgaagtacgtggaggatgtgacaaacgtggtcagacgggatgtggagaagtggggccccttcgatctggtgtacggcagcacccaacccctgggcagctcttgtgaccggtgccctggctggtacatgtttcagttccaccggatcctgcagtacgccctgccgagacaggagtcccagcggccattcttttggattttcatggacaacttgctgctgaccgaggatgaccaggaaactaccactcggttcctgcagaccgaagccgtgaccctgcaggacgtgagaggccgggactaccagaacgccatgcgggtgtggtccaacatccctggactgaaaagcaagcacgcacctctgacccctaaagaagaggagtacctgcaggcccaggtgcggagcagaagcaagctggacgcccctaaggtggatctgctggtgaagaattgcctcctgcccctgagagagtacttcaagtatttcagccagaatagtctgcccctgggaggcagcggcggcggcatggacaccgtggtgttcgaggacgtggtggtggacttcacccccgaggagtgggccctgctgaaccccgcccagaggaagctgtacagggacgtgatgctggagaccttcaagcacctggccagcgtggacaacgaggcccagctgaaggccagcggcagcatcagccagcaggacaccagcggcgagaagctgagcctgaagcagaagatcgagaagttcaccaggaagaacatctgggccggcggcccaagcagcggcgcccctcctcccagcggcggcagcccagccggctccccaacctctaccgaggagggcacctctgagtccgccacccccgagagcggccctggcacctccaccgagcccagcgagggcagcgcacccggcagccctgccggcagccccacctccacagaggagggaaccagcaccgagcccagcgaaggcagcgccccaggcaccagcaccgagcctagtgagcaggagattaaacggatcaacaagatcagaagaagacttgtgaaagacagcaacaccaagaaggccggcaagacaggccccatgaaaaccctgctggttagagtgatgacacccgatctgagagagcggctggaaaacctgagaaagaagcctgaaaatatcccccagcccatcagcaatacatctagagccaacctgaataagctgctgaccgattacaccgaaatgaagaaggcgatcctgcatgtgtactgggaagagttccagaaggaccctgtgggcctgatgagccgggtggcccagcctgccagcaagaagatcgatcagaacaagctgaaacctgagatggacgagaagggcaacctgaccaccgccggctttgcctgctctcagtgtggccagcccctgttcgtgtacaagctggagcaggtgtctgagaagggcaaggcttacaccaactacttcggacggtgcaatgtggccgagcacgaaaagctgatcctgctggcccagctgaagcccgagaaggatagcgacgaagccgtgacatatagcctgggaaagtttgggcagagggccctggatttctacagcattcatgtgaccaaggagtccacccaccccgtgaagcccctggcccagatcgccggaaacagatacgcctccggacctgtgggaaaggccctgagcgacgcatgtatgggcacaatcgcctccttcctgtctaagtaccaggacatcatcatcgaacaccagaaggtggtgaagggcaaccagaagagactggagagcctgcgggagctggccggcaaggaaaacctggaataccctagcgtgaccctgccacctcagcctcacaccaaggagggcgttgatgcctacaacgaagtgatcgcccgggtgcgaatgtgggtgaacctgaacctgtggcagaagctgaagctaagcagagatgatgccaagcctctgctgagactgaagggattcccttcctttcctctggtcgagagacaggccaacgaagtggactggtgggacatggtgtgtaacgtgaagaagctgatcaacgagaaaaaggaggatggcaaggtgttttggcagaatctggctggctacaagagacaggaagccctgagaccatacctgagcagcgaggaagatcggaagaagggaaagaaattcgctcggtaccagctgggcgacctgctgctgcacctggaaaagaagcacggcgaggactggggaaaggtgtacgacgaggcctgggagcggattgacaagaaagtggaaggcctgagcaagcacatcaagctggaagaggaacggagaagcgaggacgcccagagcaaggccgccctgaccgactggctgcgggctaaggccagcttcgtgatcgagggcctgaaggaggccgacaaggacgagttctgcagatgcgagctgaagctgcagaagtggtacggggacctgcggggaaagcccttcgccatcgaagccgagaacagcatcctggacatcagcggcttcagcaagcagtacaactgtgccttcatctggcagaaggacggcgtgaagaagctgaacctgtacctgatcatcaactacttcaagggcggcaagctgcggttcaagaagatcaaacctgaagccttcgaagccaacagattctacaccgtgatcaacaaaaagagcggcgagatcgtgcccatggaggtgaacttcaacttcgacgaccccaacctgatcatcctgcctctggcctttggcaagagacagggcagagaattcatctggaacgacctgctgtccctggaaaccggcagcctgaagctggccaacggaagagtgatcgagaagacactgtacaacagaagaacccggcaggatgagcctgccctgttcgtggccctgaccttcgagcggcgggaggtcctggactcctccaatatcaaaccaatgaacctgatcggcgtggcaagaggcgaaaacatccccgccgtgatcgccctgaccgaccccgagggctgcccactgagccggtttaaggatagcctgggaaacccaacccacatcctgagaatcggcgagagctataaggagaagcagcggaccatccaggccaagaaggaggtggagcagcggagagccggcggctacagccggaagtacgccagcaaagccaagaatctggcagacgatatggtgagaaacaccgctagagatctgctgtactacgccgtgacccaggatgccatgctgatcttcgccaacctgagccggggcttcggccggcagggcaagcggaccttcatggccgagagacagtacacacggatggaggactggctgaccgccaagctggcctacgagggcctgagcaagacctacctgtccaagacactggcccagtacacctccaagacatgcagcaactgtgggtttaccatcaccagcgccgactacgacagggtgctggagaagctgaagaagacagcaacaggctggatgaccacaattaacggcaaggagctgaaggtggagggccagattacctactacaacagatacaagagacagaacgtagtcaaggacctgtccgtcgagctggatagactgagcgaagaatctgtgaacaacgacatctcctcctggacaaagggcagaagcggagaagctctgagcctcctgaagaaaagattctcccatagacccgtgcaggagaagttcgtgtgcctgaactgcggcttcgagacacacgcagccgagcaagccgccctgaacatcgccagatcctggctgttcctgcggagccaggagtacaagaaataccagacaaacaagacaaccggcaacaccgataagagagccttcgtcgagacctggcagtccttttaccggaagaagcttaaggaggtgtggaaacctgccgtgcggtctggcggatctggcggaggctccaccagccccaagaaaaagagaaaagtctaagctgccttctgcggggcttgccttctggccatgcccttcttctctcccttgcacctgtacctcttggtctttgaataaagcctgagtaggaaggctagcaaaaaaaaaaaaaaaaaaaaaaaaaaaaaaaaaaaaaaaaaaaaaaaaaaaaaaaaaaaaaaaaaaaaaaaaaaaaaaaa

SEQ ID NO: 12730 - RNA, 5785 nt, synthetic construct
  source 1..5785: mol_type = other RNA
aggaaataagagagaaaagaagagtaagaagaaatataagagccaccatggcccctaagaagaagcgtaaagtgagccggatggaacgcctcgtctacgaggtgcggcagaagtgcagaaacatcgaggacatctgcatctcctgcggatctctgaacgtgaccctggagcacccactgttcatcggcggcatgtgccagaactgtaaaaactgttttctggagtgtgcctatcaatacgacgatgacggctaccagagctactgcaccatctgttgcggcggaagagaggtgctgatgtgtggaaataacaactgctgccggtgcttctgcgtggaatgcgtggacctgctggtgggccccggcgccgcccaggccgctattaaggaagatccttggaactgctacatgtgcggccacaagggcacatacggcctgctgagacggagagaggactggcctagcagactgcagatgttcttcgccaataaccacgaccaggagttcgacccccctaaggtgtaccctcccgtccccgccgagaagagaaagcccatccgggtcctgagcctgttcgatggcatcgccaccggtctgctggtgctgaaggacctgggcatccaggtggataggtacattgcctccgaggtgtgcgaggactccatcaccgtgggaatggtgcgtcatcagggcaagatcatgtacgtgggcgacgtgcggagcgtgacacagaagcatatccaggagtggggccctttcgacctggtgatcggcggcagcccttgcaatgacctgagcatcgtgaacccagcccggaagggcctgtacgagggaaccggcagactgttcttcgagttttacagactgctgcacgacgcccggcctaaggaaggcgacgaccggcccttcttttggctgttcgagaatgtggtggccatgggagtcagcgacaagcgggatattagccggttcctggagagcaaccccgtgatgatcgatgccaaggaagtgagcgccgcccaccgggccagatacttctggggcaatctgcctggcatgaacagacccctggccagcaccgtgaacgacaagctggagctgcaggagtgcctggagcacggccggatcgccaagttcagcaaggtgagaaccatcaccacccgaagcaacagcatcaaacaaggcaaggaccagcactttcctgtgttcatgaacgagaaggaggacatcctgtggtgtaccgagatggagagagtgttcgggttcccagtccactacacagatgtcagcaacatgtctagactggccagacagagactgctgggaagaagctggtccgtccctgtgatcagacacctgttcgcccctctgaaggagtacttcgcctgcgtgagcagcggcaacagcaacgccaacagccggggccccagcttctctagcggcctggtgccactgtccctgagagggagccacatgggccccatggagatctacaaaaccgtgagcgcctggaagcggcagcctgtgcgcgtgctgagcctgtttcggaatatcgataaagtcctgaaaagcctgggattcctggagagcggctctggctccggcggtggcaccctgaagtacgtggaggatgtgacaaacgtggtcagacgggatgtggagaagtggggccccttcgatctggtgtacggcagcacccaacccctgggcagctcttgtgaccggtgccctggctggtacatgtttcagttccaccggatcctgcagtacgccctgccgagacaggagtcccagcggccattcttttggattttcatggacaacttgctgctgaccgaggatgaccaggaaactaccactcggttcctgcagaccgaagccgtgaccctgcaggacgtgagaggccgggactaccagaacgccatgcgggtgtggtccaacatccctggactgaaaagcaagcacgcacctctgacccctaaagaagaggagtacctgcaggcccaggtgcggagcagaagcaagctggacgcccctaaggtggatctgctggtgaagaattgcctcctgcccctgagagagtacttcaagtatttcagccagaatagtctgcccctgggaggcagcggcggcggcgagagcctgaccctggaggacgtggccgtggagttcacctgggaggagtggcagctgctgggccccgcccagaaggacctgtactgggacgtgatgctggagaactacaaccacctggtgagcctgggctaccaggccagcaagcccgacgccctgagcaagctggcccagggcgaggagccctgcgtgatcgagggcaagatccagaacaggaactgccccggcatcaggaaggccgacagcggcggcccaagcagcggcgcccctcctcccagcggcggcagcccagccggctccccaacctctaccgaggagggcacctctgagtccgccacccccgagagcggccctggcacctccaccgagcccagcgagggcagcgcacccggcagccctgccggcagccccacctccacagaggagggaaccagcaccgagcccagcgaaggcagcgccccaggcaccagcaccgagcctagtgagcaggagattaaacggatcaacaagatcagaagaagacttgtgaaagacagcaacaccaagaaggccggcaagacaggccccatgaaaaccctgctggttagagtgatgacacccgatctgagagagcggctggaaaacctgagaaagaagcctgaaaatatcccccagcccatcagcaatacatctagagccaacctgaataagctgctgaccgattacaccgaaatgaagaaggcgatcctgcatgtgtactgggaagagttccagaaggaccctgtgggcctgatgagccgggtggcccagcctgccagcaagaagatcgatcagaacaagctgaaacctgagatggacgagaagggcaacctgaccaccgccggctttgcctgctctcagtgtggccagcccctgttcgtgtacaagctggagcaggtgtctgagaagggcaaggcttacaccaactacttcggacggtgcaatgtggccgagcacgaaaagctgatcctgctggcccagctgaagcccgagaaggatagcgacgaagccgtgacatatagcctgggaaagtttgggcagagggccctggatttctacagcattcatgtgaccaaggagtccacccaccccgtgaagcccctggcccagatcgccggaaacagatacgcctccggacctgtgggaaaggccctgagcgacgcatgtatgggcacaatcgcctccttcctgtctaagtaccaggacatcatcatcgaacaccagaaggtggtgaagggcaaccagaagagactggagagcctgcgggagctggccggcaaggaaaacctggaataccctagcgtgaccctgccacctcagcctcacaccaaggagggcgttgatgcctacaacgaagtgatcgcccgggtgcgaatgtgggtgaacctgaacctgtggcagaagctgaagctaagcagagatgatgccaagcctctgctgagactgaagggattcccttcctttcctctggtcgagagacaggccaacgaagtggactggtgggacatggtgtgtaacgtgaagaagctgatcaacgagaaaaaggaggatggcaaggtgttttggcagaatctggctggctacaagagacaggaagccctgagaccatacctgagcagcgaggaagatcggaagaagggaaagaaattcgctcggtaccagctgggcgacctgctgctgcacctggaaaagaagcacggcgaggactggggaaaggtgtacgacgaggcctgggagcggattgacaagaaagtggaaggcctgagcaagcacatcaagctggaagaggaacggagaagcgaggacgcccagagcaaggccgccctgaccgactggctgcgggctaaggccagcttcgtgatcgagggcctgaaggaggccgacaaggacgagttctgcagatgcgagctgaagctgcagaagtggtacggggacctgcggggaaagcccttcgccatcgaagccgagaacagcatcctggacatcagcggcttcagcaagcagtacaactgtgccttcatctggcagaaggacggcgtgaagaagctgaacctgtacctgatcatcaactacttcaagggcggcaagctgcggttcaagaagatcaaacctgaagccttcgaagccaacagattctacaccgtgatcaacaaaaagagcggcgagatcgtgcccatggaggtgaacttcaacttcgacgaccccaacctgatcatcctgcctctggcctttggcaagagacagggcagagaattcatctggaacgacctgctgtccctggaaaccggcagcctgaagctggccaacggaagagtgatcgagaagacactgtacaacagaagaacccggcaggatgagcctgccctgttcgtggccctgaccttcgagcggcgggaggtcctggactcctccaatatcaaaccaatgaacctgatcggcgtggcaagaggcgaaaacatccccgccgtgatcgccctgaccgaccccgagggctgcccactgagccggtttaaggatagcctgggaaacccaacccacatcctgagaatcggcgagagctataaggagaagcagcggaccatccaggccaagaaggaggtggagcagcggagagccggcggctacagccggaagtacgccagcaaagccaagaatctggcagacgatatggtgagaaacaccgctagagatctgctgtactacgccgtgacccaggatgccatgctgatcttcgccaacctgagccggggcttcggccggcagggcaagcggaccttcatggccgagagacagtacacacggatggaggactggctgaccgccaagctggcctacgagggcctgagcaagacctacctgtccaagacactggcccagtacacctccaagacatgcagcaactgtgggtttaccatcaccagcgccgactacgacagggtgctggagaagctgaagaagacagcaacaggctggatgaccacaattaacggcaaggagctgaaggtggagggccagattacctactacaacagatacaagagacagaacgtagtcaaggacctgtccgtcgagctggatagactgagcgaagaatctgtgaacaacgacatctcctcctggacaaagggcagaagcggagaagctctgagcctcctgaagaaaagattctcccatagacccgtgcaggagaagttcgtgtgcctgaactgcggcttcgagacacacgcagccgagcaagccgccctgaacatcgccagatcctggctgttcctgcggagccaggagtacaagaaataccagacaaacaagacaaccggcaacaccgataagagagccttcgtcgagacctggcagtccttttaccggaagaagcttaaggaggtgtggaaacctgccgtgcggtctggcggatctggcggaggctccaccagccccaagaaaaagagaaaagtctaagctgccttctgcggggcttgccttctggccatgcccttcttctctcccttgcacctgtacctcttggtctttgaataaagcctgagtaggaaggctagcaaaaaaaaaaaaaaaaaaaaaaaaaaaaaaaaaaaaaaaaaaaaaaaaaaaaaaaaaaaaaaaaaaaaaaaaaaaaaaaa

SEQ ID NO: 12731 - RNA, 5785 nt, synthetic construct
  source 1..5785: mol_type = other RNA
aggaaataagagagaaaagaagagtaagaagaaatataagagccaccatggcccctaagaagaagcgtaaagtgagccggatggaacgcctcgtctacgaggtgcggcagaagtgcagaaacatcgaggacatctgcatctcctgcggatctctgaacgtgaccctggagcacccactgttcatcggcggcatgtgccagaactgtaaaaactgttttctggagtgtgcctatcaatacgacgatgacggctaccagagctactgcaccatctgttgcggcggaagagaggtgctgatgtgtggaaataacaactgctgccggtgcttctgcgtggaatgcgtggacctgctggtgggccccggcgccgcccaggccgctattaaggaagatccttggaactgctacatgtgcggccacaagggcacatacggcctgctgagacggagagaggactggcctagcagactgcagatgttcttcgccaataaccacgaccaggagttcgacccccctaaggtgtaccctcccgtccccgccgagaagagaaagcccatccgggtcctgagcctgttcgatggcatcgccaccggtctgctggtgctgaaggacctgggcatccaggtggataggtacattgcctccgaggtgtgcgaggactccatcaccgtgggaatggtgcgtcatcagggcaagatcatgtacgtgggcgacgtgcggagcgtgacacagaagcatatccaggagtggggccctttcgacctggtgatcggcggcagcccttgcaatgacctgagcatcgtgaacccagcccggaagggcctgtacgagggaaccggcagactgttcttcgagttttacagactgctgcacgacgcccggcctaaggaaggcgacgaccggcccttcttttggctgttcgagaatgtggtggccatgggagtcagcgacaagcgggatattagccggttcctggagagcaaccccgtgatgatcgatgccaaggaagtgagcgccgcccaccgggccagatacttctggggcaatctgcctggcatgaacagacccctggccagcaccgtgaacgacaagctggagctgcaggagtgcctggagcacggccggatcgccaagttcagcaaggtgagaaccatcaccacccgaagcaacagcatcaaacaaggcaaggaccagcactttcctgtgttcatgaacgagaaggaggacatcctgtggtgtaccgagatggagagagtgttcgggttcccagtccactacacagatgtcagcaacatgtctagactggccagacagagactgctgggaagaagctggtccgtccctgtgatcagacacctgttcgcccctctgaaggagtacttcgcctgcgtgagcagcggcaacagcaacgccaacagccggggccccagcttctctagcggcctggtgccactgtccctgagagggagccacatgggccccatggagatctacaaaaccgtgagcgcctggaagcggcagcctgtgcgcgtgctgagcctgtttcggaatatcgataaagtcctgaaaagcctgggattcctggagagcggctctggctccggcggtggcaccctgaagtacgtggaggatgtgacaaacgtggtcagacgggatgtggagaagtggggccccttcgatctggtgtacggcagcacccaacccctgggcagctcttgtgaccggtgccctggctggtacatgtttcagttccaccggatcctgcagtacgccctgccgagacaggagtcccagcggccattcttttggattttcatggacaacttgctgctgaccgaggatgaccaggaaactaccactcggttcctgcagaccgaagccgtgaccctgcaggacgtgagaggccgggactaccagaacgccatgcgggtgtggtccaacatccctggactgaaaagcaagcacgcacctctgacccctaaagaagaggagtacctgcaggcccaggtgcggagcagaagcaagctggacgcccctaaggtggatctgctggtgaagaattgcctcctgcccctgagagagtacttcaagtatttcagccagaatagtctgcccctgggaggcagcggcggcggcatgaccctgctgaccttcagggacgtggccatcgagttcagcctggaggagtggaagtgcctggacctggcccagcagaacctgtacagggacgtgatgctggagaactacaggaacctgttcagcgtgggcctgaccgtgagcaagcccggcctgatcacctgcctggagcagaggaaggagccctggaacgtgaagaggcaggaggccgccgacggccaccccggctggagcgccgtggtgggcggcccaagcagcggcgcccctcctcccagcggcggcagcccagccggctccccaacctctaccgaggagggcacctctgagtccgccacccccgagagcggccctggcacctccaccgagcccagcgagggcagcgcacccggcagccctgccggcagccccacctccacagaggagggaaccagcaccgagcccagcgaaggcagcgccccaggcaccagcaccgagcctagtgagcaggagattaaacggatcaacaagatcagaagaagacttgtgaaagacagcaacaccaagaaggccggcaagacaggccccatgaaaaccctgctggttagagtgatgacacccgatctgagagagcggctggaaaacctgagaaagaagcctgaaaatatcccccagcccatcagcaatacatctagagccaacctgaataagctgctgaccgattacaccgaaatgaagaaggcgatcctgcatgtgtactgggaagagttccagaaggaccctgtgggcctgatgagccgggtggcccagcctgccagcaagaagatcgatcagaacaagctgaaacctgagatggacgagaagggcaacctgaccaccgccggctttgcctgctctcagtgtggccagcccctgttcgtgtacaagctggagcaggtgtctgagaagggcaaggcttacaccaactacttcggacggtgcaatgtggccgagcacgaaaagctgatcctgctggcccagctgaagcccgagaaggatagcgacgaagccgtgacatatagcctgggaaagtttgggcagagggccctggatttctacagcattcatgtgaccaaggagtccacccaccccgtgaagcccctggcccagatcgccggaaacagatacgcctccggacctgtgggaaaggccctgagcgacgcatgtatgggcacaatcgcctccttcctgtctaagtaccaggacatcatcatcgaacaccagaaggtggtgaagggcaaccagaagagactggagagcctgcgggagctggccggcaaggaaaacctggaataccctagcgtgaccctgccacctcagcctcacaccaaggagggcgttgatgcctacaacgaagtgatcgcccgggtgcgaatgtgggtgaacctgaacctgtggcagaagctgaagctaagcagagatgatgccaagcctctgctgagactgaagggattcccttcctttcctctggtcgagagacaggccaacgaagtggactggtgggacatggtgtgtaacgtgaagaagctgatcaacgagaaaaaggaggatggcaaggtgttttggcagaatctggctggctacaagagacaggaagccctgagaccatacctgagcagcgaggaagatcggaagaagggaaagaaattcgctcggtaccagctgggcgacctgctgctgcacctggaaaagaagcacggcgaggactggggaaaggtgtacgacgaggcctgggagcggattgacaagaaagtggaaggcctgagcaagcacatcaagctggaagaggaacggagaagcgaggacgcccagagcaaggccgccctgaccgactggctgcgggctaaggccagcttcgtgatcgagggcctgaaggaggccgacaaggacgagttctgcagatgcgagctgaagctgcagaagtggtacggggacctgcggggaaagcccttcgccatcgaagccgagaacagcatcctggacatcagcggcttcagcaagcagtacaactgtgccttcatctggcagaaggacggcgtgaagaagctgaacctgtacctgatcatcaactacttcaagggcggcaagctgcggttcaagaagatcaaacctgaagccttcgaagccaacagattctacaccgtgatcaacaaaaagagcggcgagatcgtgcccatggaggtgaacttcaacttcgacgaccccaacctgatcatcctgcctctggcctttggcaagagacagggcagagaattcatctggaacgacctgctgtccctggaaaccggcagcctgaagctggccaacggaagagtgatcgagaagacactgtacaacagaagaacccggcaggatgagcctgccctgttcgtggccctgaccttcgagcggcgggaggtcctggactcctccaatatcaaaccaatgaacctgatcggcgtggcaagaggcgaaaacatccccgccgtgatcgccctgaccgaccccgagggctgcccactgagccggtttaaggatagcctgggaaacccaacccacatcctgagaatcggcgagagctataaggagaagcagcggaccatccaggccaagaaggaggtggagcagcggagagccggcggctacagccggaagtacgccagcaaagccaagaatctggcagacgatatggtgagaaacaccgctagagatctgctgtactacgccgtgacccaggatgccatgctgatcttcgccaacctgagccggggcttcggccggcagggcaagcggaccttcatggccgagagacagtacacacggatggaggactggctgaccgccaagctggcctacgagggcctgagcaagacctacctgtccaagacactggcccagtacacctccaagacatgcagcaactgtgggtttaccatcaccagcgccgactacgacagggtgctggagaagctgaagaagacagcaacaggctggatgaccacaattaacggcaaggagctgaaggtggagggccagattacctactacaacagatacaagagacagaacgtagtcaaggacctgtccgtcgagctggatagactgagcgaagaatctgtgaacaacgacatctcctcctggacaaagggcagaagcggagaagctctgagcctcctgaagaaaagattctcccatagacccgtgcaggagaagttcgtgtgcctgaactgcggcttcgagacacacgcagccgagcaagccgccctgaacatcgccagatcctggctgttcctgcggagccaggagtacaagaaataccagacaaacaagacaaccggcaacaccgataagagagccttcgtcgagacctggcagtccttttaccggaagaagcttaaggaggtgtggaaacctgccgtgcggtctggcggatctggcggaggctccaccagccccaagaaaaagagaaaagtctaagctgccttctgcggggcttgccttctggccatgcccttcttctctcccttgcacctgtacctcttggtctttgaataaagcctgagtaggaaggctagcaaaaaaaaaaaaaaaaaaaaaaaaaaaaaaaaaaaaaaaaaaaaaaaaaaaaaaaaaaaaaaaaaaaaaaaaaaaaaaaa

SEQ ID NO: 12732 - RNA, 5785 nt, synthetic construct
  source 1..5785: mol_type = other RNA
aggaaataagagagaaaagaagagtaagaagaaatataagagccaccatggcccctaagaagaagcgtaaagtgagccggatggaacgcctcgtctacgaggtgcggcagaagtgcagaaacatcgaggacatctgcatctcctgcggatctctgaacgtgaccctggagcacccactgttcatcggcggcatgtgccagaactgtaaaaactgttttctggagtgtgcctatcaatacgacgatgacggctaccagagctactgcaccatctgttgcggcggaagagaggtgctgatgtgtggaaataacaactgctgccggtgcttctgcgtggaatgcgtggacctgctggtgggccccggcgccgcccaggccgctattaaggaagatccttggaactgctacatgtgcggccacaagggcacatacggcctgctgagacggagagaggactggcctagcagactgcagatgttcttcgccaataaccacgaccaggagttcgacccccctaaggtgtaccctcccgtccccgccgagaagagaaagcccatccgggtcctgagcctgttcgatggcatcgccaccggtctgctggtgctgaaggacctgggcatccaggtggataggtacattgcctccgaggtgtgcgaggactccatcaccgtgggaatggtgcgtcatcagggcaagatcatgtacgtgggcgacgtgcggagcgtgacacagaagcatatccaggagtggggccctttcgacctggtgatcggcggcagcccttgcaatgacctgagcatcgtgaacccagcccggaagggcctgtacgagggaaccggcagactgttcttcgagttttacagactgctgcacgacgcccggcctaaggaaggcgacgaccggcccttcttttggctgttcgagaatgtggtggccatgggagtcagcgacaagcgggatattagccggttcctggagagcaaccccgtgatgatcgatgccaaggaagtgagcgccgcccaccgggccagatacttctggggcaatctgcctggcatgaacagacccctggccagcaccgtgaacgacaagctggagctgcaggagtgcctggagcacggccggatcgccaagttcagcaaggtgagaaccatcaccacccgaagcaacagcatcaaacaaggcaaggaccagcactttcctgtgttcatgaacgagaaggaggacatcctgtggtgtaccgagatggagagagtgttcgggttcccagtccactacacagatgtcagcaacatgtctagactggccagacagagactgctgggaagaagctggtccgtccctgtgatcagacacctgttcgcccctctgaaggagtacttcgcctgcgtgagcagcggcaacagcaacgccaacagccggggccccagcttctctagcggcctggtgccactgtccctgagagggagccacatgggccccatggagatctacaaaaccgtgagcgcctggaagcggcagcctgtgcgcgtgctgagcctgtttcggaatatcgataaagtcctgaaaagcctgggattcctggagagcggctctggctccggcggtggcaccctgaagtacgtggaggatgtgacaaacgtggtcagacgggatgtggagaagtggggccccttcgatctggtgtacggcagcacccaacccctgggcagctcttgtgaccggtgccctggctggtacatgtttcagttccaccggatcctgcagtacgccctgccgagacaggagtcccagcggccattcttttggattttcatggacaacttgctgctgaccgaggatgaccaggaaactaccactcggttcctgcagaccgaagccgtgaccctgcaggacgtgagaggccgggactaccagaacgccatgcgggtgtggtccaacatccctggactgaaaagcaagcacgcacctctgacccctaaagaagaggagtacctgcaggcccaggtgcggagcagaagcaagctggacgcccctaaggtggatctgctggtgaagaattgcctcctgcccctgagagagtacttcaagtatttcagccagaatagtctgcccctgggaggcagcggcggcggcagccaggagctgctgaccttcaaggacgtgagcgtggacttcacccaggaggagtggggccagctggcccccgcccacaggaacctgtacagggaggtgatgctggagaactacggcaacctggtgagcgtgggctgccagctgagcaagcccggcgtgatcagccagctggagaagggcgaggagccctggctgatggagagggacatcagcggcgtgcccagcagcgacctgaagagcaagggcggcccaagcagcggcgcccctcctcccagcggcggcagcccagccggctccccaacctctaccgaggagggcacctctgagtccgccacccccgagagcggccctggcacctccaccgagcccagcgagggcagcgcacccggcagccctgccggcagccccacctccacagaggagggaaccagcaccgagcccagcgaaggcagcgccccaggcaccagcaccgagcctagtgagcaggagattaaacggatcaacaagatcagaagaagacttgtgaaagacagcaacaccaagaaggccggcaagacaggccccatgaaaaccctgctggttagagtgatgacacccgatctgagagagcggctggaaaacctgagaaagaagcctgaaaatatcccccagcccatcagcaatacatctagagccaacctgaataagctgctgaccgattacaccgaaatgaagaaggcgatcctgcatgtgtactgggaagagttccagaaggaccctgtgggcctgatgagccgggtggcccagcctgccagcaagaagatcgatcagaacaagctgaaacctgagatggacgagaagggcaacctgaccaccgccggctttgcctgctctcagtgtggccagcccctgttcgtgtacaagctggagcaggtgtctgagaagggcaaggcttacaccaactacttcggacggtgcaatgtggccgagcacgaaaagctgatcctgctggcccagctgaagcccgagaaggatagcgacgaagccgtgacatatagcctgggaaagtttgggcagagggccctggatttctacagcattcatgtgaccaaggagtccacccaccccgtgaagcccctggcccagatcgccggaaacagatacgcctccggacctgtgggaaaggccctgagcgacgcatgtatgggcacaatcgcctccttcctgtctaagtaccaggacatcatcatcgaacaccagaaggtggtgaagggcaaccagaagagactggagagcctgcgggagctggccggcaaggaaaacctggaataccctagcgtgaccctgccacctcagcctcacaccaaggagggcgttgatgcctacaacgaagtgatcgcccgggtgcgaatgtgggtgaacctgaacctgtggcagaagctgaagctaagcagagatgatgccaagcctctgctgagactgaagggattcccttcctttcctctggtcgagagacaggccaacgaagtggactggtgggacatggtgtgtaacgtgaagaagctgatcaacgagaaaaaggaggatggcaaggtgttttggcagaatctggctggctacaagagacaggaagccctgagaccatacctgagcagcgaggaagatcggaagaagggaaagaaattcgctcggtaccagctgggcgacctgctgctgcacctggaaaagaagcacggcgaggactggggaaaggtgtacgacgaggcctgggagcggattgacaagaaagtggaaggcctgagcaagcacatcaagctggaagaggaacggagaagcgaggacgcccagagcaaggccgccctgaccgactggctgcgggctaaggccagcttcgtgatcgagggcctgaaggaggccgacaaggacgagttctgcagatgcgagctgaagctgcagaagtggtacggggacctgcggggaaagcccttcgccatcgaagccgagaacagcatcctggacatcagcggcttcagcaagcagtacaactgtgccttcatctggcagaaggacggcgtgaagaagctgaacctgtacctgatcatcaactacttcaagggcggcaagctgcggttcaagaagatcaaacctgaagccttcgaagccaacagattctacaccgtgatcaacaaaaagagcggcgagatcgtgcccatggaggtgaacttcaacttcgacgaccccaacctgatcatcctgcctctggcctttggcaagagacagggcagagaattcatctggaacgacctgctgtccctggaaaccggcagcctgaagctggccaacggaagagtgatcgagaagacactgtacaacagaagaacccggcaggatgagcctgccctgttcgtggccctgaccttcgagcggcgggaggtcctggactcctccaatatcaaaccaatgaacctgatcggcgtggcaagaggcgaaaacatccccgccgtgatcgccctgaccgaccccgagggctgcccactgagccggtttaaggatagcctgggaaacccaacccacatcctgagaatcggcgagagctataaggagaagcagcggaccatccaggccaagaaggaggtggagcagcggagagccggcggctacagccggaagtacgccagcaaagccaagaatctggcagacgatatggtgagaaacaccgctagagatctgctgtactacgccgtgacccaggatgccatgctgatcttcgccaacctgagccggggcttcggccggcagggcaagcggaccttcatggccgagagacagtacacacggatggaggactggctgaccgccaagctggcctacgagggcctgagcaagacctacctgtccaagacactggcccagtacacctccaagacatgcagcaactgtgggtttaccatcaccagcgccgactacgacagggtgctggagaagctgaagaagacagcaacaggctggatgaccacaattaacggcaaggagctgaaggtggagggccagattacctactacaacagatacaagagacagaacgtagtcaaggacctgtccgtcgagctggatagactgagcgaagaatctgtgaacaacgacatctcctcctggacaaagggcagaagcggagaagctctgagcctcctgaagaaaagattctcccatagacccgtgcaggagaagttcgtgtgcctgaactgcggcttcgagacacacgcagccgagcaagccgccctgaacatcgccagatcctggctgttcctgcggagccaggagtacaagaaataccagacaaacaagacaaccggcaacaccgataagagagccttcgtcgagacctggcagtccttttaccggaagaagcttaaggaggtgtggaaacctgccgtgcggtctggcggatctggcggaggctccaccagccccaagaaaaagagaaaagtctaagctgccttctgcggggcttgccttctggccatgcccttcttctctcccttgcacctgtacctcttggtctttgaataaagcctgagtaggaaggctagcaaaaaaaaaaaaaaaaaaaaaaaaaaaaaaaaaaaaaaaaaaaaaaaaaaaaaaaaaaaaaaaaaaaaaaaaaaaaaaaa

SEQ ID NO: 12733 - RNA, 5785 nt, synthetic construct
  source 1..5785: mol_type = other RNA
aggaaataagagagaaaagaagagtaagaagaaatataagagccaccatggcccctaagaagaagcgtaaagtgagccggatggaacgcctcgtctacgaggtgcggcagaagtgcagaaacatcgaggacatctgcatctcctgcggatctctgaacgtgaccctggagcacccactgttcatcggcggcatgtgccagaactgtaaaaactgttttctggagtgtgcctatcaatacgacgatgacggctaccagagctactgcaccatctgttgcggcggaagagaggtgctgatgtgtggaaataacaactgctgccggtgcttctgcgtggaatgcgtggacctgctggtgggccccggcgccgcccaggccgctattaaggaagatccttggaactgctacatgtgcggccacaagggcacatacggcctgctgagacggagagaggactggcctagcagactgcagatgttcttcgccaataaccacgaccaggagttcgacccccctaaggtgtaccctcccgtccccgccgagaagagaaagcccatccgggtcctgagcctgttcgatggcatcgccaccggtctgctggtgctgaaggacctgggcatccaggtggataggtacattgcctccgaggtgtgcgaggactccatcaccgtgggaatggtgcgtcatcagggcaagatcatgtacgtgggcgacgtgcggagcgtgacacagaagcatatccaggagtggggccctttcgacctggtgatcggcggcagcccttgcaatgacctgagcatcgtgaacccagcccggaagggcctgtacgagggaaccggcagactgttcttcgagttttacagactgctgcacgacgcccggcctaaggaaggcgacgaccggcccttcttttggctgttcgagaatgtggtggccatgggagtcagcgacaagcgggatattagccggttcctggagagcaaccccgtgatgatcgatgccaaggaagtgagcgccgcccaccgggccagatacttctggggcaatctgcctggcatgaacagacccctggccagcaccgtgaacgacaagctggagctgcaggagtgcctggagcacggccggatcgccaagttcagcaaggtgagaaccatcaccacccgaagcaacagcatcaaacaaggcaaggaccagcactttcctgtgttcatgaacgagaaggaggacatcctgtggtgtaccgagatggagagagtgttcgggttcccagtccactacacagatgtcagcaacatgtctagactggccagacagagactgctgggaagaagctggtccgtccctgtgatcagacacctgttcgcccctctgaaggagtacttcgcctgcgtgagcagcggcaacagcaacgccaacagccggggccccagcttctctagcggcctggtgccactgtccctgagagggagccacatgggccccatggagatctacaaaaccgtgagcgcctggaagcggcagcctgtgcgcgtgctgagcctgtttcggaatatcgataaagtcctgaaaagcctgggattcctggagagcggctctggctccggcggtggcaccctgaagtacgtggaggatgtgacaaacgtggtcagacgggatgtggagaagtggggccccttcgatctggtgtacggcagcacccaacccctgggcagctcttgtgaccggtgccctggctggtacatgtttcagttccaccggatcctgcagtacgccctgccgagacaggagtcccagcggccattcttttggattttcatggacaacttgctgctgaccgaggatgaccaggaaactaccactcggttcctgcagaccgaagccgtgaccctgcaggacgtgagaggccgggactaccagaacgccatgcgggtgtggtccaacatccctggactgaaaagcaagcacgcacctctgacccctaaagaagaggagtacctgcaggcccaggtgcggagcagaagcaagctggacgcccctaaggtggatctgctggtgaagaattgcctcctgcccctgagagagtacttcaagtatttcagccagaatagtctgcccctgggaggcagcggcggcggcatggccaacgccaccggcagcggcgtggagcagaagttccagggcagcgtgagcttcaaggacgtgaccgtgggcttcacccaggaggagtggcagcacctggaccccagccagagggccctgtacagggacgtgatgctggagaactacagcaacctggtgagcgtgggctactgcgtgcacaagcccgaggtgatcttcaggctggagcagggcgaggagccctggaagctggaggaggagggcggcccaagcagcggcgcccctcctcccagcggcggcagcccagccggctccccaacctctaccgaggagggcacctctgagtccgccacccccgagagcggccctggcacctccaccgagcccagcgagggcagcgcacccggcagccctgccggcagccccacctccacagaggagggaaccagcaccgagcccagcgaaggcagcgccccaggcaccagcaccgagcctagtgagcaggagattaaacggatcaacaagatcagaagaagacttgtgaaagacagcaacaccaagaaggccggcaagacaggccccatgaaaaccctgctggttagagtgatgacacccgatctgagagagcggctggaaaacctgagaaagaagcctgaaaatatcccccagcccatcagcaatacatctagagccaacctgaataagctgctgaccgattacaccgaaatgaagaaggcgatcctgcatgtgtactgggaagagttccagaaggaccctgtgggcctgatgagccgggtggcccagcctgccagcaagaagatcgatcagaacaagctgaaacctgagatggacgagaagggcaacctgaccaccgccggctttgcctgctctcagtgtggccagcccctgttcgtgtacaagctggagcaggtgtctgagaagggcaaggcttacaccaactacttcggacggtgcaatgtggccgagcacgaaaagctgatcctgctggcccagctgaagcccgagaaggatagcgacgaagccgtgacatatagcctgggaaagtttgggcagagggccctggatttctacagcattcatgtgaccaaggagtccacccaccccgtgaagcccctggcccagatcgccggaaacagatacgcctccggacctgtgggaaaggccctgagcgacgcatgtatgggcacaatcgcctccttcctgtctaagtaccaggacatcatcatcgaacaccagaaggtggtgaagggcaaccagaagagactggagagcctgcgggagctggccggcaaggaaaacctggaataccctagcgtgaccctgccacctcagcctcacaccaaggagggcgttgatgcctacaacgaagtgatcgcccgggtgcgaatgtgggtgaacctgaacctgtggcagaagctgaagctaagcagagatgatgccaagcctctgctgagactgaagggattcccttcctttcctctggtcgagagacaggccaacgaagtggactggtgggacatggtgtgtaacgtgaagaagctgatcaacgagaaaaaggaggatggcaaggtgttttggcagaatctggctggctacaagagacaggaagccctgagaccatacctgagcagcgaggaagatcggaagaagggaaagaaattcgctcggtaccagctgggcgacctgctgctgcacctggaaaagaagcacggcgaggactggggaaaggtgtacgacgaggcctgggagcggattgacaagaaagtggaaggcctgagcaagcacatcaagctggaagaggaacggagaagcgaggacgcccagagcaaggccgccctgaccgactggctgcgggctaaggccagcttcgtgatcgagggcctgaaggaggccgacaaggacgagttctgcagatgcgagctgaagctgcagaagtggtacggggacctgcggggaaagcccttcgccatcgaagccgagaacagcatcctggacatcagcggcttcagcaagcagtacaactgtgccttcatctggcagaaggacggcgtgaagaagctgaacctgtacctgatcatcaactacttcaagggcggcaagctgcggttcaagaagatcaaacctgaagccttcgaagccaacagattctacaccgtgatcaacaaaaagagcggcgagatcgtgcccatggaggtgaacttcaacttcgacgaccccaacctgatcatcctgcctctggcctttggcaagagacagggcagagaattcatctggaacgacctgctgtccctggaaaccggcagcctgaagctggccaacggaagagtgatcgagaagacactgtacaacagaagaacccggcaggatgagcctgccctgttcgtggccctgaccttcgagcggcgggaggtcctggactcctccaatatcaaaccaatgaacctgatcggcgtggcaagaggcgaaaacatccccgccgtgatcgccctgaccgaccccgagggctgcccactgagccggtttaaggatagcctgggaaacccaacccacatcctgagaatcggcgagagctataaggagaagcagcggaccatccaggccaagaaggaggtggagcagcggagagccggcggctacagccggaagtacgccagcaaagccaagaatctggcagacgatatggtgagaaacaccgctagagatctgctgtactacgccgtgacccaggatgccatgctgatcttcgccaacctgagccggggcttcggccggcagggcaagcggaccttcatggccgagagacagtacacacggatggaggactggctgaccgccaagctggcctacgagggcctgagcaagacctacctgtccaagacactggcccagtacacctccaagacatgcagcaactgtgggtttaccatcaccagcgccgactacgacagggtgctggagaagctgaagaagacagcaacaggctggatgaccacaattaacggcaaggagctgaaggtggagggccagattacctactacaacagatacaagagacagaacgtagtcaaggacctgtccgtcgagctggatagactgagcgaagaatctgtgaacaacgacatctcctcctggacaaagggcagaagcggagaagctctgagcctcctgaagaaaagattctcccatagacccgtgcaggagaagttcgtgtgcctgaactgcggcttcgagacacacgcagccgagcaagccgccctgaacatcgccagatcctggctgttcctgcggagccaggagtacaagaaataccagacaaacaagacaaccggcaacaccgataagagagccttcgtcgagacctggcagtccttttaccggaagaagcttaaggaggtgtggaaacctgccgtgcggtctggcggatctggcggaggctccaccagccccaagaaaaagagaaaagtctaagctgccttctgcggggcttgccttctggccatgcccttcttctctcccttgcacctgtacctcttggtctttgaataaagcctgagtaggaaggctagcaaaaaaaaaaaaaaaaaaaaaaaaaaaaaaaaaaaaaaaaaaaaaaaaaaaaaaaaaaaaaaaaaaaaaaaaaaaaaaaa

SEQ ID NO: 12734 - RNA, 5785 nt, synthetic construct
  source 1..5785: mol_type = other RNA
aggaaataagagagaaaagaagagtaagaagaaatataagagccaccatggcccctaagaagaagcgtaaagtgagccggatggaacgcctcgtctacgaggtgcggcagaagtgcagaaacatcgaggacatctgcatctcctgcggatctctgaacgtgaccctggagcacccactgttcatcggcggcatgtgccagaactgtaaaaactgttttctggagtgtgcctatcaatacgacgatgacggctaccagagctactgcaccatctgttgcggcggaagagaggtgctgatgtgtggaaataacaactgctgccggtgcttctgcgtggaatgcgtggacctgctggtgggccccggcgccgcccaggccgctattaaggaagatccttggaactgctacatgtgcggccacaagggcacatacggcctgctgagacggagagaggactggcctagcagactgcagatgttcttcgccaataaccacgaccaggagttcgacccccctaaggtgtaccctcccgtccccgccgagaagagaaagcccatccgggtcctgagcctgttcgatggcatcgccaccggtctgctggtgctgaaggacctgggcatccaggtggataggtacattgcctccgaggtgtgcgaggactccatcaccgtgggaatggtgcgtcatcagggcaagatcatgtacgtgggcgacgtgcggagcgtgacacagaagcatatccaggagtggggccctttcgacctggtgatcggcggcagcccttgcaatgacctgagcatcgtgaacccagcccggaagggcctgtacgagggaaccggcagactgttcttcgagttttacagactgctgcacgacgcccggcctaaggaaggcgacgaccggcccttcttttggctgttcgagaatgtggtggccatgggagtcagcgacaagcgggatattagccggttcctggagagcaaccccgtgatgatcgatgccaaggaagtgagcgccgcccaccgggccagatacttctggggcaatctgcctggcatgaacagacccctggccagcaccgtgaacgacaagctggagctgcaggagtgcctggagcacggccggatcgccaagttcagcaaggtgagaaccatcaccacccgaagcaacagcatcaaacaaggcaaggaccagcactttcctgtgttcatgaacgagaaggaggacatcctgtggtgtaccgagatggagagagtgttcgggttcccagtccactacacagatgtcagcaacatgtctagactggccagacagagactgctgggaagaagctggtccgtccctgtgatcagacacctgttcgcccctctgaaggagtacttcgcctgcgtgagcagcggcaacagcaacgccaacagccggggccccagcttctctagcggcctggtgccactgtccctgagagggagccacatgggccccatggagatctacaaaaccgtgagcgcctggaagcggcagcctgtgcgcgtgctgagcctgtttcggaatatcgataaagtcctgaaaagcctgggattcctggagagcggctctggctccggcggtggcaccctgaagtacgtggaggatgtgacaaacgtggtcagacgggatgtggagaagtggggccccttcgatctggtgtacggcagcacccaacccctgggcagctcttgtgaccggtgccctggctggtacatgtttcagttccaccggatcctgcagtacgccctgccgagacaggagtcccagcggccattcttttggattttcatggacaacttgctgctgaccgaggatgaccaggaaactaccactcggttcctgcagaccgaagccgtgaccctgcaggacgtgagaggccgggactaccagaacgccatgcgggtgtggtccaacatccctggactgaaaagcaagcacgcacctctgacccctaaagaagaggagtacctgcaggcccaggtgcggagcagaagcaagctggacgcccctaaggtggatctgctggtgaagaattgcctcctgcccctgagagagtacttcaagtatttcagccagaatagtctgcccctgggaggcagcggcggcggcgaggaggtgcccgtggtgttcgaggacgtggccgtgtacttcaccagggacgagtggggcaccctggacaagaggcagaaggagctgtacagggacgtgatgcagatgaactacgagctgctggccagcctgggccccgccgccgccaagcccgacctgatcagcaagctggagcagagggccgccccctggatcaaggacccccacggccccacctggggcaagggcaggccccccggcaagggcggcccaagcagcggcgcccctcctcccagcggcggcagcccagccggctccccaacctctaccgaggagggcacctctgagtccgccacccccgagagcggccctggcacctccaccgagcccagcgagggcagcgcacccggcagccctgccggcagccccacctccacagaggagggaaccagcaccgagcccagcgaaggcagcgccccaggcaccagcaccgagcctagtgagcaggagattaaacggatcaacaagatcagaagaagacttgtgaaagacagcaacaccaagaaggccggcaagacaggccccatgaaaaccctgctggttagagtgatgacacccgatctgagagagcggctggaaaacctgagaaagaagcctgaaaatatcccccagcccatcagcaatacatctagagccaacctgaataagctgctgaccgattacaccgaaatgaagaaggcgatcctgcatgtgtactgggaagagttccagaaggaccctgtgggcctgatgagccgggtggcccagcctgccagcaagaagatcgatcagaacaagctgaaacctgagatggacgagaagggcaacctgaccaccgccggctttgcctgctctcagtgtggccagcccctgttcgtgtacaagctggagcaggtgtctgagaagggcaaggcttacaccaactacttcggacggtgcaatgtggccgagcacgaaaagctgatcctgctggcccagctgaagcccgagaaggatagcgacgaagccgtgacatatagcctgggaaagtttgggcagagggccctggatttctacagcattcatgtgaccaaggagtccacccaccccgtgaagcccctggcccagatcgccggaaacagatacgcctccggacctgtgggaaaggccctgagcgacgcatgtatgggcacaatcgcctccttcctgtctaagtaccaggacatcatcatcgaacaccagaaggtggtgaagggcaaccagaagagactggagagcctgcgggagctggccggcaaggaaaacctggaataccctagcgtgaccctgccacctcagcctcacaccaaggagggcgttgatgcctacaacgaagtgatcgcccgggtgcgaatgtgggtgaacctgaacctgtggcagaagctgaagctaagcagagatgatgccaagcctctgctgagactgaagggattcccttcctttcctctggtcgagagacaggccaacgaagtggactggtgggacatggtgtgtaacgtgaagaagctgatcaacgagaaaaaggaggatggcaaggtgttttggcagaatctggctggctacaagagacaggaagccctgagaccatacctgagcagcgaggaagatcggaagaagggaaagaaattcgctcggtaccagctgggcgacctgctgctgcacctggaaaagaagcacggcgaggactggggaaaggtgtacgacgaggcctgggagcggattgacaagaaagtggaaggcctgagcaagcacatcaagctggaagaggaacggagaagcgaggacgcccagagcaaggccgccctgaccgactggctgcgggctaaggccagcttcgtgatcgagggcctgaaggaggccgacaaggacgagttctgcagatgcgagctgaagctgcagaagtggtacggggacctgcggggaaagcccttcgccatcgaagccgagaacagcatcctggacatcagcggcttcagcaagcagtacaactgtgccttcatctggcagaaggacggcgtgaagaagctgaacctgtacctgatcatcaactacttcaagggcggcaagctgcggttcaagaagatcaaacctgaagccttcgaagccaacagattctacaccgtgatcaacaaaaagagcggcgagatcgtgcccatggaggtgaacttcaacttcgacgaccccaacctgatcatcctgcctctggcctttggcaagagacagggcagagaattcatctggaacgacctgctgtccctggaaaccggcagcctgaagctggccaacggaagagtgatcgagaagacactgtacaacagaagaacccggcaggatgagcctgccctgttcgtggccctgaccttcgagcggcgggaggtcctggactcctccaatatcaaaccaatgaacctgatcggcgtggcaagaggcgaaaacatccccgccgtgatcgccctgaccgaccccgagggctgcccactgagccggtttaaggatagcctgggaaacccaacccacatcctgagaatcggcgagagctataaggagaagcagcggaccatccaggccaagaaggaggtggagcagcggagagccggcggctacagccggaagtacgccagcaaagccaagaatctggcagacgatatggtgagaaacaccgctagagatctgctgtactacgccgtgacccaggatgccatgctgatcttcgccaacctgagccggggcttcggccggcagggcaagcggaccttcatggccgagagacagtacacacggatggaggactggctgaccgccaagctggcctacgagggcctgagcaagacctacctgtccaagacactggcccagtacacctccaagacatgcagcaactgtgggtttaccatcaccagcgccgactacgacagggtgctggagaagctgaagaagacagcaacaggctggatgaccacaattaacggcaaggagctgaaggtggagggccagattacctactacaacagatacaagagacagaacgtagtcaaggacctgtccgtcgagctggatagactgagcgaagaatctgtgaacaacgacatctcctcctggacaaagggcagaagcggagaagctctgagcctcctgaagaaaagattctcccatagacccgtgcaggagaagttcgtgtgcctgaactgcggcttcgagacacacgcagccgagcaagccgccctgaacatcgccagatcctggctgttcctgcggagccaggagtacaagaaataccagacaaacaagacaaccggcaacaccgataagagagccttcgtcgagacctggcagtccttttaccggaagaagcttaaggaggtgtggaaacctgccgtgcggtctggcggatctggcggaggctccaccagccccaagaaaaagagaaaagtctaagctgccttctgcggggcttgccttctggccatgcccttcttctctcccttgcacctgtacctcttggtctttgaataaagcctgagtaggaaggctagcaaaaaaaaaaaaaaaaaaaaaaaaaaaaaaaaaaaaaaaaaaaaaaaaaaaaaaaaaaaaaaaaaaaaaaaaaaaaaaaa

SEQ ID NO: 12735 - RNA, 5785 nt, synthetic construct
  source 1..5785: mol_type = other RNA
aggaaataagagagaaaagaagagtaagaagaaatataagagccaccatggcccctaagaagaagcgtaaagtgagccggatggaacgcctcgtctacgaggtgcggcagaagtgcagaaacatcgaggacatctgcatctcctgcggatctctgaacgtgaccctggagcacccactgttcatcggcggcatgtgccagaactgtaaaaactgttttctggagtgtgcctatcaatacgacgatgacggctaccagagctactgcaccatctgttgcggcggaagagaggtgctgatgtgtggaaataacaactgctgccggtgcttctgcgtggaatgcgtggacctgctggtgggccccggcgccgcccaggccgctattaaggaagatccttggaactgctacatgtgcggccacaagggcacatacggcctgctgagacggagagaggactggcctagcagactgcagatgttcttcgccaataaccacgaccaggagttcgacccccctaaggtgtaccctcccgtccccgccgagaagagaaagcccatccgggtcctgagcctgttcgatggcatcgccaccggtctgctggtgctgaaggacctgggcatccaggtggataggtacattgcctccgaggtgtgcgaggactccatcaccgtgggaatggtgcgtcatcagggcaagatcatgtacgtgggcgacgtgcggagcgtgacacagaagcatatccaggagtggggccctttcgacctggtgatcggcggcagcccttgcaatgacctgagcatcgtgaacccagcccggaagggcctgtacgagggaaccggcagactgttcttcgagttttacagactgctgcacgacgcccggcctaaggaaggcgacgaccggcccttcttttggctgttcgagaatgtggtggccatgggagtcagcgacaagcgggatattagccggttcctggagagcaaccccgtgatgatcgatgccaaggaagtgagcgccgcccaccgggccagatacttctggggcaatctgcctggcatgaacagacccctggccagcaccgtgaacgacaagctggagctgcaggagtgcctggagcacggccggatcgccaagttcagcaaggtgagaaccatcaccacccgaagcaacagcatcaaacaaggcaaggaccagcactttcctgtgttcatgaacgagaaggaggacatcctgtggtgtaccgagatggagagagtgttcgggttcccagtccactacacagatgtcagcaacatgtctagactggccagacagagactgctgggaagaagctggtccgtccctgtgatcagacacctgttcgcccctctgaaggagtacttcgcctgcgtgagcagcggcaacagcaacgccaacagccggggccccagcttctctagcggcctggtgccactgtccctgagagggagccacatgggccccatggagatctacaaaaccgtgagcgcctggaagcggcagcctgtgcgcgtgctgagcctgtttcggaatatcgataaagtcctgaaaagcctgggattcctggagagcggctctggctccggcggtggcaccctgaagtacgtggaggatgtgacaaacgtggtcagacgggatgtggagaagtggggccccttcgatctggtgtacggcagcacccaacccctgggcagctcttgtgaccggtgccctggctggtacatgtttcagttccaccggatcctgcagtacgccctgccgagacaggagtcccagcggccattcttttggattttcatggacaacttgctgctgaccgaggatgaccaggaaactaccactcggttcctgcagaccgaagccgtgaccctgcaggacgtgagaggccgggactaccagaacgccatgcgggtgtggtccaacatccctggactgaaaagcaagcacgcacctctgacccctaaagaagaggagtacctgcaggcccaggtgcggagcagaagcaagctggacgcccctaaggtggatctgctggtgaagaattgcctcctgcccctgagagagtacttcaagtatttcagccagaatagtctgcccctgggaggcagcggcggcggcttcgaggagagcgtgaccttcgaggacgtggccgtgtacttcagcgagaacgagtggaccggcctggcccccgcccagagggtgctgtacagggacgtgatgctggagaactacggcgccgtggccagcctggccttccccttccccaagcccgccctgatcagccagctggagaggggcgaggccccctggtgcaaggccccccagggcgccctggacggcggcggccccaggggcatcagcggcggcccaagcagcggcgcccctcctcccagcggcggcagcccagccggctccccaacctctaccgaggagggcacctctgagtccgccacccccgagagcggccctggcacctccaccgagcccagcgagggcagcgcacccggcagccctgccggcagccccacctccacagaggagggaaccagcaccgagcccagcgaaggcagcgccccaggcaccagcaccgagcctagtgagcaggagattaaacggatcaacaagatcagaagaagacttgtgaaagacagcaacaccaagaaggccggcaagacaggccccatgaaaaccctgctggttagagtgatgacacccgatctgagagagcggctggaaaacctgagaaagaagcctgaaaatatcccccagcccatcagcaatacatctagagccaacctgaataagctgctgaccgattacaccgaaatgaagaaggcgatcctgcatgtgtactgggaagagttccagaaggaccctgtgggcctgatgagccgggtggcccagcctgccagcaagaagatcgatcagaacaagctgaaacctgagatggacgagaagggcaacctgaccaccgccggctttgcctgctctcagtgtggccagcccctgttcgtgtacaagctggagcaggtgtctgagaagggcaaggcttacaccaactacttcggacggtgcaatgtggccgagcacgaaaagctgatcctgctggcccagctgaagcccgagaaggatagcgacgaagccgtgacatatagcctgggaaagtttgggcagagggccctggatttctacagcattcatgtgaccaaggagtccacccaccccgtgaagcccctggcccagatcgccggaaacagatacgcctccggacctgtgggaaaggccctgagcgacgcatgtatgggcacaatcgcctccttcctgtctaagtaccaggacatcatcatcgaacaccagaaggtggtgaagggcaaccagaagagactggagagcctgcgggagctggccggcaaggaaaacctggaataccctagcgtgaccctgccacctcagcctcacaccaaggagggcgttgatgcctacaacgaagtgatcgcccgggtgcgaatgtgggtgaacctgaacctgtggcagaagctgaagctaagcagagatgatgccaagcctctgctgagactgaagggattcccttcctttcctctggtcgagagacaggccaacgaagtggactggtgggacatggtgtgtaacgtgaagaagctgatcaacgagaaaaaggaggatggcaaggtgttttggcagaatctggctggctacaagagacaggaagccctgagaccatacctgagcagcgaggaagatcggaagaagggaaagaaattcgctcggtaccagctgggcgacctgctgctgcacctggaaaagaagcacggcgaggactggggaaaggtgtacgacgaggcctgggagcggattgacaagaaagtggaaggcctgagcaagcacatcaagctggaagaggaacggagaagcgaggacgcccagagcaaggccgccctgaccgactggctgcgggctaaggccagcttcgtgatcgagggcctgaaggaggccgacaaggacgagttctgcagatgcgagctgaagctgcagaagtggtacggggacctgcggggaaagcccttcgccatcgaagccgagaacagcatcctggacatcagcggcttcagcaagcagtacaactgtgccttcatctggcagaaggacggcgtgaagaagctgaacctgtacctgatcatcaactacttcaagggcggcaagctgcggttcaagaagatcaaacctgaagccttcgaagccaacagattctacaccgtgatcaacaaaaagagcggcgagatcgtgcccatggaggtgaacttcaacttcgacgaccccaacctgatcatcctgcctctggcctttggcaagagacagggcagagaattcatctggaacgacctgctgtccctggaaaccggcagcctgaagctggccaacggaagagtgatcgagaagacactgtacaacagaagaacccggcaggatgagcctgccctgttcgtggccctgaccttcgagcggcgggaggtcctggactcctccaatatcaaaccaatgaacctgatcggcgtggcaagaggcgaaaacatccccgccgtgatcgccctgaccgaccccgagggctgcccactgagccggtttaaggatagcctgggaaacccaacccacatcctgagaatcggcgagagctataaggagaagcagcggaccatccaggccaagaaggaggtggagcagcggagagccggcggctacagccggaagtacgccagcaaagccaagaatctggcagacgatatggtgagaaacaccgctagagatctgctgtactacgccgtgacccaggatgccatgctgatcttcgccaacctgagccggggcttcggccggcagggcaagcggaccttcatggccgagagacagtacacacggatggaggactggctgaccgccaagctggcctacgagggcctgagcaagacctacctgtccaagacactggcccagtacacctccaagacatgcagcaactgtgggtttaccatcaccagcgccgactacgacagggtgctggagaagctgaagaagacagcaacaggctggatgaccacaattaacggcaaggagctgaaggtggagggccagattacctactacaacagatacaagagacagaacgtagtcaaggacctgtccgtcgagctggatagactgagcgaagaatctgtgaacaacgacatctcctcctggacaaagggcagaagcggagaagctctgagcctcctgaagaaaagattctcccatagacccgtgcaggagaagttcgtgtgcctgaactgcggcttcgagacacacgcagccgagcaagccgccctgaacatcgccagatcctggctgttcctgcggagccaggagtacaagaaataccagacaaacaagacaaccggcaacaccgataagagagccttcgtcgagacctggcagtccttttaccggaagaagcttaaggaggtgtggaaacctgccgtgcggtctggcggatctggcggaggctccaccagccccaagaaaaagagaaaagtctaagctgccttctgcggggcttgccttctggccatgcccttcttctctcccttgcacctgtacctcttggtctttgaataaagcctgagtaggaaggctagcaaaaaaaaaaaaaaaaaaaaaaaaaaaaaaaaaaaaaaaaaaaaaaaaaaaaaaaaaaaaaaaaaaaaaaaaaaaaaaaa

SEQ ID NO: 12736 - RNA, 5785 nt, synthetic construct
  source 1..5785: mol_type = other RNA
aggaaataagagagaaaagaagagtaagaagaaatataagagccaccatggcccctaagaagaagcgtaaagtgagccggatggaacgcctcgtctacgaggtgcggcagaagtgcagaaacatcgaggacatctgcatctcctgcggatctctgaacgtgaccctggagcacccactgttcatcggcggcatgtgccagaactgtaaaaactgttttctggagtgtgcctatcaatacgacgatgacggctaccagagctactgcaccatctgttgcggcggaagagaggtgctgatgtgtggaaataacaactgctgccggtgcttctgcgtggaatgcgtggacctgctggtgggccccggcgccgcccaggccgctattaaggaagatccttggaactgctacatgtgcggccacaagggcacatacggcctgctgagacggagagaggactggcctagcagactgcagatgttcttcgccaataaccacgaccaggagttcgacccccctaaggtgtaccctcccgtccccgccgagaagagaaagcccatccgggtcctgagcctgttcgatggcatcgccaccggtctgctggtgctgaaggacctgggcatccaggtggataggtacattgcctccgaggtgtgcgaggactccatcaccgtgggaatggtgcgtcatcagggcaagatcatgtacgtgggcgacgtgcggagcgtgacacagaagcatatccaggagtggggccctttcgacctggtgatcggcggcagcccttgcaatgacctgagcatcgtgaacccagcccggaagggcctgtacgagggaaccggcagactgttcttcgagttttacagactgctgcacgacgcccggcctaaggaaggcgacgaccggcccttcttttggctgttcgagaatgtggtggccatgggagtcagcgacaagcgggatattagccggttcctggagagcaaccccgtgatgatcgatgccaaggaagtgagcgccgcccaccgggccagatacttctggggcaatctgcctggcatgaacagacccctggccagcaccgtgaacgacaagctggagctgcaggagtgcctggagcacggccggatcgccaagttcagcaaggtgagaaccatcaccacccgaagcaacagcatcaaacaaggcaaggaccagcactttcctgtgttcatgaacgagaaggaggacatcctgtggtgtaccgagatggagagagtgttcgggttcccagtccactacacagatgtcagcaacatgtctagactggccagacagagactgctgggaagaagctggtccgtccctgtgatcagacacctgttcgcccctctgaaggagtacttcgcctgcgtgagcagcggcaacagcaacgccaacagccggggccccagcttctctagcggcctggtgccactgtccctgagagggagccacatgggccccatggagatctacaaaaccgtgagcgcctggaagcggcagcctgtgcgcgtgctgagcctgtttcggaatatcgataaagtcctgaaaagcctgggattcctggagagcggctctggctccggcggtggcaccctgaagtacgtggaggatgtgacaaacgtggtcagacgggatgtggagaagtggggccccttcgatctggtgtacggcagcacccaacccctgggcagctcttgtgaccggtgccctggctggtacatgtttcagttccaccggatcctgcagtacgccctgccgagacaggagtcccagcggccattcttttggattttcatggacaacttgctgctgaccgaggatgaccaggaaactaccactcggttcctgcagaccgaagccgtgaccctgcaggacgtgagaggccgggactaccagaacgccatgcgggtgtggtccaacatccctggactgaaaagcaagcacgcacctctgacccctaaagaagaggagtacctgcaggcccaggtgcggagcagaagcaagctggacgcccctaaggtggatctgctggtgaagaattgcctcctgcccctgagagagtacttcaagtatttcagccagaatagtctgcccctgggaggcagcggcggcggccaggccgaggtgaccttcgaggacgtggccgtgctgttcagcagggaggagtggggcaggctgggccccacccagaggggcctgtacagggacgtgatgctggagacctacaggaacctggtgagcctgggcgccggcagggccggccccaagcccggcgtgatcacccagctggagaggggcgacgagccctgggtgctggacgcccagggcgccaagggcaagggcaggcccagggtgagcggcggcccaagcagcggcgcccctcctcccagcggcggcagcccagccggctccccaacctctaccgaggagggcacctctgagtccgccacccccgagagcggccctggcacctccaccgagcccagcgagggcagcgcacccggcagccctgccggcagccccacctccacagaggagggaaccagcaccgagcccagcgaaggcagcgccccaggcaccagcaccgagcctagtgagcaggagattaaacggatcaacaagatcagaagaagacttgtgaaagacagcaacaccaagaaggccggcaagacaggccccatgaaaaccctgctggttagagtgatgacacccgatctgagagagcggctggaaaacctgagaaagaagcctgaaaatatcccccagcccatcagcaatacatctagagccaacctgaataagctgctgaccgattacaccgaaatgaagaaggcgatcctgcatgtgtactgggaagagttccagaaggaccctgtgggcctgatgagccgggtggcccagcctgccagcaagaagatcgatcagaacaagctgaaacctgagatggacgagaagggcaacctgaccaccgccggctttgcctgctctcagtgtggccagcccctgttcgtgtacaagctggagcaggtgtctgagaagggcaaggcttacaccaactacttcggacggtgcaatgtggccgagcacgaaaagctgatcctgctggcccagctgaagcccgagaaggatagcgacgaagccgtgacatatagcctgggaaagtttgggcagagggccctggatttctacagcattcatgtgaccaaggagtccacccaccccgtgaagcccctggcccagatcgccggaaacagatacgcctccggacctgtgggaaaggccctgagcgacgcatgtatgggcacaatcgcctccttcctgtctaagtaccaggacatcatcatcgaacaccagaaggtggtgaagggcaaccagaagagactggagagcctgcgggagctggccggcaaggaaaacctggaataccctagcgtgaccctgccacctcagcctcacaccaaggagggcgttgatgcctacaacgaagtgatcgcccgggtgcgaatgtgggtgaacctgaacctgtggcagaagctgaagctaagcagagatgatgccaagcctctgctgagactgaagggattcccttcctttcctctggtcgagagacaggccaacgaagtggactggtgggacatggtgtgtaacgtgaagaagctgatcaacgagaaaaaggaggatggcaaggtgttttggcagaatctggctggctacaagagacaggaagccctgagaccatacctgagcagcgaggaagatcggaagaagggaaagaaattcgctcggtaccagctgggcgacctgctgctgcacctggaaaagaagcacggcgaggactggggaaaggtgtacgacgaggcctgggagcggattgacaagaaagtggaaggcctgagcaagcacatcaagctggaagaggaacggagaagcgaggacgcccagagcaaggccgccctgaccgactggctgcgggctaaggccagcttcgtgatcgagggcctgaaggaggccgacaaggacgagttctgcagatgcgagctgaagctgcagaagtggtacggggacctgcggggaaagcccttcgccatcgaagccgagaacagcatcctggacatcagcggcttcagcaagcagtacaactgtgccttcatctggcagaaggacggcgtgaagaagctgaacctgtacctgatcatcaactacttcaagggcggcaagctgcggttcaagaagatcaaacctgaagccttcgaagccaacagattctacaccgtgatcaacaaaaagagcggcgagatcgtgcccatggaggtgaacttcaacttcgacgaccccaacctgatcatcctgcctctggcctttggcaagagacagggcagagaattcatctggaacgacctgctgtccctggaaaccggcagcctgaagctggccaacggaagagtgatcgagaagacactgtacaacagaagaacccggcaggatgagcctgccctgttcgtggccctgaccttcgagcggcgggaggtcctggactcctccaatatcaaaccaatgaacctgatcggcgtggcaagaggcgaaaacatccccgccgtgatcgccctgaccgaccccgagggctgcccactgagccggtttaaggatagcctgggaaacccaacccacatcctgagaatcggcgagagctataaggagaagcagcggaccatccaggccaagaaggaggtggagcagcggagagccggcggctacagccggaagtacgccagcaaagccaagaatctggcagacgatatggtgagaaacaccgctagagatctgctgtactacgccgtgacccaggatgccatgctgatcttcgccaacctgagccggggcttcggccggcagggcaagcggaccttcatggccgagagacagtacacacggatggaggactggctgaccgccaagctggcctacgagggcctgagcaagacctacctgtccaagacactggcccagtacacctccaagacatgcagcaactgtgggtttaccatcaccagcgccgactacgacagggtgctggagaagctgaagaagacagcaacaggctggatgaccacaattaacggcaaggagctgaaggtggagggccagattacctactacaacagatacaagagacagaacgtagtcaaggacctgtccgtcgagctggatagactgagcgaagaatctgtgaacaacgacatctcctcctggacaaagggcagaagcggagaagctctgagcctcctgaagaaaagattctcccatagacccgtgcaggagaagttcgtgtgcctgaactgcggcttcgagacacacgcagccgagcaagccgccctgaacatcgccagatcctggctgttcctgcggagccaggagtacaagaaataccagacaaacaagacaaccggcaacaccgataagagagccttcgtcgagacctggcagtccttttaccggaagaagcttaaggaggtgtggaaacctgccgtgcggtctggcggatctggcggaggctccaccagccccaagaaaaagagaaaagtctaagctgccttctgcggggcttgccttctggccatgcccttcttctctcccttgcacctgtacctcttggtctttgaataaagcctgagtaggaaggctagcaaaaaaaaaaaaaaaaaaaaaaaaaaaaaaaaaaaaaaaaaaaaaaaaaaaaaaaaaaaaaaaaaaaaaaaaaaaaaaaa

SEQ ID NO: 12737 - RNA, 5785 nt, synthetic construct
  source 1..5785: mol_type = other RNA
aggaaataagagagaaaagaagagtaagaagaaatataagagccaccatggcccctaagaagaagcgtaaagtgagccggatggaacgcctcgtctacgaggtgcggcagaagtgcagaaacatcgaggacatctgcatctcctgcggatctctgaacgtgaccctggagcacccactgttcatcggcggcatgtgccagaactgtaaaaactgttttctggagtgtgcctatcaatacgacgatgacggctaccagagctactgcaccatctgttgcggcggaagagaggtgctgatgtgtggaaataacaactgctgccggtgcttctgcgtggaatgcgtggacctgctggtgggccccggcgccgcccaggccgctattaaggaagatccttggaactgctacatgtgcggccacaagggcacatacggcctgctgagacggagagaggactggcctagcagactgcagatgttcttcgccaataaccacgaccaggagttcgacccccctaaggtgtaccctcccgtccccgccgagaagagaaagcccatccgggtcctgagcctgttcgatggcatcgccaccggtctgctggtgctgaaggacctgggcatccaggtggataggtacattgcctccgaggtgtgcgaggactccatcaccgtgggaatggtgcgtcatcagggcaagatcatgtacgtgggcgacgtgcggagcgtgacacagaagcatatccaggagtggggccctttcgacctggtgatcggcggcagcccttgcaatgacctgagcatcgtgaacccagcccggaagggcctgtacgagggaaccggcagactgttcttcgagttttacagactgctgcacgacgcccggcctaaggaaggcgacgaccggcccttcttttggctgttcgagaatgtggtggccatgggagtcagcgacaagcgggatattagccggttcctggagagcaaccccgtgatgatcgatgccaaggaagtgagcgccgcccaccgggccagatacttctggggcaatctgcctggcatgaacagacccctggccagcaccgtgaacgacaagctggagctgcaggagtgcctggagcacggccggatcgccaagttcagcaaggtgagaaccatcaccacccgaagcaacagcatcaaacaaggcaaggaccagcactttcctgtgttcatgaacgagaaggaggacatcctgtggtgtaccgagatggagagagtgttcgggttcccagtccactacacagatgtcagcaacatgtctagactggccagacagagactgctgggaagaagctggtccgtccctgtgatcagacacctgttcgcccctctgaaggagtacttcgcctgcgtgagcagcggcaacagcaacgccaacagccggggccccagcttctctagcggcctggtgccactgtccctgagagggagccacatgggccccatggagatctacaaaaccgtgagcgcctggaagcggcagcctgtgcgcgtgctgagcctgtttcggaatatcgataaagtcctgaaaagcctgggattcctggagagcggctctggctccggcggtggcaccctgaagtacgtggaggatgtgacaaacgtggtcagacgggatgtggagaagtggggccccttcgatctggtgtacggcagcacccaacccctgggcagctcttgtgaccggtgccctggctggtacatgtttcagttccaccggatcctgcagtacgccctgccgagacaggagtcccagcggccattcttttggattttcatggacaacttgctgctgaccgaggatgaccaggaaactaccactcggttcctgcagaccgaagccgtgaccctgcaggacgtgagaggccgggactaccagaacgccatgcgggtgtggtccaacatccctggactgaaaagcaagcacgcacctctgacccctaaagaagaggagtacctgcaggcccaggtgcggagcagaagcaagctggacgcccctaaggtggatctgctggtgaagaattgcctcctgcccctgagagagtacttcaagtatttcagccagaatagtctgcccctgggaggcagcggcggcggcatggccgccggccagagggaggccaggccccaggtgagcctgaccttcgaggacgtggccgtgctgttcaccagggacgagtggaggaagctggcccccagccagaggaacctgtacagggacgtgatgctggagaactacaggaacctggtgagcctgggcctgcccttcaccaagcccaaggtgatcagcctgctgcagcagggcgaggacccctgggaggtggagaaggacggcagcggcggcggcccaagcagcggcgcccctcctcccagcggcggcagcccagccggctccccaacctctaccgaggagggcacctctgagtccgccacccccgagagcggccctggcacctccaccgagcccagcgagggcagcgcacccggcagccctgccggcagccccacctccacagaggagggaaccagcaccgagcccagcgaaggcagcgccccaggcaccagcaccgagcctagtgagcaggagattaaacggatcaacaagatcagaagaagacttgtgaaagacagcaacaccaagaaggccggcaagacaggccccatgaaaaccctgctggttagagtgatgacacccgatctgagagagcggctggaaaacctgagaaagaagcctgaaaatatcccccagcccatcagcaatacatctagagccaacctgaataagctgctgaccgattacaccgaaatgaagaaggcgatcctgcatgtgtactgggaagagttccagaaggaccctgtgggcctgatgagccgggtggcccagcctgccagcaagaagatcgatcagaacaagctgaaacctgagatggacgagaagggcaacctgaccaccgccggctttgcctgctctcagtgtggccagcccctgttcgtgtacaagctggagcaggtgtctgagaagggcaaggcttacaccaactacttcggacggtgcaatgtggccgagcacgaaaagctgatcctgctggcccagctgaagcccgagaaggatagcgacgaagccgtgacatatagcctgggaaagtttgggcagagggccctggatttctacagcattcatgtgaccaaggagtccacccaccccgtgaagcccctggcccagatcgccggaaacagatacgcctccggacctgtgggaaaggccctgagcgacgcatgtatgggcacaatcgcctccttcctgtctaagtaccaggacatcatcatcgaacaccagaaggtggtgaagggcaaccagaagagactggagagcctgcgggagctggccggcaaggaaaacctggaataccctagcgtgaccctgccacctcagcctcacaccaaggagggcgttgatgcctacaacgaagtgatcgcccgggtgcgaatgtgggtgaacctgaacctgtggcagaagctgaagctaagcagagatgatgccaagcctctgctgagactgaagggattcccttcctttcctctggtcgagagacaggccaacgaagtggactggtgggacatggtgtgtaacgtgaagaagctgatcaacgagaaaaaggaggatggcaaggtgttttggcagaatctggctggctacaagagacaggaagccctgagaccatacctgagcagcgaggaagatcggaagaagggaaagaaattcgctcggtaccagctgggcgacctgctgctgcacctggaaaagaagcacggcgaggactggggaaaggtgtacgacgaggcctgggagcggattgacaagaaagtggaaggcctgagcaagcacatcaagctggaagaggaacggagaagcgaggacgcccagagcaaggccgccctgaccgactggctgcgggctaaggccagcttcgtgatcgagggcctgaaggaggccgacaaggacgagttctgcagatgcgagctgaagctgcagaagtggtacggggacctgcggggaaagcccttcgccatcgaagccgagaacagcatcctggacatcagcggcttcagcaagcagtacaactgtgccttcatctggcagaaggacggcgtgaagaagctgaacctgtacctgatcatcaactacttcaagggcggcaagctgcggttcaagaagatcaaacctgaagccttcgaagccaacagattctacaccgtgatcaacaaaaagagcggcgagatcgtgcccatggaggtgaacttcaacttcgacgaccccaacctgatcatcctgcctctggcctttggcaagagacagggcagagaattcatctggaacgacctgctgtccctggaaaccggcagcctgaagctggccaacggaagagtgatcgagaagacactgtacaacagaagaacccggcaggatgagcctgccctgttcgtggccctgaccttcgagcggcgggaggtcctggactcctccaatatcaaaccaatgaacctgatcggcgtggcaagaggcgaaaacatccccgccgtgatcgccctgaccgaccccgagggctgcccactgagccggtttaaggatagcctgggaaacccaacccacatcctgagaatcggcgagagctataaggagaagcagcggaccatccaggccaagaaggaggtggagcagcggagagccggcggctacagccggaagtacgccagcaaagccaagaatctggcagacgatatggtgagaaacaccgctagagatctgctgtactacgccgtgacccaggatgccatgctgatcttcgccaacctgagccggggcttcggccggcagggcaagcggaccttcatggccgagagacagtacacacggatggaggactggctgaccgccaagctggcctacgagggcctgagcaagacctacctgtccaagacactggcccagtacacctccaagacatgcagcaactgtgggtttaccatcaccagcgccgactacgacagggtgctggagaagctgaagaagacagcaacaggctggatgaccacaattaacggcaaggagctgaaggtggagggccagattacctactacaacagatacaagagacagaacgtagtcaaggacctgtccgtcgagctggatagactgagcgaagaatctgtgaacaacgacatctcctcctggacaaagggcagaagcggagaagctctgagcctcctgaagaaaagattctcccatagacccgtgcaggagaagttcgtgtgcctgaactgcggcttcgagacacacgcagccgagcaagccgccctgaacatcgccagatcctggctgttcctgcggagccaggagtacaagaaataccagacaaacaagacaaccggcaacaccgataagagagccttcgtcgagacctggcagtccttttaccggaagaagcttaaggaggtgtggaaacctgccgtgcggtctggcggatctggcggaggctccaccagccccaagaaaaagagaaaagtctaagctgccttctgcggggcttgccttctggccatgcccttcttctctcccttgcacctgtacctcttggtctttgaataaagcctgagtaggaaggctagcaaaaaaaaaaaaaaaaaaaaaaaaaaaaaaaaaaaaaaaaaaaaaaaaaaaaaaaaaaaaaaaaaaaaaaaaaaaaaaaa

SEQ ID NO: 12738 - RNA, 5785 nt, synthetic construct
  source 1..5785: mol_type = other RNA
aggaaataagagagaaaagaagagtaagaagaaatataagagccaccatggcccctaagaagaagcgtaaagtgagccggatggaacgcctcgtctacgaggtgcggcagaagtgcagaaacatcgaggacatctgcatctcctgcggatctctgaacgtgaccctggagcacccactgttcatcggcggcatgtgccagaactgtaaaaactgttttctggagtgtgcctatcaatacgacgatgacggctaccagagctactgcaccatctgttgcggcggaagagaggtgctgatgtgtggaaataacaactgctgccggtgcttctgcgtggaatgcgtggacctgctggtgggccccggcgccgcccaggccgctattaaggaagatccttggaactgctacatgtgcggccacaagggcacatacggcctgctgagacggagagaggactggcctagcagactgcagatgttcttcgccaataaccacgaccaggagttcgacccccctaaggtgtaccctcccgtccccgccgagaagagaaagcccatccgggtcctgagcctgttcgatggcatcgccaccggtctgctggtgctgaaggacctgggcatccaggtggataggtacattgcctccgaggtgtgcgaggactccatcaccgtgggaatggtgcgtcatcagggcaagatcatgtacgtgggcgacgtgcggagcgtgacacagaagcatatccaggagtggggccctttcgacctggtgatcggcggcagcccttgcaatgacctgagcatcgtgaacccagcccggaagggcctgtacgagggaaccggcagactgttcttcgagttttacagactgctgcacgacgcccggcctaaggaaggcgacgaccggcccttcttttggctgttcgagaatgtggtggccatgggagtcagcgacaagcgggatattagccggttcctggagagcaaccccgtgatgatcgatgccaaggaagtgagcgccgcccaccgggccagatacttctggggcaatctgcctggcatgaacagacccctggccagcaccgtgaacgacaagctggagctgcaggagtgcctggagcacggccggatcgccaagttcagcaaggtgagaaccatcaccacccgaagcaacagcatcaaacaaggcaaggaccagcactttcctgtgttcatgaacgagaaggaggacatcctgtggtgtaccgagatggagagagtgttcgggttcccagtccactacacagatgtcagcaacatgtctagactggccagacagagactgctgggaagaagctggtccgtccctgtgatcagacacctgttcgcccctctgaaggagtacttcgcctgcgtgagcagcggcaacagcaacgccaacagccggggccccagcttctctagcggcctggtgccactgtccctgagagggagccacatgggccccatggagatctacaaaaccgtgagcgcctggaagcggcagcctgtgcgcgtgctgagcctgtttcggaatatcgataaagtcctgaaaagcctgggattcctggagagcggctctggctccggcggtggcaccctgaagtacgtggaggatgtgacaaacgtggtcagacgggatgtggagaagtggggccccttcgatctggtgtacggcagcacccaacccctgggcagctcttgtgaccggtgccctggctggtacatgtttcagttccaccggatcctgcagtacgccctgccgagacaggagtcccagcggccattcttttggattttcatggacaacttgctgctgaccgaggatgaccaggaaactaccactcggttcctgcagaccgaagccgtgaccctgcaggacgtgagaggccgggactaccagaacgccatgcgggtgtggtccaacatccctggactgaaaagcaagcacgcacctctgacccctaaagaagaggagtacctgcaggcccaggtgcggagcagaagcaagctggacgcccctaaggtggatctgctggtgaagaattgcctcctgcccctgagagagtacttcaagtatttcagccagaatagtctgcccctgggaggcagcggcggcggcatccagaggctgctgaccttcggcgacgtggccgtggccttcaccaggatcgagtggaggcacctggacgccgcccagagggccctgtacagggacgtgatgctggagaactacggcaacctggtgagcgtgggcctgctgagcagcaagcccaagctgatcgcccagctggagcagggcgccgagccctggatggaggccagggagacccccagcggcaccagggccgtgcccgactactggggcggcccaagcagcggcgcccctcctcccagcggcggcagcccagccggctccccaacctctaccgaggagggcacctctgagtccgccacccccgagagcggccctggcacctccaccgagcccagcgagggcagcgcacccggcagccctgccggcagccccacctccacagaggagggaaccagcaccgagcccagcgaaggcagcgccccaggcaccagcaccgagcctagtgagcaggagattaaacggatcaacaagatcagaagaagacttgtgaaagacagcaacaccaagaaggccggcaagacaggccccatgaaaaccctgctggttagagtgatgacacccgatctgagagagcggctggaaaacctgagaaagaagcctgaaaatatcccccagcccatcagcaatacatctagagccaacctgaataagctgctgaccgattacaccgaaatgaagaaggcgatcctgcatgtgtactgggaagagttccagaaggaccctgtgggcctgatgagccgggtggcccagcctgccagcaagaagatcgatcagaacaagctgaaacctgagatggacgagaagggcaacctgaccaccgccggctttgcctgctctcagtgtggccagcccctgttcgtgtacaagctggagcaggtgtctgagaagggcaaggcttacaccaactacttcggacggtgcaatgtggccgagcacgaaaagctgatcctgctggcccagctgaagcccgagaaggatagcgacgaagccgtgacatatagcctgggaaagtttgggcagagggccctggatttctacagcattcatgtgaccaaggagtccacccaccccgtgaagcccctggcccagatcgccggaaacagatacgcctccggacctgtgggaaaggccctgagcgacgcatgtatgggcacaatcgcctccttcctgtctaagtaccaggacatcatcatcgaacaccagaaggtggtgaagggcaaccagaagagactggagagcctgcgggagctggccggcaaggaaaacctggaataccctagcgtgaccctgccacctcagcctcacaccaaggagggcgttgatgcctacaacgaagtgatcgcccgggtgcgaatgtgggtgaacctgaacctgtggcagaagctgaagctaagcagagatgatgccaagcctctgctgagactgaagggattcccttcctttcctctggtcgagagacaggccaacgaagtggactggtgggacatggtgtgtaacgtgaagaagctgatcaacgagaaaaaggaggatggcaaggtgttttggcagaatctggctggctacaagagacaggaagccctgagaccatacctgagcagcgaggaagatcggaagaagggaaagaaattcgctcggtaccagctgggcgacctgctgctgcacctggaaaagaagcacggcgaggactggggaaaggtgtacgacgaggcctgggagcggattgacaagaaagtggaaggcctgagcaagcacatcaagctggaagaggaacggagaagcgaggacgcccagagcaaggccgccctgaccgactggctgcgggctaaggccagcttcgtgatcgagggcctgaaggaggccgacaaggacgagttctgcagatgcgagctgaagctgcagaagtggtacggggacctgcggggaaagcccttcgccatcgaagccgagaacagcatcctggacatcagcggcttcagcaagcagtacaactgtgccttcatctggcagaaggacggcgtgaagaagctgaacctgtacctgatcatcaactacttcaagggcggcaagctgcggttcaagaagatcaaacctgaagccttcgaagccaacagattctacaccgtgatcaacaaaaagagcggcgagatcgtgcccatggaggtgaacttcaacttcgacgaccccaacctgatcatcctgcctctggcctttggcaagagacagggcagagaattcatctggaacgacctgctgtccctggaaaccggcagcctgaagctggccaacggaagagtgatcgagaagacactgtacaacagaagaacccggcaggatgagcctgccctgttcgtggccctgaccttcgagcggcgggaggtcctggactcctccaatatcaaaccaatgaacctgatcggcgtggcaagaggcgaaaacatccccgccgtgatcgccctgaccgaccccgagggctgcccactgagccggtttaaggatagcctgggaaacccaacccacatcctgagaatcggcgagagctataaggagaagcagcggaccatccaggccaagaaggaggtggagcagcggagagccggcggctacagccggaagtacgccagcaaagccaagaatctggcagacgatatggtgagaaacaccgctagagatctgctgtactacgccgtgacccaggatgccatgctgatcttcgccaacctgagccggggcttcggccggcagggcaagcggaccttcatggccgagagacagtacacacggatggaggactggctgaccgccaagctggcctacgagggcctgagcaagacctacctgtccaagacactggcccagtacacctccaagacatgcagcaactgtgggtttaccatcaccagcgccgactacgacagggtgctggagaagctgaagaagacagcaacaggctggatgaccacaattaacggcaaggagctgaaggtggagggccagattacctactacaacagatacaagagacagaacgtagtcaaggacctgtccgtcgagctggatagactgagcgaagaatctgtgaacaacgacatctcctcctggacaaagggcagaagcggagaagctctgagcctcctgaagaaaagattctcccatagacccgtgcaggagaagttcgtgtgcctgaactgcggcttcgagacacacgcagccgagcaagccgccctgaacatcgccagatcctggctgttcctgcggagccaggagtacaagaaataccagacaaacaagacaaccggcaacaccgataagagagccttcgtcgagacctggcagtccttttaccggaagaagcttaaggaggtgtggaaacctgccgtgcggtctggcggatctggcggaggctccaccagccccaagaaaaagagaaaagtctaagctgccttctgcggggcttgccttctggccatgcccttcttctctcccttgcacctgtacctcttggtctttgaataaagcctgagtaggaaggctagcaaaaaaaaaaaaaaaaaaaaaaaaaaaaaaaaaaaaaaaaaaaaaaaaaaaaaaaaaaaaaaaaaaaaaaaaaaaaaaaa

SEQ ID NO: 12739 - RNA, 5785 nt, synthetic construct
  source 1..5785: mol_type = other RNA
aggaaataagagagaaaagaagagtaagaagaaatataagagccaccatggcccctaagaagaagcgtaaagtgagccggatggaacgcctcgtctacgaggtgcggcagaagtgcagaaacatcgaggacatctgcatctcctgcggatctctgaacgtgaccctggagcacccactgttcatcggcggcatgtgccagaactgtaaaaactgttttctggagtgtgcctatcaatacgacgatgacggctaccagagctactgcaccatctgttgcggcggaagagaggtgctgatgtgtggaaataacaactgctgccggtgcttctgcgtggaatgcgtggacctgctggtgggccccggcgccgcccaggccgctattaaggaagatccttggaactgctacatgtgcggccacaagggcacatacggcctgctgagacggagagaggactggcctagcagactgcagatgttcttcgccaataaccacgaccaggagttcgacccccctaaggtgtaccctcccgtccccgccgagaagagaaagcccatccgggtcctgagcctgttcgatggcatcgccaccggtctgctggtgctgaaggacctgggcatccaggtggataggtacattgcctccgaggtgtgcgaggactccatcaccgtgggaatggtgcgtcatcagggcaagatcatgtacgtgggcgacgtgcggagcgtgacacagaagcatatccaggagtggggccctttcgacctggtgatcggcggcagcccttgcaatgacctgagcatcgtgaacccagcccggaagggcctgtacgagggaaccggcagactgttcttcgagttttacagactgctgcacgacgcccggcctaaggaaggcgacgaccggcccttcttttggctgttcgagaatgtggtggccatgggagtcagcgacaagcgggatattagccggttcctggagagcaaccccgtgatgatcgatgccaaggaagtgagcgccgcccaccgggccagatacttctggggcaatctgcctggcatgaacagacccctggccagcaccgtgaacgacaagctggagctgcaggagtgcctggagcacggccggatcgccaagttcagcaaggtgagaaccatcaccacccgaagcaacagcatcaaacaaggcaaggaccagcactttcctgtgttcatgaacgagaaggaggacatcctgtggtgtaccgagatggagagagtgttcgggttcccagtccactacacagatgtcagcaacatgtctagactggccagacagagactgctgggaagaagctggtccgtccctgtgatcagacacctgttcgcccctctgaaggagtacttcgcctgcgtgagcagcggcaacagcaacgccaacagccggggccccagcttctctagcggcctggtgccactgtccctgagagggagccacatgggccccatggagatctacaaaaccgtgagcgcctggaagcggcagcctgtgcgcgtgctgagcctgtttcggaatatcgataaagtcctgaaaagcctgggattcctggagagcggctctggctccggcggtggcaccctgaagtacgtggaggatgtgacaaacgtggtcagacgggatgtggagaagtggggccccttcgatctggtgtacggcagcacccaacccctgggcagctcttgtgaccggtgccctggctggtacatgtttcagttccaccggatcctgcagtacgccctgccgagacaggagtcccagcggccattcttttggattttcatggacaacttgctgctgaccgaggatgaccaggaaactaccactcggttcctgcagaccgaagccgtgaccctgcaggacgtgagaggccgggactaccagaacgccatgcgggtgtggtccaacatccctggactgaaaagcaagcacgcacctctgacccctaaagaagaggagtacctgcaggcccaggtgcggagcagaagcaagctggacgcccctaaggtggatctgctggtgaagaattgcctcctgcccctgagagagtacttcaagtatttcagccagaatagtctgcccctgggaggcagcggcggcggccaggtgcccgtgaccttcgaggacatcgccatctacttctgccaggaggagtgggaggtgctggaggagtggcagaaggacctgtacaaggacgtgatgaaggagaactaccaggccctgatcagcctgggcaccggcagcctgatcgtgagccccgacatcatcagcaggatcgagaggggcgaggacccctacatcagggacgagaggggcagcaagaagagggagaccgagaacagcagcggcggcccaagcagcggcgcccctcctcccagcggcggcagcccagccggctccccaacctctaccgaggagggcacctctgagtccgccacccccgagagcggccctggcacctccaccgagcccagcgagggcagcgcacccggcagccctgccggcagccccacctccacagaggagggaaccagcaccgagcccagcgaaggcagcgccccaggcaccagcaccgagcctagtgagcaggagattaaacggatcaacaagatcagaagaagacttgtgaaagacagcaacaccaagaaggccggcaagacaggccccatgaaaaccctgctggttagagtgatgacacccgatctgagagagcggctggaaaacctgagaaagaagcctgaaaatatcccccagcccatcagcaatacatctagagccaacctgaataagctgctgaccgattacaccgaaatgaagaaggcgatcctgcatgtgtactgggaagagttccagaaggaccctgtgggcctgatgagccgggtggcccagcctgccagcaagaagatcgatcagaacaagctgaaacctgagatggacgagaagggcaacctgaccaccgccggctttgcctgctctcagtgtggccagcccctgttcgtgtacaagctggagcaggtgtctgagaagggcaaggcttacaccaactacttcggacggtgcaatgtggccgagcacgaaaagctgatcctgctggcccagctgaagcccgagaaggatagcgacgaagccgtgacatatagcctgggaaagtttgggcagagggccctggatttctacagcattcatgtgaccaaggagtccacccaccccgtgaagcccctggcccagatcgccggaaacagatacgcctccggacctgtgggaaaggccctgagcgacgcatgtatgggcacaatcgcctccttcctgtctaagtaccaggacatcatcatcgaacaccagaaggtggtgaagggcaaccagaagagactggagagcctgcgggagctggccggcaaggaaaacctggaataccctagcgtgaccctgccacctcagcctcacaccaaggagggcgttgatgcctacaacgaagtgatcgcccgggtgcgaatgtgggtgaacctgaacctgtggcagaagctgaagctaagcagagatgatgccaagcctctgctgagactgaagggattcccttcctttcctctggtcgagagacaggccaacgaagtggactggtgggacatggtgtgtaacgtgaagaagctgatcaacgagaaaaaggaggatggcaaggtgttttggcagaatctggctggctacaagagacaggaagccctgagaccatacctgagcagcgaggaagatcggaagaagggaaagaaattcgctcggtaccagctgggcgacctgctgctgcacctggaaaagaagcacggcgaggactggggaaaggtgtacgacgaggcctgggagcggattgacaagaaagtggaaggcctgagcaagcacatcaagctggaagaggaacggagaagcgaggacgcccagagcaaggccgccctgaccgactggctgcgggctaaggccagcttcgtgatcgagggcctgaaggaggccgacaaggacgagttctgcagatgcgagctgaagctgcagaagtggtacggggacctgcggggaaagcccttcgccatcgaagccgagaacagcatcctggacatcagcggcttcagcaagcagtacaactgtgccttcatctggcagaaggacggcgtgaagaagctgaacctgtacctgatcatcaactacttcaagggcggcaagctgcggttcaagaagatcaaacctgaagccttcgaagccaacagattctacaccgtgatcaacaaaaagagcggcgagatcgtgcccatggaggtgaacttcaacttcgacgaccccaacctgatcatcctgcctctggcctttggcaagagacagggcagagaattcatctggaacgacctgctgtccctggaaaccggcagcctgaagctggccaacggaagagtgatcgagaagacactgtacaacagaagaacccggcaggatgagcctgccctgttcgtggccctgaccttcgagcggcgggaggtcctggactcctccaatatcaaaccaatgaacctgatcggcgtggcaagaggcgaaaacatccccgccgtgatcgccctgaccgaccccgagggctgcccactgagccggtttaaggatagcctgggaaacccaacccacatcctgagaatcggcgagagctataaggagaagcagcggaccatccaggccaagaaggaggtggagcagcggagagccggcggctacagccggaagtacgccagcaaagccaagaatctggcagacgatatggtgagaaacaccgctagagatctgctgtactacgccgtgacccaggatgccatgctgatcttcgccaacctgagccggggcttcggccggcagggcaagcggaccttcatggccgagagacagtacacacggatggaggactggctgaccgccaagctggcctacgagggcctgagcaagacctacctgtccaagacactggcccagtacacctccaagacatgcagcaactgtgggtttaccatcaccagcgccgactacgacagggtgctggagaagctgaagaagacagcaacaggctggatgaccacaattaacggcaaggagctgaaggtggagggccagattacctactacaacagatacaagagacagaacgtagtcaaggacctgtccgtcgagctggatagactgagcgaagaatctgtgaacaacgacatctcctcctggacaaagggcagaagcggagaagctctgagcctcctgaagaaaagattctcccatagacccgtgcaggagaagttcgtgtgcctgaactgcggcttcgagacacacgcagccgagcaagccgccctgaacatcgccagatcctggctgttcctgcggagccaggagtacaagaaataccagacaaacaagacaaccggcaacaccgataagagagccttcgtcgagacctggcagtccttttaccggaagaagcttaaggaggtgtggaaacctgccgtgcggtctggcggatctggcggaggctccaccagccccaagaaaaagagaaaagtctaagctgccttctgcggggcttgccttctggccatgcccttcttctctcccttgcacctgtacctcttggtctttgaataaagcctgagtaggaaggctagcaaaaaaaaaaaaaaaaaaaaaaaaaaaaaaaaaaaaaaaaaaaaaaaaaaaaaaaaaaaaaaaaaaaaaaaaaaaaaaaa

SEQ ID NO: 12740 - RNA, 5785 nt, synthetic construct
  source 1..5785: mol_type = other RNA
aggaaataagagagaaaagaagagtaagaagaaatataagagccaccatggcccctaagaagaagcgtaaagtgagccggatggaacgcctcgtctacgaggtgcggcagaagtgcagaaacatcgaggacatctgcatctcctgcggatctctgaacgtgaccctggagcacccactgttcatcggcggcatgtgccagaactgtaaaaactgttttctggagtgtgcctatcaatacgacgatgacggctaccagagctactgcaccatctgttgcggcggaagagaggtgctgatgtgtggaaataacaactgctgccggtgcttctgcgtggaatgcgtggacctgctggtgggccccggcgccgcccaggccgctattaaggaagatccttggaactgctacatgtgcggccacaagggcacatacggcctgctgagacggagagaggactggcctagcagactgcagatgttcttcgccaataaccacgaccaggagttcgacccccctaaggtgtaccctcccgtccccgccgagaagagaaagcccatccgggtcctgagcctgttcgatggcatcgccaccggtctgctggtgctgaaggacctgggcatccaggtggataggtacattgcctccgaggtgtgcgaggactccatcaccgtgggaatggtgcgtcatcagggcaagatcatgtacgtgggcgacgtgcggagcgtgacacagaagcatatccaggagtggggccctttcgacctggtgatcggcggcagcccttgcaatgacctgagcatcgtgaacccagcccggaagggcctgtacgagggaaccggcagactgttcttcgagttttacagactgctgcacgacgcccggcctaaggaaggcgacgaccggcccttcttttggctgttcgagaatgtggtggccatgggagtcagcgacaagcgggatattagccggttcctggagagcaaccccgtgatgatcgatgccaaggaagtgagcgccgcccaccgggccagatacttctggggcaatctgcctggcatgaacagacccctggccagcaccgtgaacgacaagctggagctgcaggagtgcctggagcacggccggatcgccaagttcagcaaggtgagaaccatcaccacccgaagcaacagcatcaaacaaggcaaggaccagcactttcctgtgttcatgaacgagaaggaggacatcctgtggtgtaccgagatggagagagtgttcgggttcccagtccactacacagatgtcagcaacatgtctagactggccagacagagactgctgggaagaagctggtccgtccctgtgatcagacacctgttcgcccctctgaaggagtacttcgcctgcgtgagcagcggcaacagcaacgccaacagccggggccccagcttctctagcggcctggtgccactgtccctgagagggagccacatgggccccatggagatctacaaaaccgtgagcgcctggaagcggcagcctgtgcgcgtgctgagcctgtttcggaatatcgataaagtcctgaaaagcctgggattcctggagagcggctctggctccggcggtggcaccctgaagtacgtggaggatgtgacaaacgtggtcagacgggatgtggagaagtggggccccttcgatctggtgtacggcagcacccaacccctgggcagctcttgtgaccggtgccctggctggtacatgtttcagttccaccggatcctgcagtacgccctgccgagacaggagtcccagcggccattcttttggattttcatggacaacttgctgctgaccgaggatgaccaggaaactaccactcggttcctgcagaccgaagccgtgaccctgcaggacgtgagaggccgggactaccagaacgccatgcgggtgtggtccaacatccctggactgaaaagcaagcacgcacctctgacccctaaagaagaggagtacctgcaggcccaggtgcggagcagaagcaagctggacgcccctaaggtggatctgctggtgaagaattgcctcctgcccctgagagagtacttcaagtatttcagccagaatagtctgcccctgggaggcagcggcggcggcatgatcaactaccagacccccgtgagcttcagggacgtggtggtgggcttcacccaggaggagtggcacaggctgaaccccacccagagggccctgtacagggacgtgatgctggagacctacagcaacctggtgagcgtgggctacgagggcaccaagcccgacgtgatcctgaggctggagcaggaggaggccccctggatcggcgaggccgcctgcctgggctgccactgctgggaggacggcggcccaagcagcggcgcccctcctcccagcggcggcagcccagccggctccccaacctctaccgaggagggcacctctgagtccgccacccccgagagcggccctggcacctccaccgagcccagcgagggcagcgcacccggcagccctgccggcagccccacctccacagaggagggaaccagcaccgagcccagcgaaggcagcgccccaggcaccagcaccgagcctagtgagcaggagattaaacggatcaacaagatcagaagaagacttgtgaaagacagcaacaccaagaaggccggcaagacaggccccatgaaaaccctgctggttagagtgatgacacccgatctgagagagcggctggaaaacctgagaaagaagcctgaaaatatcccccagcccatcagcaatacatctagagccaacctgaataagctgctgaccgattacaccgaaatgaagaaggcgatcctgcatgtgtactgggaagagttccagaaggaccctgtgggcctgatgagccgggtggcccagcctgccagcaagaagatcgatcagaacaagctgaaacctgagatggacgagaagggcaacctgaccaccgccggctttgcctgctctcagtgtggccagcccctgttcgtgtacaagctggagcaggtgtctgagaagggcaaggcttacaccaactacttcggacggtgcaatgtggccgagcacgaaaagctgatcctgctggcccagctgaagcccgagaaggatagcgacgaagccgtgacatatagcctgggaaagtttgggcagagggccctggatttctacagcattcatgtgaccaaggagtccacccaccccgtgaagcccctggcccagatcgccggaaacagatacgcctccggacctgtgggaaaggccctgagcgacgcatgtatgggcacaatcgcctccttcctgtctaagtaccaggacatcatcatcgaacaccagaaggtggtgaagggcaaccagaagagactggagagcctgcgggagctggccggcaaggaaaacctggaataccctagcgtgaccctgccacctcagcctcacaccaaggagggcgttgatgcctacaacgaagtgatcgcccgggtgcgaatgtgggtgaacctgaacctgtggcagaagctgaagctaagcagagatgatgccaagcctctgctgagactgaagggattcccttcctttcctctggtcgagagacaggccaacgaagtggactggtgggacatggtgtgtaacgtgaagaagctgatcaacgagaaaaaggaggatggcaaggtgttttggcagaatctggctggctacaagagacaggaagccctgagaccatacctgagcagcgaggaagatcggaagaagggaaagaaattcgctcggtaccagctgggcgacctgctgctgcacctggaaaagaagcacggcgaggactggggaaaggtgtacgacgaggcctgggagcggattgacaagaaagtggaaggcctgagcaagcacatcaagctggaagaggaacggagaagcgaggacgcccagagcaaggccgccctgaccgactggctgcgggctaaggccagcttcgtgatcgagggcctgaaggaggccgacaaggacgagttctgcagatgcgagctgaagctgcagaagtggtacggggacctgcggggaaagcccttcgccatcgaagccgagaacagcatcctggacatcagcggcttcagcaagcagtacaactgtgccttcatctggcagaaggacggcgtgaagaagctgaacctgtacctgatcatcaactacttcaagggcggcaagctgcggttcaagaagatcaaacctgaagccttcgaagccaacagattctacaccgtgatcaacaaaaagagcggcgagatcgtgcccatggaggtgaacttcaacttcgacgaccccaacctgatcatcctgcctctggcctttggcaagagacagggcagagaattcatctggaacgacctgctgtccctggaaaccggcagcctgaagctggccaacggaagagtgatcgagaagacactgtacaacagaagaacccggcaggatgagcctgccctgttcgtggccctgaccttcgagcggcgggaggtcctggactcctccaatatcaaaccaatgaacctgatcggcgtggcaagaggcgaaaacatccccgccgtgatcgccctgaccgaccccgagggctgcccactgagccggtttaaggatagcctgggaaacccaacccacatcctgagaatcggcgagagctataaggagaagcagcggaccatccaggccaagaaggaggtggagcagcggagagccggcggctacagccggaagtacgccagcaaagccaagaatctggcagacgatatggtgagaaacaccgctagagatctgctgtactacgccgtgacccaggatgccatgctgatcttcgccaacctgagccggggcttcggccggcagggcaagcggaccttcatggccgagagacagtacacacggatggaggactggctgaccgccaagctggcctacgagggcctgagcaagacctacctgtccaagacactggcccagtacacctccaagacatgcagcaactgtgggtttaccatcaccagcgccgactacgacagggtgctggagaagctgaagaagacagcaacaggctggatgaccacaattaacggcaaggagctgaaggtggagggccagattacctactacaacagatacaagagacagaacgtagtcaaggacctgtccgtcgagctggatagactgagcgaagaatctgtgaacaacgacatctcctcctggacaaagggcagaagcggagaagctctgagcctcctgaagaaaagattctcccatagacccgtgcaggagaagttcgtgtgcctgaactgcggcttcgagacacacgcagccgagcaagccgccctgaacatcgccagatcctggctgttcctgcggagccaggagtacaagaaataccagacaaacaagacaaccggcaacaccgataagagagccttcgtcgagacctggcagtccttttaccggaagaagcttaaggaggtgtggaaacctgccgtgcggtctggcggatctggcggaggctccaccagccccaagaaaaagagaaaagtctaagctgccttctgcggggcttgccttctggccatgcccttcttctctcccttgcacctgtacctcttggtctttgaataaagcctgagtaggaaggctagcaaaaaaaaaaaaaaaaaaaaaaaaaaaaaaaaaaaaaaaaaaaaaaaaaaaaaaaaaaaaaaaaaaaaaaaaaaaaaaaa

SEQ ID NO: 12741 - RNA, 5785 nt, synthetic construct
  source 1..5785: mol_type = other RNA
aggaaataagagagaaaagaagagtaagaagaaatataagagccaccatggcccctaagaagaagcgtaaagtgagccggatggaacgcctcgtctacgaggtgcggcagaagtgcagaaacatcgaggacatctgcatctcctgcggatctctgaacgtgaccctggagcacccactgttcatcggcggcatgtgccagaactgtaaaaactgttttctggagtgtgcctatcaatacgacgatgacggctaccagagctactgcaccatctgttgcggcggaagagaggtgctgatgtgtggaaataacaactgctgccggtgcttctgcgtggaatgcgtggacctgctggtgggccccggcgccgcccaggccgctattaaggaagatccttggaactgctacatgtgcggccacaagggcacatacggcctgctgagacggagagaggactggcctagcagactgcagatgttcttcgccaataaccacgaccaggagttcgacccccctaaggtgtaccctcccgtccccgccgagaagagaaagcccatccgggtcctgagcctgttcgatggcatcgccaccggtctgctggtgctgaaggacctgggcatccaggtggataggtacattgcctccgaggtgtgcgaggactccatcaccgtgggaatggtgcgtcatcagggcaagatcatgtacgtgggcgacgtgcggagcgtgacacagaagcatatccaggagtggggccctttcgacctggtgatcggcggcagcccttgcaatgacctgagcatcgtgaacccagcccggaagggcctgtacgagggaaccggcagactgttcttcgagttttacagactgctgcacgacgcccggcctaaggaaggcgacgaccggcccttcttttggctgttcgagaatgtggtggccatgggagtcagcgacaagcgggatattagccggttcctggagagcaaccccgtgatgatcgatgccaaggaagtgagcgccgcccaccgggccagatacttctggggcaatctgcctggcatgaacagacccctggccagcaccgtgaacgacaagctggagctgcaggagtgcctggagcacggccggatcgccaagttcagcaaggtgagaaccatcaccacccgaagcaacagcatcaaacaaggcaaggaccagcactttcctgtgttcatgaacgagaaggaggacatcctgtggtgtaccgagatggagagagtgttcgggttcccagtccactacacagatgtcagcaacatgtctagactggccagacagagactgctgggaagaagctggtccgtccctgtgatcagacacctgttcgcccctctgaaggagtacttcgcctgcgtgagcagcggcaacagcaacgccaacagccggggccccagcttctctagcggcctggtgccactgtccctgagagggagccacatgggccccatggagatctacaaaaccgtgagcgcctggaagcggcagcctgtgcgcgtgctgagcctgtttcggaatatcgataaagtcctgaaaagcctgggattcctggagagcggctctggctccggcggtggcaccctgaagtacgtggaggatgtgacaaacgtggtcagacgggatgtggagaagtggggccccttcgatctggtgtacggcagcacccaacccctgggcagctcttgtgaccggtgccctggctggtacatgtttcagttccaccggatcctgcagtacgccctgccgagacaggagtcccagcggccattcttttggattttcatggacaacttgctgctgaccgaggatgaccaggaaactaccactcggttcctgcagaccgaagccgtgaccctgcaggacgtgagaggccgggactaccagaacgccatgcgggtgtggtccaacatccctggactgaaaagcaagcacgcacctctgacccctaaagaagaggagtacctgcaggcccaggtgcggagcagaagcaagctggacgcccctaaggtggatctgctggtgaagaattgcctcctgcccctgagagagtacttcaagtatttcagccagaatagtctgcccctgggaggcagcggcggcggcaagagcgccgccgtgagcttcagcgacgtggccgtgtacttcagcctggaggagtggggctgcctgaggcccgcccagagggccctgtacagggacgtgatgagggagacctacggccacctgggcgccctgggcttccccggccccaagcccgccctgatcagctggatggagcaggagagcgaggcctggagccccgccgcccaggaccccgaggagggcgagagcctgggcggcgccctgggcggcccaagcagcggcgcccctcctcccagcggcggcagcccagccggctccccaacctctaccgaggagggcacctctgagtccgccacccccgagagcggccctggcacctccaccgagcccagcgagggcagcgcacccggcagccctgccggcagccccacctccacagaggagggaaccagcaccgagcccagcgaaggcagcgccccaggcaccagcaccgagcctagtgagcaggagattaaacggatcaacaagatcagaagaagacttgtgaaagacagcaacaccaagaaggccggcaagacaggccccatgaaaaccctgctggttagagtgatgacacccgatctgagagagcggctggaaaacctgagaaagaagcctgaaaatatcccccagcccatcagcaatacatctagagccaacctgaataagctgctgaccgattacaccgaaatgaagaaggcgatcctgcatgtgtactgggaagagttccagaaggaccctgtgggcctgatgagccgggtggcccagcctgccagcaagaagatcgatcagaacaagctgaaacctgagatggacgagaagggcaacctgaccaccgccggctttgcctgctctcagtgtggccagcccctgttcgtgtacaagctggagcaggtgtctgagaagggcaaggcttacaccaactacttcggacggtgcaatgtggccgagcacgaaaagctgatcctgctggcccagctgaagcccgagaaggatagcgacgaagccgtgacatatagcctgggaaagtttgggcagagggccctggatttctacagcattcatgtgaccaaggagtccacccaccccgtgaagcccctggcccagatcgccggaaacagatacgcctccggacctgtgggaaaggccctgagcgacgcatgtatgggcacaatcgcctccttcctgtctaagtaccaggacatcatcatcgaacaccagaaggtggtgaagggcaaccagaagagactggagagcctgcgggagctggccggcaaggaaaacctggaataccctagcgtgaccctgccacctcagcctcacaccaaggagggcgttgatgcctacaacgaagtgatcgcccgggtgcgaatgtgggtgaacctgaacctgtggcagaagctgaagctaagcagagatgatgccaagcctctgctgagactgaagggattcccttcctttcctctggtcgagagacaggccaacgaagtggactggtgggacatggtgtgtaacgtgaagaagctgatcaacgagaaaaaggaggatggcaaggtgttttggcagaatctggctggctacaagagacaggaagccctgagaccatacctgagcagcgaggaagatcggaagaagggaaagaaattcgctcggtaccagctgggcgacctgctgctgcacctggaaaagaagcacggcgaggactggggaaaggtgtacgacgaggcctgggagcggattgacaagaaagtggaaggcctgagcaagcacatcaagctggaagaggaacggagaagcgaggacgcccagagcaaggccgccctgaccgactggctgcgggctaaggccagcttcgtgatcgagggcctgaaggaggccgacaaggacgagttctgcagatgcgagctgaagctgcagaagtggtacggggacctgcggggaaagcccttcgccatcgaagccgagaacagcatcctggacatcagcggcttcagcaagcagtacaactgtgccttcatctggcagaaggacggcgtgaagaagctgaacctgtacctgatcatcaactacttcaagggcggcaagctgcggttcaagaagatcaaacctgaagccttcgaagccaacagattctacaccgtgatcaacaaaaagagcggcgagatcgtgcccatggaggtgaacttcaacttcgacgaccccaacctgatcatcctgcctctggcctttggcaagagacagggcagagaattcatctggaacgacctgctgtccctggaaaccggcagcctgaagctggccaacggaagagtgatcgagaagacactgtacaacagaagaacccggcaggatgagcctgccctgttcgtggccctgaccttcgagcggcgggaggtcctggactcctccaatatcaaaccaatgaacctgatcggcgtggcaagaggcgaaaacatccccgccgtgatcgccctgaccgaccccgagggctgcccactgagccggtttaaggatagcctgggaaacccaacccacatcctgagaatcggcgagagctataaggagaagcagcggaccatccaggccaagaaggaggtggagcagcggagagccggcggctacagccggaagtacgccagcaaagccaagaatctggcagacgatatggtgagaaacaccgctagagatctgctgtactacgccgtgacccaggatgccatgctgatcttcgccaacctgagccggggcttcggccggcagggcaagcggaccttcatggccgagagacagtacacacggatggaggactggctgaccgccaagctggcctacgagggcctgagcaagacctacctgtccaagacactggcccagtacacctccaagacatgcagcaactgtgggtttaccatcaccagcgccgactacgacagggtgctggagaagctgaagaagacagcaacaggctggatgaccacaattaacggcaaggagctgaaggtggagggccagattacctactacaacagatacaagagacagaacgtagtcaaggacctgtccgtcgagctggatagactgagcgaagaatctgtgaacaacgacatctcctcctggacaaagggcagaagcggagaagctctgagcctcctgaagaaaagattctcccatagacccgtgcaggagaagttcgtgtgcctgaactgcggcttcgagacacacgcagccgagcaagccgccctgaacatcgccagatcctggctgttcctgcggagccaggagtacaagaaataccagacaaacaagacaaccggcaacaccgataagagagccttcgtcgagacctggcagtccttttaccggaagaagcttaaggaggtgtggaaacctgccgtgcggtctggcggatctggcggaggctccaccagccccaagaaaaagagaaaagtctaagctgccttctgcggggcttgccttctggccatgcccttcttctctcccttgcacctgtacctcttggtctttgaataaagcctgagtaggaaggctagcaaaaaaaaaaaaaaaaaaaaaaaaaaaaaaaaaaaaaaaaaaaaaaaaaaaaaaaaaaaaaaaaaaaaaaaaaaaaaaaa

SEQ ID NO: 12742 - RNA, 5785 nt, synthetic construct
  source 1..5785: mol_type = other RNA
aggaaataagagagaaaagaagagtaagaagaaatataagagccaccatggcccctaagaagaagcgtaaagtgagccggatggaacgcctcgtctacgaggtgcggcagaagtgcagaaacatcgaggacatctgcatctcctgcggatctctgaacgtgaccctggagcacccactgttcatcggcggcatgtgccagaactgtaaaaactgttttctggagtgtgcctatcaatacgacgatgacggctaccagagctactgcaccatctgttgcggcggaagagaggtgctgatgtgtggaaataacaactgctgccggtgcttctgcgtggaatgcgtggacctgctggtgggccccggcgccgcccaggccgctattaaggaagatccttggaactgctacatgtgcggccacaagggcacatacggcctgctgagacggagagaggactggcctagcagactgcagatgttcttcgccaataaccacgaccaggagttcgacccccctaaggtgtaccctcccgtccccgccgagaagagaaagcccatccgggtcctgagcctgttcgatggcatcgccaccggtctgctggtgctgaaggacctgggcatccaggtggataggtacattgcctccgaggtgtgcgaggactccatcaccgtgggaatggtgcgtcatcagggcaagatcatgtacgtgggcgacgtgcggagcgtgacacagaagcatatccaggagtggggccctttcgacctggtgatcggcggcagcccttgcaatgacctgagcatcgtgaacccagcccggaagggcctgtacgagggaaccggcagactgttcttcgagttttacagactgctgcacgacgcccggcctaaggaaggcgacgaccggcccttcttttggctgttcgagaatgtggtggccatgggagtcagcgacaagcgggatattagccggttcctggagagcaaccccgtgatgatcgatgccaaggaagtgagcgccgcccaccgggccagatacttctggggcaatctgcctggcatgaacagacccctggccagcaccgtgaacgacaagctggagctgcaggagtgcctggagcacggccggatcgccaagttcagcaaggtgagaaccatcaccacccgaagcaacagcatcaaacaaggcaaggaccagcactttcctgtgttcatgaacgagaaggaggacatcctgtggtgtaccgagatggagagagtgttcgggttcccagtccactacacagatgtcagcaacatgtctagactggccagacagagactgctgggaagaagctggtccgtccctgtgatcagacacctgttcgcccctctgaaggagtacttcgcctgcgtgagcagcggcaacagcaacgccaacagccggggccccagcttctctagcggcctggtgccactgtccctgagagggagccacatgggccccatggagatctacaaaaccgtgagcgcctggaagcggcagcctgtgcgcgtgctgagcctgtttcggaatatcgataaagtcctgaaaagcctgggattcctggagagcggctctggctccggcggtggcaccctgaagtacgtggaggatgtgacaaacgtggtcagacgggatgtggagaagtggggccccttcgatctggtgtacggcagcacccaacccctgggcagctcttgtgaccggtgccctggctggtacatgtttcagttccaccggatcctgcagtacgccctgccgagacaggagtcccagcggccattcttttggattttcatggacaacttgctgctgaccgaggatgaccaggaaactaccactcggttcctgcagaccgaagccgtgaccctgcaggacgtgagaggccgggactaccagaacgccatgcgggtgtggtccaacatccctggactgaaaagcaagcacgcacctctgacccctaaagaagaggagtacctgcaggcccaggtgcggagcagaagcaagctggacgcccctaaggtggatctgctggtgaagaattgcctcctgcccctgagagagtacttcaagtatttcagccagaatagtctgcccctgggaggcagcggcggcggcccccaggagtgcgtgaccttcaaggacgtggccgtgaacttcacccaggaggagtggcagcagctgaaccccgcccagagggacctgtacagggaggtgatgctggagaactacaggaacctgatcagcctgggcctgcccgtgagcaagcccgacgtgatcttccagctggagcagggcgaggagccctggatgctggacctgcagaggatcgaggagggcgagatcagcaggaacatgtacggcggcccaagcagcggcgcccctcctcccagcggcggcagcccagccggctccccaacctctaccgaggagggcacctctgagtccgccacccccgagagcggccctggcacctccaccgagcccagcgagggcagcgcacccggcagccctgccggcagccccacctccacagaggagggaaccagcaccgagcccagcgaaggcagcgccccaggcaccagcaccgagcctagtgagcaggagattaaacggatcaacaagatcagaagaagacttgtgaaagacagcaacaccaagaaggccggcaagacaggccccatgaaaaccctgctggttagagtgatgacacccgatctgagagagcggctggaaaacctgagaaagaagcctgaaaatatcccccagcccatcagcaatacatctagagccaacctgaataagctgctgaccgattacaccgaaatgaagaaggcgatcctgcatgtgtactgggaagagttccagaaggaccctgtgggcctgatgagccgggtggcccagcctgccagcaagaagatcgatcagaacaagctgaaacctgagatggacgagaagggcaacctgaccaccgccggctttgcctgctctcagtgtggccagcccctgttcgtgtacaagctggagcaggtgtctgagaagggcaaggcttacaccaactacttcggacggtgcaatgtggccgagcacgaaaagctgatcctgctggcccagctgaagcccgagaaggatagcgacgaagccgtgacatatagcctgggaaagtttgggcagagggccctggatttctacagcattcatgtgaccaaggagtccacccaccccgtgaagcccctggcccagatcgccggaaacagatacgcctccggacctgtgggaaaggccctgagcgacgcatgtatgggcacaatcgcctccttcctgtctaagtaccaggacatcatcatcgaacaccagaaggtggtgaagggcaaccagaagagactggagagcctgcgggagctggccggcaaggaaaacctggaataccctagcgtgaccctgccacctcagcctcacaccaaggagggcgttgatgcctacaacgaagtgatcgcccgggtgcgaatgtgggtgaacctgaacctgtggcagaagctgaagctaagcagagatgatgccaagcctctgctgagactgaagggattcccttcctttcctctggtcgagagacaggccaacgaagtggactggtgggacatggtgtgtaacgtgaagaagctgatcaacgagaaaaaggaggatggcaaggtgttttggcagaatctggctggctacaagagacaggaagccctgagaccatacctgagcagcgaggaagatcggaagaagggaaagaaattcgctcggtaccagctgggcgacctgctgctgcacctggaaaagaagcacggcgaggactggggaaaggtgtacgacgaggcctgggagcggattgacaagaaagtggaaggcctgagcaagcacatcaagctggaagaggaacggagaagcgaggacgcccagagcaaggccgccctgaccgactggctgcgggctaaggccagcttcgtgatcgagggcctgaaggaggccgacaaggacgagttctgcagatgcgagctgaagctgcagaagtggtacggggacctgcggggaaagcccttcgccatcgaagccgagaacagcatcctggacatcagcggcttcagcaagcagtacaactgtgccttcatctggcagaaggacggcgtgaagaagctgaacctgtacctgatcatcaactacttcaagggcggcaagctgcggttcaagaagatcaaacctgaagccttcgaagccaacagattctacaccgtgatcaacaaaaagagcggcgagatcgtgcccatggaggtgaacttcaacttcgacgaccccaacctgatcatcctgcctctggcctttggcaagagacagggcagagaattcatctggaacgacctgctgtccctggaaaccggcagcctgaagctggccaacggaagagtgatcgagaagacactgtacaacagaagaacccggcaggatgagcctgccctgttcgtggccctgaccttcgagcggcgggaggtcctggactcctccaatatcaaaccaatgaacctgatcggcgtggcaagaggcgaaaacatccccgccgtgatcgccctgaccgaccccgagggctgcccactgagccggtttaaggatagcctgggaaacccaacccacatcctgagaatcggcgagagctataaggagaagcagcggaccatccaggccaagaaggaggtggagcagcggagagccggcggctacagccggaagtacgccagcaaagccaagaatctggcagacgatatggtgagaaacaccgctagagatctgctgtactacgccgtgacccaggatgccatgctgatcttcgccaacctgagccggggcttcggccggcagggcaagcggaccttcatggccgagagacagtacacacggatggaggactggctgaccgccaagctggcctacgagggcctgagcaagacctacctgtccaagacactggcccagtacacctccaagacatgcagcaactgtgggtttaccatcaccagcgccgactacgacagggtgctggagaagctgaagaagacagcaacaggctggatgaccacaattaacggcaaggagctgaaggtggagggccagattacctactacaacagatacaagagacagaacgtagtcaaggacctgtccgtcgagctggatagactgagcgaagaatctgtgaacaacgacatctcctcctggacaaagggcagaagcggagaagctctgagcctcctgaagaaaagattctcccatagacccgtgcaggagaagttcgtgtgcctgaactgcggcttcgagacacacgcagccgagcaagccgccctgaacatcgccagatcctggctgttcctgcggagccaggagtacaagaaataccagacaaacaagacaaccggcaacaccgataagagagccttcgtcgagacctggcagtccttttaccggaagaagcttaaggaggtgtggaaacctgccgtgcggtctggcggatctggcggaggctccaccagccccaagaaaaagagaaaagtctaagctgccttctgcggggcttgccttctggccatgcccttcttctctcccttgcacctgtacctcttggtctttgaataaagcctgagtaggaaggctagcaaaaaaaaaaaaaaaaaaaaaaaaaaaaaaaaaaaaaaaaaaaaaaaaaaaaaaaaaaaaaaaaaaaaaaaaaaaaaaaa

SEQ ID NO: 12743 - RNA, 5785 nt, synthetic construct
  source 1..5785: mol_type = other RNA
aggaaataagagagaaaagaagagtaagaagaaatataagagccaccatggcccctaagaagaagcgtaaagtgagccggatggaacgcctcgtctacgaggtgcggcagaagtgcagaaacatcgaggacatctgcatctcctgcggatctctgaacgtgaccctggagcacccactgttcatcggcggcatgtgccagaactgtaaaaactgttttctggagtgtgcctatcaatacgacgatgacggctaccagagctactgcaccatctgttgcggcggaagagaggtgctgatgtgtggaaataacaactgctgccggtgcttctgcgtggaatgcgtggacctgctggtgggccccggcgccgcccaggccgctattaaggaagatccttggaactgctacatgtgcggccacaagggcacatacggcctgctgagacggagagaggactggcctagcagactgcagatgttcttcgccaataaccacgaccaggagttcgacccccctaaggtgtaccctcccgtccccgccgagaagagaaagcccatccgggtcctgagcctgttcgatggcatcgccaccggtctgctggtgctgaaggacctgggcatccaggtggataggtacattgcctccgaggtgtgcgaggactccatcaccgtgggaatggtgcgtcatcagggcaagatcatgtacgtgggcgacgtgcggagcgtgacacagaagcatatccaggagtggggccctttcgacctggtgatcggcggcagcccttgcaatgacctgagcatcgtgaacccagcccggaagggcctgtacgagggaaccggcagactgttcttcgagttttacagactgctgcacgacgcccggcctaaggaaggcgacgaccggcccttcttttggctgttcgagaatgtggtggccatgggagtcagcgacaagcgggatattagccggttcctggagagcaaccccgtgatgatcgatgccaaggaagtgagcgccgcccaccgggccagatacttctggggcaatctgcctggcatgaacagacccctggccagcaccgtgaacgacaagctggagctgcaggagtgcctggagcacggccggatcgccaagttcagcaaggtgagaaccatcaccacccgaagcaacagcatcaaacaaggcaaggaccagcactttcctgtgttcatgaacgagaaggaggacatcctgtggtgtaccgagatggagagagtgttcgggttcccagtccactacacagatgtcagcaacatgtctagactggccagacagagactgctgggaagaagctggtccgtccctgtgatcagacacctgttcgcccctctgaaggagtacttcgcctgcgtgagcagcggcaacagcaacgccaacagccggggccccagcttctctagcggcctggtgccactgtccctgagagggagccacatgggccccatggagatctacaaaaccgtgagcgcctggaagcggcagcctgtgcgcgtgctgagcctgtttcggaatatcgataaagtcctgaaaagcctgggattcctggagagcggctctggctccggcggtggcaccctgaagtacgtggaggatgtgacaaacgtggtcagacgggatgtggagaagtggggccccttcgatctggtgtacggcagcacccaacccctgggcagctcttgtgaccggtgccctggctggtacatgtttcagttccaccggatcctgcagtacgccctgccgagacaggagtcccagcggccattcttttggattttcatggacaacttgctgctgaccgaggatgaccaggaaactaccactcggttcctgcagaccgaagccgtgaccctgcaggacgtgagaggccgggactaccagaacgccatgcgggtgtggtccaacatccctggactgaaaagcaagcacgcacctctgacccctaaagaagaggagtacctgcaggcccaggtgcggagcagaagcaagctggacgcccctaaggtggatctgctggtgaagaattgcctcctgcccctgagagagtacttcaagtatttcagccagaatagtctgcccctgggaggcagcggcggcggcgagatgggcctgctgaccttcagggacatcgccatcgagttcagcctggaggagtggcagtgcctggactgcgcccagaggaacctgtacagggacgtgatgctggagaactacaggaacctggtgagcctgggcatcgccgtgagcaagcccgacctgatcacctgcctggagcagaacaaggagagccagaacatcaagaggaacaagatggtggccaagcaccccgtgatgcacagccacggcggcccaagcagcggcgcccctcctcccagcggcggcagcccagccggctccccaacctctaccgaggagggcacctctgagtccgccacccccgagagcggccctggcacctccaccgagcccagcgagggcagcgcacccggcagccctgccggcagccccacctccacagaggagggaaccagcaccgagcccagcgaaggcagcgccccaggcaccagcaccgagcctagtgagcaggagattaaacggatcaacaagatcagaagaagacttgtgaaagacagcaacaccaagaaggccggcaagacaggccccatgaaaaccctgctggttagagtgatgacacccgatctgagagagcggctggaaaacctgagaaagaagcctgaaaatatcccccagcccatcagcaatacatctagagccaacctgaataagctgctgaccgattacaccgaaatgaagaaggcgatcctgcatgtgtactgggaagagttccagaaggaccctgtgggcctgatgagccgggtggcccagcctgccagcaagaagatcgatcagaacaagctgaaacctgagatggacgagaagggcaacctgaccaccgccggctttgcctgctctcagtgtggccagcccctgttcgtgtacaagctggagcaggtgtctgagaagggcaaggcttacaccaactacttcggacggtgcaatgtggccgagcacgaaaagctgatcctgctggcccagctgaagcccgagaaggatagcgacgaagccgtgacatatagcctgggaaagtttgggcagagggccctggatttctacagcattcatgtgaccaaggagtccacccaccccgtgaagcccctggcccagatcgccggaaacagatacgcctccggacctgtgggaaaggccctgagcgacgcatgtatgggcacaatcgcctccttcctgtctaagtaccaggacatcatcatcgaacaccagaaggtggtgaagggcaaccagaagagactggagagcctgcgggagctggccggcaaggaaaacctggaataccctagcgtgaccctgccacctcagcctcacaccaaggagggcgttgatgcctacaacgaagtgatcgcccgggtgcgaatgtgggtgaacctgaacctgtggcagaagctgaagctaagcagagatgatgccaagcctctgctgagactgaagggattcccttcctttcctctggtcgagagacaggccaacgaagtggactggtgggacatggtgtgtaacgtgaagaagctgatcaacgagaaaaaggaggatggcaaggtgttttggcagaatctggctggctacaagagacaggaagccctgagaccatacctgagcagcgaggaagatcggaagaagggaaagaaattcgctcggtaccagctgggcgacctgctgctgcacctggaaaagaagcacggcgaggactggggaaaggtgtacgacgaggcctgggagcggattgacaagaaagtggaaggcctgagcaagcacatcaagctggaagaggaacggagaagcgaggacgcccagagcaaggccgccctgaccgactggctgcgggctaaggccagcttcgtgatcgagggcctgaaggaggccgacaaggacgagttctgcagatgcgagctgaagctgcagaagtggtacggggacctgcggggaaagcccttcgccatcgaagccgagaacagcatcctggacatcagcggcttcagcaagcagtacaactgtgccttcatctggcagaaggacggcgtgaagaagctgaacctgtacctgatcatcaactacttcaagggcggcaagctgcggttcaagaagatcaaacctgaagccttcgaagccaacagattctacaccgtgatcaacaaaaagagcggcgagatcgtgcccatggaggtgaacttcaacttcgacgaccccaacctgatcatcctgcctctggcctttggcaagagacagggcagagaattcatctggaacgacctgctgtccctggaaaccggcagcctgaagctggccaacggaagagtgatcgagaagacactgtacaacagaagaacccggcaggatgagcctgccctgttcgtggccctgaccttcgagcggcgggaggtcctggactcctccaatatcaaaccaatgaacctgatcggcgtggcaagaggcgaaaacatccccgccgtgatcgccctgaccgaccccgagggctgcccactgagccggtttaaggatagcctgggaaacccaacccacatcctgagaatcggcgagagctataaggagaagcagcggaccatccaggccaagaaggaggtggagcagcggagagccggcggctacagccggaagtacgccagcaaagccaagaatctggcagacgatatggtgagaaacaccgctagagatctgctgtactacgccgtgacccaggatgccatgctgatcttcgccaacctgagccggggcttcggccggcagggcaagcggaccttcatggccgagagacagtacacacggatggaggactggctgaccgccaagctggcctacgagggcctgagcaagacctacctgtccaagacactggcccagtacacctccaagacatgcagcaactgtgggtttaccatcaccagcgccgactacgacagggtgctggagaagctgaagaagacagcaacaggctggatgaccacaattaacggcaaggagctgaaggtggagggccagattacctactacaacagatacaagagacagaacgtagtcaaggacctgtccgtcgagctggatagactgagcgaagaatctgtgaacaacgacatctcctcctggacaaagggcagaagcggagaagctctgagcctcctgaagaaaagattctcccatagacccgtgcaggagaagttcgtgtgcctgaactgcggcttcgagacacacgcagccgagcaagccgccctgaacatcgccagatcctggctgttcctgcggagccaggagtacaagaaataccagacaaacaagacaaccggcaacaccgataagagagccttcgtcgagacctggcagtccttttaccggaagaagcttaaggaggtgtggaaacctgccgtgcggtctggcggatctggcggaggctccaccagccccaagaaaaagagaaaagtctaagctgccttctgcggggcttgccttctggccatgcccttcttctctcccttgcacctgtacctcttggtctttgaataaagcctgagtaggaaggctagcaaaaaaaaaaaaaaaaaaaaaaaaaaaaaaaaaaaaaaaaaaaaaaaaaaaaaaaaaaaaaaaaaaaaaaaaaaaaaaaa

SEQ ID NO: 12744 - RNA, 5785 nt, synthetic construct
  source 1..5785: mol_type = other RNA
aggaaataagagagaaaagaagagtaagaagaaatataagagccaccatggcccctaagaagaagcgtaaagtgagccggatggaacgcctcgtctacgaggtgcggcagaagtgcagaaacatcgaggacatctgcatctcctgcggatctctgaacgtgaccctggagcacccactgttcatcggcggcatgtgccagaactgtaaaaactgttttctggagtgtgcctatcaatacgacgatgacggctaccagagctactgcaccatctgttgcggcggaagagaggtgctgatgtgtggaaataacaactgctgccggtgcttctgcgtggaatgcgtggacctgctggtgggccccggcgccgcccaggccgctattaaggaagatccttggaactgctacatgtgcggccacaagggcacatacggcctgctgagacggagagaggactggcctagcagactgcagatgttcttcgccaataaccacgaccaggagttcgacccccctaaggtgtaccctcccgtccccgccgagaagagaaagcccatccgggtcctgagcctgttcgatggcatcgccaccggtctgctggtgctgaaggacctgggcatccaggtggataggtacattgcctccgaggtgtgcgaggactccatcaccgtgggaatggtgcgtcatcagggcaagatcatgtacgtgggcgacgtgcggagcgtgacacagaagcatatccaggagtggggccctttcgacctggtgatcggcggcagcccttgcaatgacctgagcatcgtgaacccagcccggaagggcctgtacgagggaaccggcagactgttcttcgagttttacagactgctgcacgacgcccggcctaaggaaggcgacgaccggcccttcttttggctgttcgagaatgtggtggccatgggagtcagcgacaagcgggatattagccggttcctggagagcaaccccgtgatgatcgatgccaaggaagtgagcgccgcccaccgggccagatacttctggggcaatctgcctggcatgaacagacccctggccagcaccgtgaacgacaagctggagctgcaggagtgcctggagcacggccggatcgccaagttcagcaaggtgagaaccatcaccacccgaagcaacagcatcaaacaaggcaaggaccagcactttcctgtgttcatgaacgagaaggaggacatcctgtggtgtaccgagatggagagagtgttcgggttcccagtccactacacagatgtcagcaacatgtctagactggccagacagagactgctgggaagaagctggtccgtccctgtgatcagacacctgttcgcccctctgaaggagtacttcgcctgcgtgagcagcggcaacagcaacgccaacagccggggccccagcttctctagcggcctggtgccactgtccctgagagggagccacatgggccccatggagatctacaaaaccgtgagcgcctggaagcggcagcctgtgcgcgtgctgagcctgtttcggaatatcgataaagtcctgaaaagcctgggattcctggagagcggctctggctccggcggtggcaccctgaagtacgtggaggatgtgacaaacgtggtcagacgggatgtggagaagtggggccccttcgatctggtgtacggcagcacccaacccctgggcagctcttgtgaccggtgccctggctggtacatgtttcagttccaccggatcctgcagtacgccctgccgagacaggagtcccagcggccattcttttggattttcatggacaacttgctgctgaccgaggatgaccaggaaactaccactcggttcctgcagaccgaagccgtgaccctgcaggacgtgagaggccgggactaccagaacgccatgcgggtgtggtccaacatccctggactgaaaagcaagcacgcacctctgacccctaaagaagaggagtacctgcaggcccaggtgcggagcagaagcaagctggacgcccctaaggtggatctgctggtgaagaattgcctcctgcccctgagagagtacttcaagtatttcagccagaatagtctgcccctgggaggcagcggcggcggcttcgaggagctggtgaccttcgaggacgtgctggtggacttcagccccgaggagctgagcagcctgagcgccgcccagaggaacctgtacagggaggtgatgctggagaactacaggaacctggtgagcctgggccaccagttcagcaagcccgacgtgatcagcaggctggaggaggaggagagccacgccatggagaccgacagcaggcacaccgtgatctgccccggcgagagccacgacggcggcccaagcagcggcgcccctcctcccagcggcggcagcccagccggctccccaacctctaccgaggagggcacctctgagtccgccacccccgagagcggccctggcacctccaccgagcccagcgagggcagcgcacccggcagccctgccggcagccccacctccacagaggagggaaccagcaccgagcccagcgaaggcagcgccccaggcaccagcaccgagcctagtgagcaggagattaaacggatcaacaagatcagaagaagacttgtgaaagacagcaacaccaagaaggccggcaagacaggccccatgaaaaccctgctggttagagtgatgacacccgatctgagagagcggctggaaaacctgagaaagaagcctgaaaatatcccccagcccatcagcaatacatctagagccaacctgaataagctgctgaccgattacaccgaaatgaagaaggcgatcctgcatgtgtactgggaagagttccagaaggaccctgtgggcctgatgagccgggtggcccagcctgccagcaagaagatcgatcagaacaagctgaaacctgagatggacgagaagggcaacctgaccaccgccggctttgcctgctctcagtgtggccagcccctgttcgtgtacaagctggagcaggtgtctgagaagggcaaggcttacaccaactacttcggacggtgcaatgtggccgagcacgaaaagctgatcctgctggcccagctgaagcccgagaaggatagcgacgaagccgtgacatatagcctgggaaagtttgggcagagggccctggatttctacagcattcatgtgaccaaggagtccacccaccccgtgaagcccctggcccagatcgccggaaacagatacgcctccggacctgtgggaaaggccctgagcgacgcatgtatgggcacaatcgcctccttcctgtctaagtaccaggacatcatcatcgaacaccagaaggtggtgaagggcaaccagaagagactggagagcctgcgggagctggccggcaaggaaaacctggaataccctagcgtgaccctgccacctcagcctcacaccaaggagggcgttgatgcctacaacgaagtgatcgcccgggtgcgaatgtgggtgaacctgaacctgtggcagaagctgaagctaagcagagatgatgccaagcctctgctgagactgaagggattcccttcctttcctctggtcgagagacaggccaacgaagtggactggtgggacatggtgtgtaacgtgaagaagctgatcaacgagaaaaaggaggatggcaaggtgttttggcagaatctggctggctacaagagacaggaagccctgagaccatacctgagcagcgaggaagatcggaagaagggaaagaaattcgctcggtaccagctgggcgacctgctgctgcacctggaaaagaagcacggcgaggactggggaaaggtgtacgacgaggcctgggagcggattgacaagaaagtggaaggcctgagcaagcacatcaagctggaagaggaacggagaagcgaggacgcccagagcaaggccgccctgaccgactggctgcgggctaaggccagcttcgtgatcgagggcctgaaggaggccgacaaggacgagttctgcagatgcgagctgaagctgcagaagtggtacggggacctgcggggaaagcccttcgccatcgaagccgagaacagcatcctggacatcagcggcttcagcaagcagtacaactgtgccttcatctggcagaaggacggcgtgaagaagctgaacctgtacctgatcatcaactacttcaagggcggcaagctgcggttcaagaagatcaaacctgaagccttcgaagccaacagattctacaccgtgatcaacaaaaagagcggcgagatcgtgcccatggaggtgaacttcaacttcgacgaccccaacctgatcatcctgcctctggcctttggcaagagacagggcagagaattcatctggaacgacctgctgtccctggaaaccggcagcctgaagctggccaacggaagagtgatcgagaagacactgtacaacagaagaacccggcaggatgagcctgccctgttcgtggccctgaccttcgagcggcgggaggtcctggactcctccaatatcaaaccaatgaacctgatcggcgtggcaagaggcgaaaacatccccgccgtgatcgccctgaccgaccccgagggctgcccactgagccggtttaaggatagcctgggaaacccaacccacatcctgagaatcggcgagagctataaggagaagcagcggaccatccaggccaagaaggaggtggagcagcggagagccggcggctacagccggaagtacgccagcaaagccaagaatctggcagacgatatggtgagaaacaccgctagagatctgctgtactacgccgtgacccaggatgccatgctgatcttcgccaacctgagccggggcttcggccggcagggcaagcggaccttcatggccgagagacagtacacacggatggaggactggctgaccgccaagctggcctacgagggcctgagcaagacctacctgtccaagacactggcccagtacacctccaagacatgcagcaactgtgggtttaccatcaccagcgccgactacgacagggtgctggagaagctgaagaagacagcaacaggctggatgaccacaattaacggcaaggagctgaaggtggagggccagattacctactacaacagatacaagagacagaacgtagtcaaggacctgtccgtcgagctggatagactgagcgaagaatctgtgaacaacgacatctcctcctggacaaagggcagaagcggagaagctctgagcctcctgaagaaaagattctcccatagacccgtgcaggagaagttcgtgtgcctgaactgcggcttcgagacacacgcagccgagcaagccgccctgaacatcgccagatcctggctgttcctgcggagccaggagtacaagaaataccagacaaacaagacaaccggcaacaccgataagagagccttcgtcgagacctggcagtccttttaccggaagaagcttaaggaggtgtggaaacctgccgtgcggtctggcggatctggcggaggctccaccagccccaagaaaaagagaaaagtctaagctgccttctgcggggcttgccttctggccatgcccttcttctctcccttgcacctgtacctcttggtctttgaataaagcctgagtaggaaggctagcaaaaaaaaaaaaaaaaaaaaaaaaaaaaaaaaaaaaaaaaaaaaaaaaaaaaaaaaaaaaaaaaaaaaaaaaaaaaaaaa

SEQ ID NO: 12745 - RNA, 5785 nt, synthetic construct
  source 1..5785: mol_type = other RNA
aggaaataagagagaaaagaagagtaagaagaaatataagagccaccatggcccctaagaagaagcgtaaagtgagccggatggaacgcctcgtctacgaggtgcggcagaagtgcagaaacatcgaggacatctgcatctcctgcggatctctgaacgtgaccctggagcacccactgttcatcggcggcatgtgccagaactgtaaaaactgttttctggagtgtgcctatcaatacgacgatgacggctaccagagctactgcaccatctgttgcggcggaagagaggtgctgatgtgtggaaataacaactgctgccggtgcttctgcgtggaatgcgtggacctgctggtgggccccggcgccgcccaggccgctattaaggaagatccttggaactgctacatgtgcggccacaagggcacatacggcctgctgagacggagagaggactggcctagcagactgcagatgttcttcgccaataaccacgaccaggagttcgacccccctaaggtgtaccctcccgtccccgccgagaagagaaagcccatccgggtcctgagcctgttcgatggcatcgccaccggtctgctggtgctgaaggacctgggcatccaggtggataggtacattgcctccgaggtgtgcgaggactccatcaccgtgggaatggtgcgtcatcagggcaagatcatgtacgtgggcgacgtgcggagcgtgacacagaagcatatccaggagtggggccctttcgacctggtgatcggcggcagcccttgcaatgacctgagcatcgtgaacccagcccggaagggcctgtacgagggaaccggcagactgttcttcgagttttacagactgctgcacgacgcccggcctaaggaaggcgacgaccggcccttcttttggctgttcgagaatgtggtggccatgggagtcagcgacaagcgggatattagccggttcctggagagcaaccccgtgatgatcgatgccaaggaagtgagcgccgcccaccgggccagatacttctggggcaatctgcctggcatgaacagacccctggccagcaccgtgaacgacaagctggagctgcaggagtgcctggagcacggccggatcgccaagttcagcaaggtgagaaccatcaccacccgaagcaacagcatcaaacaaggcaaggaccagcactttcctgtgttcatgaacgagaaggaggacatcctgtggtgtaccgagatggagagagtgttcgggttcccagtccactacacagatgtcagcaacatgtctagactggccagacagagactgctgggaagaagctggtccgtccctgtgatcagacacctgttcgcccctctgaaggagtacttcgcctgcgtgagcagcggcaacagcaacgccaacagccggggccccagcttctctagcggcctggtgccactgtccctgagagggagccacatgggccccatggagatctacaaaaccgtgagcgcctggaagcggcagcctgtgcgcgtgctgagcctgtttcggaatatcgataaagtcctgaaaagcctgggattcctggagagcggctctggctccggcggtggcaccctgaagtacgtggaggatgtgacaaacgtggtcagacgggatgtggagaagtggggccccttcgatctggtgtacggcagcacccaacccctgggcagctcttgtgaccggtgccctggctggtacatgtttcagttccaccggatcctgcagtacgccctgccgagacaggagtcccagcggccattcttttggattttcatggacaacttgctgctgaccgaggatgaccaggaaactaccactcggttcctgcagaccgaagccgtgaccctgcaggacgtgagaggccgggactaccagaacgccatgcgggtgtggtccaacatccctggactgaaaagcaagcacgcacctctgacccctaaagaagaggagtacctgcaggcccaggtgcggagcagaagcaagctggacgcccctaaggtggatctgctggtgaagaattgcctcctgcccctgagagagtacttcaagtatttcagccagaatagtctgcccctgggaggcagcggcggcggcatgatgaccgccgtgagcctgaccaccaggccccaggagagcgtggccttcgaggacgtggccgtgtacttcaccgccaaggagtgggacatcatggtgcccgccgagagggccctgtacagggacgtgatgctggagaactacgaggccgtggccttcgtggtgccccccaccagcaagcccgccctggtgagccacctggagcagggcaaggagagctgcttcaccaggccccagggcgtgggcggcccaagcagcggcgcccctcctcccagcggcggcagcccagccggctccccaacctctaccgaggagggcacctctgagtccgccacccccgagagcggccctggcacctccaccgagcccagcgagggcagcgcacccggcagccctgccggcagccccacctccacagaggagggaaccagcaccgagcccagcgaaggcagcgccccaggcaccagcaccgagcctagtgagcaggagattaaacggatcaacaagatcagaagaagacttgtgaaagacagcaacaccaagaaggccggcaagacaggccccatgaaaaccctgctggttagagtgatgacacccgatctgagagagcggctggaaaacctgagaaagaagcctgaaaatatcccccagcccatcagcaatacatctagagccaacctgaataagctgctgaccgattacaccgaaatgaagaaggcgatcctgcatgtgtactgggaagagttccagaaggaccctgtgggcctgatgagccgggtggcccagcctgccagcaagaagatcgatcagaacaagctgaaacctgagatggacgagaagggcaacctgaccaccgccggctttgcctgctctcagtgtggccagcccctgttcgtgtacaagctggagcaggtgtctgagaagggcaaggcttacaccaactacttcggacggtgcaatgtggccgagcacgaaaagctgatcctgctggcccagctgaagcccgagaaggatagcgacgaagccgtgacatatagcctgggaaagtttgggcagagggccctggatttctacagcattcatgtgaccaaggagtccacccaccccgtgaagcccctggcccagatcgccggaaacagatacgcctccggacctgtgggaaaggccctgagcgacgcatgtatgggcacaatcgcctccttcctgtctaagtaccaggacatcatcatcgaacaccagaaggtggtgaagggcaaccagaagagactggagagcctgcgggagctggccggcaaggaaaacctggaataccctagcgtgaccctgccacctcagcctcacaccaaggagggcgttgatgcctacaacgaagtgatcgcccgggtgcgaatgtgggtgaacctgaacctgtggcagaagctgaagctaagcagagatgatgccaagcctctgctgagactgaagggattcccttcctttcctctggtcgagagacaggccaacgaagtggactggtgggacatggtgtgtaacgtgaagaagctgatcaacgagaaaaaggaggatggcaaggtgttttggcagaatctggctggctacaagagacaggaagccctgagaccatacctgagcagcgaggaagatcggaagaagggaaagaaattcgctcggtaccagctgggcgacctgctgctgcacctggaaaagaagcacggcgaggactggggaaaggtgtacgacgaggcctgggagcggattgacaagaaagtggaaggcctgagcaagcacatcaagctggaagaggaacggagaagcgaggacgcccagagcaaggccgccctgaccgactggctgcgggctaaggccagcttcgtgatcgagggcctgaaggaggccgacaaggacgagttctgcagatgcgagctgaagctgcagaagtggtacggggacctgcggggaaagcccttcgccatcgaagccgagaacagcatcctggacatcagcggcttcagcaagcagtacaactgtgccttcatctggcagaaggacggcgtgaagaagctgaacctgtacctgatcatcaactacttcaagggcggcaagctgcggttcaagaagatcaaacctgaagccttcgaagccaacagattctacaccgtgatcaacaaaaagagcggcgagatcgtgcccatggaggtgaacttcaacttcgacgaccccaacctgatcatcctgcctctggcctttggcaagagacagggcagagaattcatctggaacgacctgctgtccctggaaaccggcagcctgaagctggccaacggaagagtgatcgagaagacactgtacaacagaagaacccggcaggatgagcctgccctgttcgtggccctgaccttcgagcggcgggaggtcctggactcctccaatatcaaaccaatgaacctgatcggcgtggcaagaggcgaaaacatccccgccgtgatcgccctgaccgaccccgagggctgcccactgagccggtttaaggatagcctgggaaacccaacccacatcctgagaatcggcgagagctataaggagaagcagcggaccatccaggccaagaaggaggtggagcagcggagagccggcggctacagccggaagtacgccagcaaagccaagaatctggcagacgatatggtgagaaacaccgctagagatctgctgtactacgccgtgacccaggatgccatgctgatcttcgccaacctgagccggggcttcggccggcagggcaagcggaccttcatggccgagagacagtacacacggatggaggactggctgaccgccaagctggcctacgagggcctgagcaagacctacctgtccaagacactggcccagtacacctccaagacatgcagcaactgtgggtttaccatcaccagcgccgactacgacagggtgctggagaagctgaagaagacagcaacaggctggatgaccacaattaacggcaaggagctgaaggtggagggccagattacctactacaacagatacaagagacagaacgtagtcaaggacctgtccgtcgagctggatagactgagcgaagaatctgtgaacaacgacatctcctcctggacaaagggcagaagcggagaagctctgagcctcctgaagaaaagattctcccatagacccgtgcaggagaagttcgtgtgcctgaactgcggcttcgagacacacgcagccgagcaagccgccctgaacatcgccagatcctggctgttcctgcggagccaggagtacaagaaataccagacaaacaagacaaccggcaacaccgataagagagccttcgtcgagacctggcagtccttttaccggaagaagcttaaggaggtgtggaaacctgccgtgcggtctggcggatctggcggaggctccaccagccccaagaaaaagagaaaagtctaagctgccttctgcggggcttgccttctggccatgcccttcttctctcccttgcacctgtacctcttggtctttgaataaagcctgagtaggaaggctagcaaaaaaaaaaaaaaaaaaaaaaaaaaaaaaaaaaaaaaaaaaaaaaaaaaaaaaaaaaaaaaaaaaaaaaaaaaaaaaaa

SEQ ID NO: 12746 - RNA, 5785 nt, synthetic construct
  source 1..5785: mol_type = other RNA
aggaaataagagagaaaagaagagtaagaagaaatataagagccaccatggcccctaagaagaagcgtaaagtgagccggatggaacgcctcgtctacgaggtgcggcagaagtgcagaaacatcgaggacatctgcatctcctgcggatctctgaacgtgaccctggagcacccactgttcatcggcggcatgtgccagaactgtaaaaactgttttctggagtgtgcctatcaatacgacgatgacggctaccagagctactgcaccatctgttgcggcggaagagaggtgctgatgtgtggaaataacaactgctgccggtgcttctgcgtggaatgcgtggacctgctggtgggccccggcgccgcccaggccgctattaaggaagatccttggaactgctacatgtgcggccacaagggcacatacggcctgctgagacggagagaggactggcctagcagactgcagatgttcttcgccaataaccacgaccaggagttcgacccccctaaggtgtaccctcccgtccccgccgagaagagaaagcccatccgggtcctgagcctgttcgatggcatcgccaccggtctgctggtgctgaaggacctgggcatccaggtggataggtacattgcctccgaggtgtgcgaggactccatcaccgtgggaatggtgcgtcatcagggcaagatcatgtacgtgggcgacgtgcggagcgtgacacagaagcatatccaggagtggggccctttcgacctggtgatcggcggcagcccttgcaatgacctgagcatcgtgaacccagcccggaagggcctgtacgagggaaccggcagactgttcttcgagttttacagactgctgcacgacgcccggcctaaggaaggcgacgaccggcccttcttttggctgttcgagaatgtggtggccatgggagtcagcgacaagcgggatattagccggttcctggagagcaaccccgtgatgatcgatgccaaggaagtgagcgccgcccaccgggccagatacttctggggcaatctgcctggcatgaacagacccctggccagcaccgtgaacgacaagctggagctgcaggagtgcctggagcacggccggatcgccaagttcagcaaggtgagaaccatcaccacccgaagcaacagcatcaaacaaggcaaggaccagcactttcctgtgttcatgaacgagaaggaggacatcctgtggtgtaccgagatggagagagtgttcgggttcccagtccactacacagatgtcagcaacatgtctagactggccagacagagactgctgggaagaagctggtccgtccctgtgatcagacacctgttcgcccctctgaaggagtacttcgcctgcgtgagcagcggcaacagcaacgccaacagccggggccccagcttctctagcggcctggtgccactgtccctgagagggagccacatgggccccatggagatctacaaaaccgtgagcgcctggaagcggcagcctgtgcgcgtgctgagcctgtttcggaatatcgataaagtcctgaaaagcctgggattcctggagagcggctctggctccggcggtggcaccctgaagtacgtggaggatgtgacaaacgtggtcagacgggatgtggagaagtggggccccttcgatctggtgtacggcagcacccaacccctgggcagctcttgtgaccggtgccctggctggtacatgtttcagttccaccggatcctgcagtacgccctgccgagacaggagtcccagcggccattcttttggattttcatggacaacttgctgctgaccgaggatgaccaggaaactaccactcggttcctgcagaccgaagccgtgaccctgcaggacgtgagaggccgggactaccagaacgccatgcgggtgtggtccaacatccctggactgaaaagcaagcacgcacctctgacccctaaagaagaggagtacctgcaggcccaggtgcggagcagaagcaagctggacgcccctaaggtggatctgctggtgaagaattgcctcctgcccctgagagagtacttcaagtatttcagccagaatagtctgcccctgggaggcagcggcggcggcatggtgcacggcagcgtgaccttcagggacgtggccatcgacttcagccaggaggagtgggagtgcctgcagcccgaccagaggaccctgtacagggacgtgatgctggagaactacagccacctgatcagcctggccggcagcagcatcagcaagcccggcgtgatcaccctgctggagcaggagaaggagccctggatggtggtgaggaaggagaccagcaggtggtaccccgacctggagggcggcccaagcagcggcgcccctcctcccagcggcggcagcccagccggctccccaacctctaccgaggagggcacctctgagtccgccacccccgagagcggccctggcacctccaccgagcccagcgagggcagcgcacccggcagccctgccggcagccccacctccacagaggagggaaccagcaccgagcccagcgaaggcagcgccccaggcaccagcaccgagcctagtgagcaggagattaaacggatcaacaagatcagaagaagacttgtgaaagacagcaacaccaagaaggccggcaagacaggccccatgaaaaccctgctggttagagtgatgacacccgatctgagagagcggctggaaaacctgagaaagaagcctgaaaatatcccccagcccatcagcaatacatctagagccaacctgaataagctgctgaccgattacaccgaaatgaagaaggcgatcctgcatgtgtactgggaagagttccagaaggaccctgtgggcctgatgagccgggtggcccagcctgccagcaagaagatcgatcagaacaagctgaaacctgagatggacgagaagggcaacctgaccaccgccggctttgcctgctctcagtgtggccagcccctgttcgtgtacaagctggagcaggtgtctgagaagggcaaggcttacaccaactacttcggacggtgcaatgtggccgagcacgaaaagctgatcctgctggcccagctgaagcccgagaaggatagcgacgaagccgtgacatatagcctgggaaagtttgggcagagggccctggatttctacagcattcatgtgaccaaggagtccacccaccccgtgaagcccctggcccagatcgccggaaacagatacgcctccggacctgtgggaaaggccctgagcgacgcatgtatgggcacaatcgcctccttcctgtctaagtaccaggacatcatcatcgaacaccagaaggtggtgaagggcaaccagaagagactggagagcctgcgggagctggccggcaaggaaaacctggaataccctagcgtgaccctgccacctcagcctcacaccaaggagggcgttgatgcctacaacgaagtgatcgcccgggtgcgaatgtgggtgaacctgaacctgtggcagaagctgaagctaagcagagatgatgccaagcctctgctgagactgaagggattcccttcctttcctctggtcgagagacaggccaacgaagtggactggtgggacatggtgtgtaacgtgaagaagctgatcaacgagaaaaaggaggatggcaaggtgttttggcagaatctggctggctacaagagacaggaagccctgagaccatacctgagcagcgaggaagatcggaagaagggaaagaaattcgctcggtaccagctgggcgacctgctgctgcacctggaaaagaagcacggcgaggactggggaaaggtgtacgacgaggcctgggagcggattgacaagaaagtggaaggcctgagcaagcacatcaagctggaagaggaacggagaagcgaggacgcccagagcaaggccgccctgaccgactggctgcgggctaaggccagcttcgtgatcgagggcctgaaggaggccgacaaggacgagttctgcagatgcgagctgaagctgcagaagtggtacggggacctgcggggaaagcccttcgccatcgaagccgagaacagcatcctggacatcagcggcttcagcaagcagtacaactgtgccttcatctggcagaaggacggcgtgaagaagctgaacctgtacctgatcatcaactacttcaagggcggcaagctgcggttcaagaagatcaaacctgaagccttcgaagccaacagattctacaccgtgatcaacaaaaagagcggcgagatcgtgcccatggaggtgaacttcaacttcgacgaccccaacctgatcatcctgcctctggcctttggcaagagacagggcagagaattcatctggaacgacctgctgtccctggaaaccggcagcctgaagctggccaacggaagagtgatcgagaagacactgtacaacagaagaacccggcaggatgagcctgccctgttcgtggccctgaccttcgagcggcgggaggtcctggactcctccaatatcaaaccaatgaacctgatcggcgtggcaagaggcgaaaacatccccgccgtgatcgccctgaccgaccccgagggctgcccactgagccggtttaaggatagcctgggaaacccaacccacatcctgagaatcggcgagagctataaggagaagcagcggaccatccaggccaagaaggaggtggagcagcggagagccggcggctacagccggaagtacgccagcaaagccaagaatctggcagacgatatggtgagaaacaccgctagagatctgctgtactacgccgtgacccaggatgccatgctgatcttcgccaacctgagccggggcttcggccggcagggcaagcggaccttcatggccgagagacagtacacacggatggaggactggctgaccgccaagctggcctacgagggcctgagcaagacctacctgtccaagacactggcccagtacacctccaagacatgcagcaactgtgggtttaccatcaccagcgccgactacgacagggtgctggagaagctgaagaagacagcaacaggctggatgaccacaattaacggcaaggagctgaaggtggagggccagattacctactacaacagatacaagagacagaacgtagtcaaggacctgtccgtcgagctggatagactgagcgaagaatctgtgaacaacgacatctcctcctggacaaagggcagaagcggagaagctctgagcctcctgaagaaaagattctcccatagacccgtgcaggagaagttcgtgtgcctgaactgcggcttcgagacacacgcagccgagcaagccgccctgaacatcgccagatcctggctgttcctgcggagccaggagtacaagaaataccagacaaacaagacaaccggcaacaccgataagagagccttcgtcgagacctggcagtccttttaccggaagaagcttaaggaggtgtggaaacctgccgtgcggtctggcggatctggcggaggctccaccagccccaagaaaaagagaaaagtctaagctgccttctgcggggcttgccttctggccatgcccttcttctctcccttgcacctgtacctcttggtctttgaataaagcctgagtaggaaggctagcaaaaaaaaaaaaaaaaaaaaaaaaaaaaaaaaaaaaaaaaaaaaaaaaaaaaaaaaaaaaaaaaaaaaaaaaaaaaaaaa

SEQ ID NO: 12747 - RNA, 5785 nt, synthetic construct
  source 1..5785: mol_type = other RNA
aggaaataagagagaaaagaagagtaagaagaaatataagagccaccatggcccctaagaagaagcgtaaagtgagccggatggaacgcctcgtctacgaggtgcggcagaagtgcagaaacatcgaggacatctgcatctcctgcggatctctgaacgtgaccctggagcacccactgttcatcggcggcatgtgccagaactgtaaaaactgttttctggagtgtgcctatcaatacgacgatgacggctaccagagctactgcaccatctgttgcggcggaagagaggtgctgatgtgtggaaataacaactgctgccggtgcttctgcgtggaatgcgtggacctgctggtgggccccggcgccgcccaggccgctattaaggaagatccttggaactgctacatgtgcggccacaagggcacatacggcctgctgagacggagagaggactggcctagcagactgcagatgttcttcgccaataaccacgaccaggagttcgacccccctaaggtgtaccctcccgtccccgccgagaagagaaagcccatccgggtcctgagcctgttcgatggcatcgccaccggtctgctggtgctgaaggacctgggcatccaggtggataggtacattgcctccgaggtgtgcgaggactccatcaccgtgggaatggtgcgtcatcagggcaagatcatgtacgtgggcgacgtgcggagcgtgacacagaagcatatccaggagtggggccctttcgacctggtgatcggcggcagcccttgcaatgacctgagcatcgtgaacccagcccggaagggcctgtacgagggaaccggcagactgttcttcgagttttacagactgctgcacgacgcccggcctaaggaaggcgacgaccggcccttcttttggctgttcgagaatgtggtggccatgggagtcagcgacaagcgggatattagccggttcctggagagcaaccccgtgatgatcgatgccaaggaagtgagcgccgcccaccgggccagatacttctggggcaatctgcctggcatgaacagacccctggccagcaccgtgaacgacaagctggagctgcaggagtgcctggagcacggccggatcgccaagttcagcaaggtgagaaccatcaccacccgaagcaacagcatcaaacaaggcaaggaccagcactttcctgtgttcatgaacgagaaggaggacatcctgtggtgtaccgagatggagagagtgttcgggttcccagtccactacacagatgtcagcaacatgtctagactggccagacagagactgctgggaagaagctggtccgtccctgtgatcagacacctgttcgcccctctgaaggagtacttcgcctgcgtgagcagcggcaacagcaacgccaacagccggggccccagcttctctagcggcctggtgccactgtccctgagagggagccacatgggccccatggagatctacaaaaccgtgagcgcctggaagcggcagcctgtgcgcgtgctgagcctgtttcggaatatcgataaagtcctgaaaagcctgggattcctggagagcggctctggctccggcggtggcaccctgaagtacgtggaggatgtgacaaacgtggtcagacgggatgtggagaagtggggccccttcgatctggtgtacggcagcacccaacccctgggcagctcttgtgaccggtgccctggctggtacatgtttcagttccaccggatcctgcagtacgccctgccgagacaggagtcccagcggccattcttttggattttcatggacaacttgctgctgaccgaggatgaccaggaaactaccactcggttcctgcagaccgaagccgtgaccctgcaggacgtgagaggccgggactaccagaacgccatgcgggtgtggtccaacatccctggactgaaaagcaagcacgcacctctgacccctaaagaagaggagtacctgcaggcccaggtgcggagcagaagcaagctggacgcccctaaggtggatctgctggtgaagaattgcctcctgcccctgagagagtacttcaagtatttcagccagaatagtctgcccctgggaggcagcggcggcggcccccaggagctggtgaccttcagggacgtggccgtggacttcacccccgaggagtggggccagctgggccccgcccagaaggagctgtaccaggaggtgatgctggagaactacaggaacctggtgtgcctgggcctgaccgtgagcaagcccgacgtgatcagccagctggagcagggcgaggccccctggaggctggagggcggcagcgccaggggcaggtgcctggactggggcatgaggggcggcccaagcagcggcgcccctcctcccagcggcggcagcccagccggctccccaacctctaccgaggagggcacctctgagtccgccacccccgagagcggccctggcacctccaccgagcccagcgagggcagcgcacccggcagccctgccggcagccccacctccacagaggagggaaccagcaccgagcccagcgaaggcagcgccccaggcaccagcaccgagcctagtgagcaggagattaaacggatcaacaagatcagaagaagacttgtgaaagacagcaacaccaagaaggccggcaagacaggccccatgaaaaccctgctggttagagtgatgacacccgatctgagagagcggctggaaaacctgagaaagaagcctgaaaatatcccccagcccatcagcaatacatctagagccaacctgaataagctgctgaccgattacaccgaaatgaagaaggcgatcctgcatgtgtactgggaagagttccagaaggaccctgtgggcctgatgagccgggtggcccagcctgccagcaagaagatcgatcagaacaagctgaaacctgagatggacgagaagggcaacctgaccaccgccggctttgcctgctctcagtgtggccagcccctgttcgtgtacaagctggagcaggtgtctgagaagggcaaggcttacaccaactacttcggacggtgcaatgtggccgagcacgaaaagctgatcctgctggcccagctgaagcccgagaaggatagcgacgaagccgtgacatatagcctgggaaagtttgggcagagggccctggatttctacagcattcatgtgaccaaggagtccacccaccccgtgaagcccctggcccagatcgccggaaacagatacgcctccggacctgtgggaaaggccctgagcgacgcatgtatgggcacaatcgcctccttcctgtctaagtaccaggacatcatcatcgaacaccagaaggtggtgaagggcaaccagaagagactggagagcctgcgggagctggccggcaaggaaaacctggaataccctagcgtgaccctgccacctcagcctcacaccaaggagggcgttgatgcctacaacgaagtgatcgcccgggtgcgaatgtgggtgaacctgaacctgtggcagaagctgaagctaagcagagatgatgccaagcctctgctgagactgaagggattcccttcctttcctctggtcgagagacaggccaacgaagtggactggtgggacatggtgtgtaacgtgaagaagctgatcaacgagaaaaaggaggatggcaaggtgttttggcagaatctggctggctacaagagacaggaagccctgagaccatacctgagcagcgaggaagatcggaagaagggaaagaaattcgctcggtaccagctgggcgacctgctgctgcacctggaaaagaagcacggcgaggactggggaaaggtgtacgacgaggcctgggagcggattgacaagaaagtggaaggcctgagcaagcacatcaagctggaagaggaacggagaagcgaggacgcccagagcaaggccgccctgaccgactggctgcgggctaaggccagcttcgtgatcgagggcctgaaggaggccgacaaggacgagttctgcagatgcgagctgaagctgcagaagtggtacggggacctgcggggaaagcccttcgccatcgaagccgagaacagcatcctggacatcagcggcttcagcaagcagtacaactgtgccttcatctggcagaaggacggcgtgaagaagctgaacctgtacctgatcatcaactacttcaagggcggcaagctgcggttcaagaagatcaaacctgaagccttcgaagccaacagattctacaccgtgatcaacaaaaagagcggcgagatcgtgcccatggaggtgaacttcaacttcgacgaccccaacctgatcatcctgcctctggcctttggcaagagacagggcagagaattcatctggaacgacctgctgtccctggaaaccggcagcctgaagctggccaacggaagagtgatcgagaagacactgtacaacagaagaacccggcaggatgagcctgccctgttcgtggccctgaccttcgagcggcgggaggtcctggactcctccaatatcaaaccaatgaacctgatcggcgtggcaagaggcgaaaacatccccgccgtgatcgccctgaccgaccccgagggctgcccactgagccggtttaaggatagcctgggaaacccaacccacatcctgagaatcggcgagagctataaggagaagcagcggaccatccaggccaagaaggaggtggagcagcggagagccggcggctacagccggaagtacgccagcaaagccaagaatctggcagacgatatggtgagaaacaccgctagagatctgctgtactacgccgtgacccaggatgccatgctgatcttcgccaacctgagccggggcttcggccggcagggcaagcggaccttcatggccgagagacagtacacacggatggaggactggctgaccgccaagctggcctacgagggcctgagcaagacctacctgtccaagacactggcccagtacacctccaagacatgcagcaactgtgggtttaccatcaccagcgccgactacgacagggtgctggagaagctgaagaagacagcaacaggctggatgaccacaattaacggcaaggagctgaaggtggagggccagattacctactacaacagatacaagagacagaacgtagtcaaggacctgtccgtcgagctggatagactgagcgaagaatctgtgaacaacgacatctcctcctggacaaagggcagaagcggagaagctctgagcctcctgaagaaaagattctcccatagacccgtgcaggagaagttcgtgtgcctgaactgcggcttcgagacacacgcagccgagcaagccgccctgaacatcgccagatcctggctgttcctgcggagccaggagtacaagaaataccagacaaacaagacaaccggcaacaccgataagagagccttcgtcgagacctggcagtccttttaccggaagaagcttaaggaggtgtggaaacctgccgtgcggtctggcggatctggcggaggctccaccagccccaagaaaaagagaaaagtctaagctgccttctgcggggcttgccttctggccatgcccttcttctctcccttgcacctgtacctcttggtctttgaataaagcctgagtaggaaggctagcaaaaaaaaaaaaaaaaaaaaaaaaaaaaaaaaaaaaaaaaaaaaaaaaaaaaaaaaaaaaaaaaaaaaaaaaaaaaaaaa

SEQ ID NO: 12748 - RNA, 5785 nt, synthetic construct
  source 1..5785: mol_type = other RNA
aggaaataagagagaaaagaagagtaagaagaaatataagagccaccatggcccctaagaagaagcgtaaagtgagccggatggaacgcctcgtctacgaggtgcggcagaagtgcagaaacatcgaggacatctgcatctcctgcggatctctgaacgtgaccctggagcacccactgttcatcggcggcatgtgccagaactgtaaaaactgttttctggagtgtgcctatcaatacgacgatgacggctaccagagctactgcaccatctgttgcggcggaagagaggtgctgatgtgtggaaataacaactgctgccggtgcttctgcgtggaatgcgtggacctgctggtgggccccggcgccgcccaggccgctattaaggaagatccttggaactgctacatgtgcggccacaagggcacatacggcctgctgagacggagagaggactggcctagcagactgcagatgttcttcgccaataaccacgaccaggagttcgacccccctaaggtgtaccctcccgtccccgccgagaagagaaagcccatccgggtcctgagcctgttcgatggcatcgccaccggtctgctggtgctgaaggacctgggcatccaggtggataggtacattgcctccgaggtgtgcgaggactccatcaccgtgggaatggtgcgtcatcagggcaagatcatgtacgtgggcgacgtgcggagcgtgacacagaagcatatccaggagtggggccctttcgacctggtgatcggcggcagcccttgcaatgacctgagcatcgtgaacccagcccggaagggcctgtacgagggaaccggcagactgttcttcgagttttacagactgctgcacgacgcccggcctaaggaaggcgacgaccggcccttcttttggctgttcgagaatgtggtggccatgggagtcagcgacaagcgggatattagccggttcctggagagcaaccccgtgatgatcgatgccaaggaagtgagcgccgcccaccgggccagatacttctggggcaatctgcctggcatgaacagacccctggccagcaccgtgaacgacaagctggagctgcaggagtgcctggagcacggccggatcgccaagttcagcaaggtgagaaccatcaccacccgaagcaacagcatcaaacaaggcaaggaccagcactttcctgtgttcatgaacgagaaggaggacatcctgtggtgtaccgagatggagagagtgttcgggttcccagtccactacacagatgtcagcaacatgtctagactggccagacagagactgctgggaagaagctggtccgtccctgtgatcagacacctgttcgcccctctgaaggagtacttcgcctgcgtgagcagcggcaacagcaacgccaacagccggggccccagcttctctagcggcctggtgccactgtccctgagagggagccacatgggccccatggagatctacaaaaccgtgagcgcctggaagcggcagcctgtgcgcgtgctgagcctgtttcggaatatcgataaagtcctgaaaagcctgggattcctggagagcggctctggctccggcggtggcaccctgaagtacgtggaggatgtgacaaacgtggtcagacgggatgtggagaagtggggccccttcgatctggtgtacggcagcacccaacccctgggcagctcttgtgaccggtgccctggctggtacatgtttcagttccaccggatcctgcagtacgccctgccgagacaggagtcccagcggccattcttttggattttcatggacaacttgctgctgaccgaggatgaccaggaaactaccactcggttcctgcagaccgaagccgtgaccctgcaggacgtgagaggccgggactaccagaacgccatgcgggtgtggtccaacatccctggactgaaaagcaagcacgcacctctgacccctaaagaagaggagtacctgcaggcccaggtgcggagcagaagcaagctggacgcccctaaggtggatctgctggtgaagaattgcctcctgcccctgagagagtacttcaagtatttcagccagaatagtctgcccctgggaggcagcggcggcggcaggaagaggggcagcctgaccctggaggacgtggccgtggacttcacctgggaggagtggcagctgctggcccccgcccagaaggccctgtaccaggaggtgatgctggagaactacggcaacctggtgttcgtgggctaccaggccagcaagcccgccgccctgagcaggctggagaggggcgagccctggcccgtggaggacgaggtgcacagccagctgtgccccgagatgaggaaggacggcggcccaagcagcggcgcccctcctcccagcggcggcagcccagccggctccccaacctctaccgaggagggcacctctgagtccgccacccccgagagcggccctggcacctccaccgagcccagcgagggcagcgcacccggcagccctgccggcagccccacctccacagaggagggaaccagcaccgagcccagcgaaggcagcgccccaggcaccagcaccgagcctagtgagcaggagattaaacggatcaacaagatcagaagaagacttgtgaaagacagcaacaccaagaaggccggcaagacaggccccatgaaaaccctgctggttagagtgatgacacccgatctgagagagcggctggaaaacctgagaaagaagcctgaaaatatcccccagcccatcagcaatacatctagagccaacctgaataagctgctgaccgattacaccgaaatgaagaaggcgatcctgcatgtgtactgggaagagttccagaaggaccctgtgggcctgatgagccgggtggcccagcctgccagcaagaagatcgatcagaacaagctgaaacctgagatggacgagaagggcaacctgaccaccgccggctttgcctgctctcagtgtggccagcccctgttcgtgtacaagctggagcaggtgtctgagaagggcaaggcttacaccaactacttcggacggtgcaatgtggccgagcacgaaaagctgatcctgctggcccagctgaagcccgagaaggatagcgacgaagccgtgacatatagcctgggaaagtttgggcagagggccctggatttctacagcattcatgtgaccaaggagtccacccaccccgtgaagcccctggcccagatcgccggaaacagatacgcctccggacctgtgggaaaggccctgagcgacgcatgtatgggcacaatcgcctccttcctgtctaagtaccaggacatcatcatcgaacaccagaaggtggtgaagggcaaccagaagagactggagagcctgcgggagctggccggcaaggaaaacctggaataccctagcgtgaccctgccacctcagcctcacaccaaggagggcgttgatgcctacaacgaagtgatcgcccgggtgcgaatgtgggtgaacctgaacctgtggcagaagctgaagctaagcagagatgatgccaagcctctgctgagactgaagggattcccttcctttcctctggtcgagagacaggccaacgaagtggactggtgggacatggtgtgtaacgtgaagaagctgatcaacgagaaaaaggaggatggcaaggtgttttggcagaatctggctggctacaagagacaggaagccctgagaccatacctgagcagcgaggaagatcggaagaagggaaagaaattcgctcggtaccagctgggcgacctgctgctgcacctggaaaagaagcacggcgaggactggggaaaggtgtacgacgaggcctgggagcggattgacaagaaagtggaaggcctgagcaagcacatcaagctggaagaggaacggagaagcgaggacgcccagagcaaggccgccctgaccgactggctgcgggctaaggccagcttcgtgatcgagggcctgaaggaggccgacaaggacgagttctgcagatgcgagctgaagctgcagaagtggtacggggacctgcggggaaagcccttcgccatcgaagccgagaacagcatcctggacatcagcggcttcagcaagcagtacaactgtgccttcatctggcagaaggacggcgtgaagaagctgaacctgtacctgatcatcaactacttcaagggcggcaagctgcggttcaagaagatcaaacctgaagccttcgaagccaacagattctacaccgtgatcaacaaaaagagcggcgagatcgtgcccatggaggtgaacttcaacttcgacgaccccaacctgatcatcctgcctctggcctttggcaagagacagggcagagaattcatctggaacgacctgctgtccctggaaaccggcagcctgaagctggccaacggaagagtgatcgagaagacactgtacaacagaagaacccggcaggatgagcctgccctgttcgtggccctgaccttcgagcggcgggaggtcctggactcctccaatatcaaaccaatgaacctgatcggcgtggcaagaggcgaaaacatccccgccgtgatcgccctgaccgaccccgagggctgcccactgagccggtttaaggatagcctgggaaacccaacccacatcctgagaatcggcgagagctataaggagaagcagcggaccatccaggccaagaaggaggtggagcagcggagagccggcggctacagccggaagtacgccagcaaagccaagaatctggcagacgatatggtgagaaacaccgctagagatctgctgtactacgccgtgacccaggatgccatgctgatcttcgccaacctgagccggggcttcggccggcagggcaagcggaccttcatggccgagagacagtacacacggatggaggactggctgaccgccaagctggcctacgagggcctgagcaagacctacctgtccaagacactggcccagtacacctccaagacatgcagcaactgtgggtttaccatcaccagcgccgactacgacagggtgctggagaagctgaagaagacagcaacaggctggatgaccacaattaacggcaaggagctgaaggtggagggccagattacctactacaacagatacaagagacagaacgtagtcaaggacctgtccgtcgagctggatagactgagcgaagaatctgtgaacaacgacatctcctcctggacaaagggcagaagcggagaagctctgagcctcctgaagaaaagattctcccatagacccgtgcaggagaagttcgtgtgcctgaactgcggcttcgagacacacgcagccgagcaagccgccctgaacatcgccagatcctggctgttcctgcggagccaggagtacaagaaataccagacaaacaagacaaccggcaacaccgataagagagccttcgtcgagacctggcagtccttttaccggaagaagcttaaggaggtgtggaaacctgccgtgcggtctggcggatctggcggaggctccaccagccccaagaaaaagagaaaagtctaagctgccttctgcggggcttgccttctggccatgcccttcttctctcccttgcacctgtacctcttggtctttgaataaagcctgagtaggaaggctagcaaaaaaaaaaaaaaaaaaaaaaaaaaaaaaaaaaaaaaaaaaaaaaaaaaaaaaaaaaaaaaaaaaaaaaaaaaaaaaaa

SEQ ID NO: 12749 - RNA, 5785 nt, synthetic construct
  source 1..5785: mol_type = other RNA
aggaaataagagagaaaagaagagtaagaagaaatataagagccaccatggcccctaagaagaagcgtaaagtgagccggatggaacgcctcgtctacgaggtgcggcagaagtgcagaaacatcgaggacatctgcatctcctgcggatctctgaacgtgaccctggagcacccactgttcatcggcggcatgtgccagaactgtaaaaactgttttctggagtgtgcctatcaatacgacgatgacggctaccagagctactgcaccatctgttgcggcggaagagaggtgctgatgtgtggaaataacaactgctgccggtgcttctgcgtggaatgcgtggacctgctggtgggccccggcgccgcccaggccgctattaaggaagatccttggaactgctacatgtgcggccacaagggcacatacggcctgctgagacggagagaggactggcctagcagactgcagatgttcttcgccaataaccacgaccaggagttcgacccccctaaggtgtaccctcccgtccccgccgagaagagaaagcccatccgggtcctgagcctgttcgatggcatcgccaccggtctgctggtgctgaaggacctgggcatccaggtggataggtacattgcctccgaggtgtgcgaggactccatcaccgtgggaatggtgcgtcatcagggcaagatcatgtacgtgggcgacgtgcggagcgtgacacagaagcatatccaggagtggggccctttcgacctggtgatcggcggcagcccttgcaatgacctgagcatcgtgaacccagcccggaagggcctgtacgagggaaccggcagactgttcttcgagttttacagactgctgcacgacgcccggcctaaggaaggcgacgaccggcccttcttttggctgttcgagaatgtggtggccatgggagtcagcgacaagcgggatattagccggttcctggagagcaaccccgtgatgatcgatgccaaggaagtgagcgccgcccaccgggccagatacttctggggcaatctgcctggcatgaacagacccctggccagcaccgtgaacgacaagctggagctgcaggagtgcctggagcacggccggatcgccaagttcagcaaggtgagaaccatcaccacccgaagcaacagcatcaaacaaggcaaggaccagcactttcctgtgttcatgaacgagaaggaggacatcctgtggtgtaccgagatggagagagtgttcgggttcccagtccactacacagatgtcagcaacatgtctagactggccagacagagactgctgggaagaagctggtccgtccctgtgatcagacacctgttcgcccctctgaaggagtacttcgcctgcgtgagcagcggcaacagcaacgccaacagccggggccccagcttctctagcggcctggtgccactgtccctgagagggagccacatgggccccatggagatctacaaaaccgtgagcgcctggaagcggcagcctgtgcgcgtgctgagcctgtttcggaatatcgataaagtcctgaaaagcctgggattcctggagagcggctctggctccggcggtggcaccctgaagtacgtggaggatgtgacaaacgtggtcagacgggatgtggagaagtggggccccttcgatctggtgtacggcagcacccaacccctgggcagctcttgtgaccggtgccctggctggtacatgtttcagttccaccggatcctgcagtacgccctgccgagacaggagtcccagcggccattcttttggattttcatggacaacttgctgctgaccgaggatgaccaggaaactaccactcggttcctgcagaccgaagccgtgaccctgcaggacgtgagaggccgggactaccagaacgccatgcgggtgtggtccaacatccctggactgaaaagcaagcacgcacctctgacccctaaagaagaggagtacctgcaggcccaggtgcggagcagaagcaagctggacgcccctaaggtggatctgctggtgaagaattgcctcctgcccctgagagagtacttcaagtatttcagccagaatagtctgcccctgggaggcagcggcggcggcccccaggagcaggtgaccttcagcgacgtggccgtggacttcaccgtggaggagtggggcaggctggcccccgcccagaaggagctgtacaggagcgtgatgctggagaactacaggaacctggtgtgcctgggcctggccgccagcagccccgacgtgatcggccagctggagaggggcgagggcccctggagggtggagggcaaggtgaggaagggcctgtgcgccgaccagaagaccagcggcggcccaagcagcggcgcccctcctcccagcggcggcagcccagccggctccccaacctctaccgaggagggcacctctgagtccgccacccccgagagcggccctggcacctccaccgagcccagcgagggcagcgcacccggcagccctgccggcagccccacctccacagaggagggaaccagcaccgagcccagcgaaggcagcgccccaggcaccagcaccgagcctagtgagcaggagattaaacggatcaacaagatcagaagaagacttgtgaaagacagcaacaccaagaaggccggcaagacaggccccatgaaaaccctgctggttagagtgatgacacccgatctgagagagcggctggaaaacctgagaaagaagcctgaaaatatcccccagcccatcagcaatacatctagagccaacctgaataagctgctgaccgattacaccgaaatgaagaaggcgatcctgcatgtgtactgggaagagttccagaaggaccctgtgggcctgatgagccgggtggcccagcctgccagcaagaagatcgatcagaacaagctgaaacctgagatggacgagaagggcaacctgaccaccgccggctttgcctgctctcagtgtggccagcccctgttcgtgtacaagctggagcaggtgtctgagaagggcaaggcttacaccaactacttcggacggtgcaatgtggccgagcacgaaaagctgatcctgctggcccagctgaagcccgagaaggatagcgacgaagccgtgacatatagcctgggaaagtttgggcagagggccctggatttctacagcattcatgtgaccaaggagtccacccaccccgtgaagcccctggcccagatcgccggaaacagatacgcctccggacctgtgggaaaggccctgagcgacgcatgtatgggcacaatcgcctccttcctgtctaagtaccaggacatcatcatcgaacaccagaaggtggtgaagggcaaccagaagagactggagagcctgcgggagctggccggcaaggaaaacctggaataccctagcgtgaccctgccacctcagcctcacaccaaggagggcgttgatgcctacaacgaagtgatcgcccgggtgcgaatgtgggtgaacctgaacctgtggcagaagctgaagctaagcagagatgatgccaagcctctgctgagactgaagggattcccttcctttcctctggtcgagagacaggccaacgaagtggactggtgggacatggtgtgtaacgtgaagaagctgatcaacgagaaaaaggaggatggcaaggtgttttggcagaatctggctggctacaagagacaggaagccctgagaccatacctgagcagcgaggaagatcggaagaagggaaagaaattcgctcggtaccagctgggcgacctgctgctgcacctggaaaagaagcacggcgaggactggggaaaggtgtacgacgaggcctgggagcggattgacaagaaagtggaaggcctgagcaagcacatcaagctggaagaggaacggagaagcgaggacgcccagagcaaggccgccctgaccgactggctgcgggctaaggccagcttcgtgatcgagggcctgaaggaggccgacaaggacgagttctgcagatgcgagctgaagctgcagaagtggtacggggacctgcggggaaagcccttcgccatcgaagccgagaacagcatcctggacatcagcggcttcagcaagcagtacaactgtgccttcatctggcagaaggacggcgtgaagaagctgaacctgtacctgatcatcaactacttcaagggcggcaagctgcggttcaagaagatcaaacctgaagccttcgaagccaacagattctacaccgtgatcaacaaaaagagcggcgagatcgtgcccatggaggtgaacttcaacttcgacgaccccaacctgatcatcctgcctctggcctttggcaagagacagggcagagaattcatctggaacgacctgctgtccctggaaaccggcagcctgaagctggccaacggaagagtgatcgagaagacactgtacaacagaagaacccggcaggatgagcctgccctgttcgtggccctgaccttcgagcggcgggaggtcctggactcctccaatatcaaaccaatgaacctgatcggcgtggcaagaggcgaaaacatccccgccgtgatcgccctgaccgaccccgagggctgcccactgagccggtttaaggatagcctgggaaacccaacccacatcctgagaatcggcgagagctataaggagaagcagcggaccatccaggccaagaaggaggtggagcagcggagagccggcggctacagccggaagtacgccagcaaagccaagaatctggcagacgatatggtgagaaacaccgctagagatctgctgtactacgccgtgacccaggatgccatgctgatcttcgccaacctgagccggggcttcggccggcagggcaagcggaccttcatggccgagagacagtacacacggatggaggactggctgaccgccaagctggcctacgagggcctgagcaagacctacctgtccaagacactggcccagtacacctccaagacatgcagcaactgtgggtttaccatcaccagcgccgactacgacagggtgctggagaagctgaagaagacagcaacaggctggatgaccacaattaacggcaaggagctgaaggtggagggccagattacctactacaacagatacaagagacagaacgtagtcaaggacctgtccgtcgagctggatagactgagcgaagaatctgtgaacaacgacatctcctcctggacaaagggcagaagcggagaagctctgagcctcctgaagaaaagattctcccatagacccgtgcaggagaagttcgtgtgcctgaactgcggcttcgagacacacgcagccgagcaagccgccctgaacatcgccagatcctggctgttcctgcggagccaggagtacaagaaataccagacaaacaagacaaccggcaacaccgataagagagccttcgtcgagacctggcagtccttttaccggaagaagcttaaggaggtgtggaaacctgccgtgcggtctggcggatctggcggaggctccaccagccccaagaaaaagagaaaagtctaagctgccttctgcggggcttgccttctggccatgcccttcttctctcccttgcacctgtacctcttggtctttgaataaagcctgagtaggaaggctagcaaaaaaaaaaaaaaaaaaaaaaaaaaaaaaaaaaaaaaaaaaaaaaaaaaaaaaaaaaaaaaaaaaaaaaaaaaaaaaaa

SEQ ID NO: 12750 - RNA, 5785 nt, synthetic construct
  source 1..5785: mol_type = other RNA
aggaaataagagagaaaagaagagtaagaagaaatataagagccaccatggcccctaagaagaagcgtaaagtgagccggatggaacgcctcgtctacgaggtgcggcagaagtgcagaaacatcgaggacatctgcatctcctgcggatctctgaacgtgaccctggagcacccactgttcatcggcggcatgtgccagaactgtaaaaactgttttctggagtgtgcctatcaatacgacgatgacggctaccagagctactgcaccatctgttgcggcggaagagaggtgctgatgtgtggaaataacaactgctgccggtgcttctgcgtggaatgcgtggacctgctggtgggccccggcgccgcccaggccgctattaaggaagatccttggaactgctacatgtgcggccacaagggcacatacggcctgctgagacggagagaggactggcctagcagactgcagatgttcttcgccaataaccacgaccaggagttcgacccccctaaggtgtaccctcccgtccccgccgagaagagaaagcccatccgggtcctgagcctgttcgatggcatcgccaccggtctgctggtgctgaaggacctgggcatccaggtggataggtacattgcctccgaggtgtgcgaggactccatcaccgtgggaatggtgcgtcatcagggcaagatcatgtacgtgggcgacgtgcggagcgtgacacagaagcatatccaggagtggggccctttcgacctggtgatcggcggcagcccttgcaatgacctgagcatcgtgaacccagcccggaagggcctgtacgagggaaccggcagactgttcttcgagttttacagactgctgcacgacgcccggcctaaggaaggcgacgaccggcccttcttttggctgttcgagaatgtggtggccatgggagtcagcgacaagcgggatattagccggttcctggagagcaaccccgtgatgatcgatgccaaggaagtgagcgccgcccaccgggccagatacttctggggcaatctgcctggcatgaacagacccctggccagcaccgtgaacgacaagctggagctgcaggagtgcctggagcacggccggatcgccaagttcagcaaggtgagaaccatcaccacccgaagcaacagcatcaaacaaggcaaggaccagcactttcctgtgttcatgaacgagaaggaggacatcctgtggtgtaccgagatggagagagtgttcgggttcccagtccactacacagatgtcagcaacatgtctagactggccagacagagactgctgggaagaagctggtccgtccctgtgatcagacacctgttcgcccctctgaaggagtacttcgcctgcgtgagcagcggcaacagcaacgccaacagccggggccccagcttctctagcggcctggtgccactgtccctgagagggagccacatgggccccatggagatctacaaaaccgtgagcgcctggaagcggcagcctgtgcgcgtgctgagcctgtttcggaatatcgataaagtcctgaaaagcctgggattcctggagagcggctctggctccggcggtggcaccctgaagtacgtggaggatgtgacaaacgtggtcagacgggatgtggagaagtggggccccttcgatctggtgtacggcagcacccaacccctgggcagctcttgtgaccggtgccctggctggtacatgtttcagttccaccggatcctgcagtacgccctgccgagacaggagtcccagcggccattcttttggattttcatggacaacttgctgctgaccgaggatgaccaggaaactaccactcggttcctgcagaccgaagccgtgaccctgcaggacgtgagaggccgggactaccagaacgccatgcgggtgtggtccaacatccctggactgaaaagcaagcacgcacctctgacccctaaagaagaggagtacctgcaggcccaggtgcggagcagaagcaagctggacgcccctaaggtggatctgctggtgaagaattgcctcctgcccctgagagagtacttcaagtatttcagccagaatagtctgcccctgggaggcagcggcggcggcatggccgccggccagagggaggccaggccccaggtgagcctgaccttcgaggacgtggccgtgctgttcaccagggacgagtggaggaagctggcccccagccagaggaacctgtacagggacgtgatgctggagaactacaggaacctgctgagcctgggcctgcccttcaccaagccccaggtgatcagcctgctgcagcagggcgaggacccctgggaggtggagaaggagggcagcggcggcggcccaagcagcggcgcccctcctcccagcggcggcagcccagccggctccccaacctctaccgaggagggcacctctgagtccgccacccccgagagcggccctggcacctccaccgagcccagcgagggcagcgcacccggcagccctgccggcagccccacctccacagaggagggaaccagcaccgagcccagcgaaggcagcgccccaggcaccagcaccgagcctagtgagcaggagattaaacggatcaacaagatcagaagaagacttgtgaaagacagcaacaccaagaaggccggcaagacaggccccatgaaaaccctgctggttagagtgatgacacccgatctgagagagcggctggaaaacctgagaaagaagcctgaaaatatcccccagcccatcagcaatacatctagagccaacctgaataagctgctgaccgattacaccgaaatgaagaaggcgatcctgcatgtgtactgggaagagttccagaaggaccctgtgggcctgatgagccgggtggcccagcctgccagcaagaagatcgatcagaacaagctgaaacctgagatggacgagaagggcaacctgaccaccgccggctttgcctgctctcagtgtggccagcccctgttcgtgtacaagctggagcaggtgtctgagaagggcaaggcttacaccaactacttcggacggtgcaatgtggccgagcacgaaaagctgatcctgctggcccagctgaagcccgagaaggatagcgacgaagccgtgacatatagcctgggaaagtttgggcagagggccctggatttctacagcattcatgtgaccaaggagtccacccaccccgtgaagcccctggcccagatcgccggaaacagatacgcctccggacctgtgggaaaggccctgagcgacgcatgtatgggcacaatcgcctccttcctgtctaagtaccaggacatcatcatcgaacaccagaaggtggtgaagggcaaccagaagagactggagagcctgcgggagctggccggcaaggaaaacctggaataccctagcgtgaccctgccacctcagcctcacaccaaggagggcgttgatgcctacaacgaagtgatcgcccgggtgcgaatgtgggtgaacctgaacctgtggcagaagctgaagctaagcagagatgatgccaagcctctgctgagactgaagggattcccttcctttcctctggtcgagagacaggccaacgaagtggactggtgggacatggtgtgtaacgtgaagaagctgatcaacgagaaaaaggaggatggcaaggtgttttggcagaatctggctggctacaagagacaggaagccctgagaccatacctgagcagcgaggaagatcggaagaagggaaagaaattcgctcggtaccagctgggcgacctgctgctgcacctggaaaagaagcacggcgaggactggggaaaggtgtacgacgaggcctgggagcggattgacaagaaagtggaaggcctgagcaagcacatcaagctggaagaggaacggagaagcgaggacgcccagagcaaggccgccctgaccgactggctgcgggctaaggccagcttcgtgatcgagggcctgaaggaggccgacaaggacgagttctgcagatgcgagctgaagctgcagaagtggtacggggacctgcggggaaagcccttcgccatcgaagccgagaacagcatcctggacatcagcggcttcagcaagcagtacaactgtgccttcatctggcagaaggacggcgtgaagaagctgaacctgtacctgatcatcaactacttcaagggcggcaagctgcggttcaagaagatcaaacctgaagccttcgaagccaacagattctacaccgtgatcaacaaaaagagcggcgagatcgtgcccatggaggtgaacttcaacttcgacgaccccaacctgatcatcctgcctctggcctttggcaagagacagggcagagaattcatctggaacgacctgctgtccctggaaaccggcagcctgaagctggccaacggaagagtgatcgagaagacactgtacaacagaagaacccggcaggatgagcctgccctgttcgtggccctgaccttcgagcggcgggaggtcctggactcctccaatatcaaaccaatgaacctgatcggcgtggcaagaggcgaaaacatccccgccgtgatcgccctgaccgaccccgagggctgcccactgagccggtttaaggatagcctgggaaacccaacccacatcctgagaatcggcgagagctataaggagaagcagcggaccatccaggccaagaaggaggtggagcagcggagagccggcggctacagccggaagtacgccagcaaagccaagaatctggcagacgatatggtgagaaacaccgctagagatctgctgtactacgccgtgacccaggatgccatgctgatcttcgccaacctgagccggggcttcggccggcagggcaagcggaccttcatggccgagagacagtacacacggatggaggactggctgaccgccaagctggcctacgagggcctgagcaagacctacctgtccaagacactggcccagtacacctccaagacatgcagcaactgtgggtttaccatcaccagcgccgactacgacagggtgctggagaagctgaagaagacagcaacaggctggatgaccacaattaacggcaaggagctgaaggtggagggccagattacctactacaacagatacaagagacagaacgtagtcaaggacctgtccgtcgagctggatagactgagcgaagaatctgtgaacaacgacatctcctcctggacaaagggcagaagcggagaagctctgagcctcctgaagaaaagattctcccatagacccgtgcaggagaagttcgtgtgcctgaactgcggcttcgagacacacgcagccgagcaagccgccctgaacatcgccagatcctggctgttcctgcggagccaggagtacaagaaataccagacaaacaagacaaccggcaacaccgataagagagccttcgtcgagacctggcagtccttttaccggaagaagcttaaggaggtgtggaaacctgccgtgcggtctggcggatctggcggaggctccaccagccccaagaaaaagagaaaagtctaagctgccttctgcggggcttgccttctggccatgcccttcttctctcccttgcacctgtacctcttggtctttgaataaagcctgagtaggaaggctagcaaaaaaaaaaaaaaaaaaaaaaaaaaaaaaaaaaaaaaaaaaaaaaaaaaaaaaaaaaaaaaaaaaaaaaaaaaaaaaaa

SEQ ID NO: 12751 - RNA, 5785 nt, synthetic construct
  source 1..5785: mol_type = other RNA
aggaaataagagagaaaagaagagtaagaagaaatataagagccaccatggcccctaagaagaagcgtaaagtgagccggatggaacgcctcgtctacgaggtgcggcagaagtgcagaaacatcgaggacatctgcatctcctgcggatctctgaacgtgaccctggagcacccactgttcatcggcggcatgtgccagaactgtaaaaactgttttctggagtgtgcctatcaatacgacgatgacggctaccagagctactgcaccatctgttgcggcggaagagaggtgctgatgtgtggaaataacaactgctgccggtgcttctgcgtggaatgcgtggacctgctggtgggccccggcgccgcccaggccgctattaaggaagatccttggaactgctacatgtgcggccacaagggcacatacggcctgctgagacggagagaggactggcctagcagactgcagatgttcttcgccaataaccacgaccaggagttcgacccccctaaggtgtaccctcccgtccccgccgagaagagaaagcccatccgggtcctgagcctgttcgatggcatcgccaccggtctgctggtgctgaaggacctgggcatccaggtggataggtacattgcctccgaggtgtgcgaggactccatcaccgtgggaatggtgcgtcatcagggcaagatcatgtacgtgggcgacgtgcggagcgtgacacagaagcatatccaggagtggggccctttcgacctggtgatcggcggcagcccttgcaatgacctgagcatcgtgaacccagcccggaagggcctgtacgagggaaccggcagactgttcttcgagttttacagactgctgcacgacgcccggcctaaggaaggcgacgaccggcccttcttttggctgttcgagaatgtggtggccatgggagtcagcgacaagcgggatattagccggttcctggagagcaaccccgtgatgatcgatgccaaggaagtgagcgccgcccaccgggccagatacttctggggcaatctgcctggcatgaacagacccctggccagcaccgtgaacgacaagctggagctgcaggagtgcctggagcacggccggatcgccaagttcagcaaggtgagaaccatcaccacccgaagcaacagcatcaaacaaggcaaggaccagcactttcctgtgttcatgaacgagaaggaggacatcctgtggtgtaccgagatggagagagtgttcgggttcccagtccactacacagatgtcagcaacatgtctagactggccagacagagactgctgggaagaagctggtccgtccctgtgatcagacacctgttcgcccctctgaaggagtacttcgcctgcgtgagcagcggcaacagcaacgccaacagccggggccccagcttctctagcggcctggtgccactgtccctgagagggagccacatgggccccatggagatctacaaaaccgtgagcgcctggaagcggcagcctgtgcgcgtgctgagcctgtttcggaatatcgataaagtcctgaaaagcctgggattcctggagagcggctctggctccggcggtggcaccctgaagtacgtggaggatgtgacaaacgtggtcagacgggatgtggagaagtggggccccttcgatctggtgtacggcagcacccaacccctgggcagctcttgtgaccggtgccctggctggtacatgtttcagttccaccggatcctgcagtacgccctgccgagacaggagtcccagcggccattcttttggattttcatggacaacttgctgctgaccgaggatgaccaggaaactaccactcggttcctgcagaccgaagccgtgaccctgcaggacgtgagaggccgggactaccagaacgccatgcgggtgtggtccaacatccctggactgaaaagcaagcacgcacctctgacccctaaagaagaggagtacctgcaggcccaggtgcggagcagaagcaagctggacgcccctaaggtggatctgctggtgaagaattgcctcctgcccctgagagagtacttcaagtatttcagccagaatagtctgcccctgggaggcagcggcggcggcatggacagcgtggccttcgaggacgtggccatcaacttcacctgcgaggagtgggccctgctgggccccagccagaagagcctgtacagggacgtgatgcaggagaccatcaggaacctggactgcatcggcatgacctggcagacccacgacatcgaggaggaccagtacaaggacctgaggaggaacctgaggtgccacatggtggagaggagctgcgagatcaaggacaacagccagtgcggcggcccaagcagcggcgcccctcctcccagcggcggcagcccagccggctccccaacctctaccgaggagggcacctctgagtccgccacccccgagagcggccctggcacctccaccgagcccagcgagggcagcgcacccggcagccctgccggcagccccacctccacagaggagggaaccagcaccgagcccagcgaaggcagcgccccaggcaccagcaccgagcctagtgagcaggagattaaacggatcaacaagatcagaagaagacttgtgaaagacagcaacaccaagaaggccggcaagacaggccccatgaaaaccctgctggttagagtgatgacacccgatctgagagagcggctggaaaacctgagaaagaagcctgaaaatatcccccagcccatcagcaatacatctagagccaacctgaataagctgctgaccgattacaccgaaatgaagaaggcgatcctgcatgtgtactgggaagagttccagaaggaccctgtgggcctgatgagccgggtggcccagcctgccagcaagaagatcgatcagaacaagctgaaacctgagatggacgagaagggcaacctgaccaccgccggctttgcctgctctcagtgtggccagcccctgttcgtgtacaagctggagcaggtgtctgagaagggcaaggcttacaccaactacttcggacggtgcaatgtggccgagcacgaaaagctgatcctgctggcccagctgaagcccgagaaggatagcgacgaagccgtgacatatagcctgggaaagtttgggcagagggccctggatttctacagcattcatgtgaccaaggagtccacccaccccgtgaagcccctggcccagatcgccggaaacagatacgcctccggacctgtgggaaaggccctgagcgacgcatgtatgggcacaatcgcctccttcctgtctaagtaccaggacatcatcatcgaacaccagaaggtggtgaagggcaaccagaagagactggagagcctgcgggagctggccggcaaggaaaacctggaataccctagcgtgaccctgccacctcagcctcacaccaaggagggcgttgatgcctacaacgaagtgatcgcccgggtgcgaatgtgggtgaacctgaacctgtggcagaagctgaagctaagcagagatgatgccaagcctctgctgagactgaagggattcccttcctttcctctggtcgagagacaggccaacgaagtggactggtgggacatggtgtgtaacgtgaagaagctgatcaacgagaaaaaggaggatggcaaggtgttttggcagaatctggctggctacaagagacaggaagccctgagaccatacctgagcagcgaggaagatcggaagaagggaaagaaattcgctcggtaccagctgggcgacctgctgctgcacctggaaaagaagcacggcgaggactggggaaaggtgtacgacgaggcctgggagcggattgacaagaaagtggaaggcctgagcaagcacatcaagctggaagaggaacggagaagcgaggacgcccagagcaaggccgccctgaccgactggctgcgggctaaggccagcttcgtgatcgagggcctgaaggaggccgacaaggacgagttctgcagatgcgagctgaagctgcagaagtggtacggggacctgcggggaaagcccttcgccatcgaagccgagaacagcatcctggacatcagcggcttcagcaagcagtacaactgtgccttcatctggcagaaggacggcgtgaagaagctgaacctgtacctgatcatcaactacttcaagggcggcaagctgcggttcaagaagatcaaacctgaagccttcgaagccaacagattctacaccgtgatcaacaaaaagagcggcgagatcgtgcccatggaggtgaacttcaacttcgacgaccccaacctgatcatcctgcctctggcctttggcaagagacagggcagagaattcatctggaacgacctgctgtccctggaaaccggcagcctgaagctggccaacggaagagtgatcgagaagacactgtacaacagaagaacccggcaggatgagcctgccctgttcgtggccctgaccttcgagcggcgggaggtcctggactcctccaatatcaaaccaatgaacctgatcggcgtggcaagaggcgaaaacatccccgccgtgatcgccctgaccgaccccgagggctgcccactgagccggtttaaggatagcctgggaaacccaacccacatcctgagaatcggcgagagctataaggagaagcagcggaccatccaggccaagaaggaggtggagcagcggagagccggcggctacagccggaagtacgccagcaaagccaagaatctggcagacgatatggtgagaaacaccgctagagatctgctgtactacgccgtgacccaggatgccatgctgatcttcgccaacctgagccggggcttcggccggcagggcaagcggaccttcatggccgagagacagtacacacggatggaggactggctgaccgccaagctggcctacgagggcctgagcaagacctacctgtccaagacactggcccagtacacctccaagacatgcagcaactgtgggtttaccatcaccagcgccgactacgacagggtgctggagaagctgaagaagacagcaacaggctggatgaccacaattaacggcaaggagctgaaggtggagggccagattacctactacaacagatacaagagacagaacgtagtcaaggacctgtccgtcgagctggatagactgagcgaagaatctgtgaacaacgacatctcctcctggacaaagggcagaagcggagaagctctgagcctcctgaagaaaagattctcccatagacccgtgcaggagaagttcgtgtgcctgaactgcggcttcgagacacacgcagccgagcaagccgccctgaacatcgccagatcctggctgttcctgcggagccaggagtacaagaaataccagacaaacaagacaaccggcaacaccgataagagagccttcgtcgagacctggcagtccttttaccggaagaagcttaaggaggtgtggaaacctgccgtgcggtctggcggatctggcggaggctccaccagccccaagaaaaagagaaaagtctaagctgccttctgcggggcttgccttctggccatgcccttcttctctcccttgcacctgtacctcttggtctttgaataaagcctgagtaggaaggctagcaaaaaaaaaaaaaaaaaaaaaaaaaaaaaaaaaaaaaaaaaaaaaaaaaaaaaaaaaaaaaaaaaaaaaaaaaaaaaaaa

SEQ ID NO: 12752 - RNA, 5785 nt, synthetic construct
  source 1..5785: mol_type = other RNA
aggaaataagagagaaaagaagagtaagaagaaatataagagccaccatggcccctaagaagaagcgtaaagtgagccggatggaacgcctcgtctacgaggtgcggcagaagtgcagaaacatcgaggacatctgcatctcctgcggatctctgaacgtgaccctggagcacccactgttcatcggcggcatgtgccagaactgtaaaaactgttttctggagtgtgcctatcaatacgacgatgacggctaccagagctactgcaccatctgttgcggcggaagagaggtgctgatgtgtggaaataacaactgctgccggtgcttctgcgtggaatgcgtggacctgctggtgggccccggcgccgcccaggccgctattaaggaagatccttggaactgctacatgtgcggccacaagggcacatacggcctgctgagacggagagaggactggcctagcagactgcagatgttcttcgccaataaccacgaccaggagttcgacccccctaaggtgtaccctcccgtccccgccgagaagagaaagcccatccgggtcctgagcctgttcgatggcatcgccaccggtctgctggtgctgaaggacctgggcatccaggtggataggtacattgcctccgaggtgtgcgaggactccatcaccgtgggaatggtgcgtcatcagggcaagatcatgtacgtgggcgacgtgcggagcgtgacacagaagcatatccaggagtggggccctttcgacctggtgatcggcggcagcccttgcaatgacctgagcatcgtgaacccagcccggaagggcctgtacgagggaaccggcagactgttcttcgagttttacagactgctgcacgacgcccggcctaaggaaggcgacgaccggcccttcttttggctgttcgagaatgtggtggccatgggagtcagcgacaagcgggatattagccggttcctggagagcaaccccgtgatgatcgatgccaaggaagtgagcgccgcccaccgggccagatacttctggggcaatctgcctggcatgaacagacccctggccagcaccgtgaacgacaagctggagctgcaggagtgcctggagcacggccggatcgccaagttcagcaaggtgagaaccatcaccacccgaagcaacagcatcaaacaaggcaaggaccagcactttcctgtgttcatgaacgagaaggaggacatcctgtggtgtaccgagatggagagagtgttcgggttcccagtccactacacagatgtcagcaacatgtctagactggccagacagagactgctgggaagaagctggtccgtccctgtgatcagacacctgttcgcccctctgaaggagtacttcgcctgcgtgagcagcggcaacagcaacgccaacagccggggccccagcttctctagcggcctggtgccactgtccctgagagggagccacatgggccccatggagatctacaaaaccgtgagcgcctggaagcggcagcctgtgcgcgtgctgagcctgtttcggaatatcgataaagtcctgaaaagcctgggattcctggagagcggctctggctccggcggtggcaccctgaagtacgtggaggatgtgacaaacgtggtcagacgggatgtggagaagtggggccccttcgatctggtgtacggcagcacccaacccctgggcagctcttgtgaccggtgccctggctggtacatgtttcagttccaccggatcctgcagtacgccctgccgagacaggagtcccagcggccattcttttggattttcatggacaacttgctgctgaccgaggatgaccaggaaactaccactcggttcctgcagaccgaagccgtgaccctgcaggacgtgagaggccgggactaccagaacgccatgcgggtgtggtccaacatccctggactgaaaagcaagcacgcacctctgacccctaaagaagaggagtacctgcaggcccaggtgcggagcagaagcaagctggacgcccctaaggtggatctgctggtgaagaattgcctcctgcccctgagagagtacttcaagtatttcagccagaatagtctgcccctgggaggcagcggcggcggcccccagggcagcgtgaccttcgaggacgtggccgtggacttcagccaggaggagtgggagctgctggaccccgcccagaggaccctgtacagggaggtgatgctggagacctgcaggaacctggtgagcctgggctgcagcctgtgccagcccgtggcccccccccacctggagcagggcgaggccgtgtggatggtggacaggggcatcccccaggccttctgcagcgactgggagaccaggggcggcccaagcagcggcgcccctcctcccagcggcggcagcccagccggctccccaacctctaccgaggagggcacctctgagtccgccacccccgagagcggccctggcacctccaccgagcccagcgagggcagcgcacccggcagccctgccggcagccccacctccacagaggagggaaccagcaccgagcccagcgaaggcagcgccccaggcaccagcaccgagcctagtgagcaggagattaaacggatcaacaagatcagaagaagacttgtgaaagacagcaacaccaagaaggccggcaagacaggccccatgaaaaccctgctggttagagtgatgacacccgatctgagagagcggctggaaaacctgagaaagaagcctgaaaatatcccccagcccatcagcaatacatctagagccaacctgaataagctgctgaccgattacaccgaaatgaagaaggcgatcctgcatgtgtactgggaagagttccagaaggaccctgtgggcctgatgagccgggtggcccagcctgccagcaagaagatcgatcagaacaagctgaaacctgagatggacgagaagggcaacctgaccaccgccggctttgcctgctctcagtgtggccagcccctgttcgtgtacaagctggagcaggtgtctgagaagggcaaggcttacaccaactacttcggacggtgcaatgtggccgagcacgaaaagctgatcctgctggcccagctgaagcccgagaaggatagcgacgaagccgtgacatatagcctgggaaagtttgggcagagggccctggatttctacagcattcatgtgaccaaggagtccacccaccccgtgaagcccctggcccagatcgccggaaacagatacgcctccggacctgtgggaaaggccctgagcgacgcatgtatgggcacaatcgcctccttcctgtctaagtaccaggacatcatcatcgaacaccagaaggtggtgaagggcaaccagaagagactggagagcctgcgggagctggccggcaaggaaaacctggaataccctagcgtgaccctgccacctcagcctcacaccaaggagggcgttgatgcctacaacgaagtgatcgcccgggtgcgaatgtgggtgaacctgaacctgtggcagaagctgaagctaagcagagatgatgccaagcctctgctgagactgaagggattcccttcctttcctctggtcgagagacaggccaacgaagtggactggtgggacatggtgtgtaacgtgaagaagctgatcaacgagaaaaaggaggatggcaaggtgttttggcagaatctggctggctacaagagacaggaagccctgagaccatacctgagcagcgaggaagatcggaagaagggaaagaaattcgctcggtaccagctgggcgacctgctgctgcacctggaaaagaagcacggcgaggactggggaaaggtgtacgacgaggcctgggagcggattgacaagaaagtggaaggcctgagcaagcacatcaagctggaagaggaacggagaagcgaggacgcccagagcaaggccgccctgaccgactggctgcgggctaaggccagcttcgtgatcgagggcctgaaggaggccgacaaggacgagttctgcagatgcgagctgaagctgcagaagtggtacggggacctgcggggaaagcccttcgccatcgaagccgagaacagcatcctggacatcagcggcttcagcaagcagtacaactgtgccttcatctggcagaaggacggcgtgaagaagctgaacctgtacctgatcatcaactacttcaagggcggcaagctgcggttcaagaagatcaaacctgaagccttcgaagccaacagattctacaccgtgatcaacaaaaagagcggcgagatcgtgcccatggaggtgaacttcaacttcgacgaccccaacctgatcatcctgcctctggcctttggcaagagacagggcagagaattcatctggaacgacctgctgtccctggaaaccggcagcctgaagctggccaacggaagagtgatcgagaagacactgtacaacagaagaacccggcaggatgagcctgccctgttcgtggccctgaccttcgagcggcgggaggtcctggactcctccaatatcaaaccaatgaacctgatcggcgtggcaagaggcgaaaacatccccgccgtgatcgccctgaccgaccccgagggctgcccactgagccggtttaaggatagcctgggaaacccaacccacatcctgagaatcggcgagagctataaggagaagcagcggaccatccaggccaagaaggaggtggagcagcggagagccggcggctacagccggaagtacgccagcaaagccaagaatctggcagacgatatggtgagaaacaccgctagagatctgctgtactacgccgtgacccaggatgccatgctgatcttcgccaacctgagccggggcttcggccggcagggcaagcggaccttcatggccgagagacagtacacacggatggaggactggctgaccgccaagctggcctacgagggcctgagcaagacctacctgtccaagacactggcccagtacacctccaagacatgcagcaactgtgggtttaccatcaccagcgccgactacgacagggtgctggagaagctgaagaagacagcaacaggctggatgaccacaattaacggcaaggagctgaaggtggagggccagattacctactacaacagatacaagagacagaacgtagtcaaggacctgtccgtcgagctggatagactgagcgaagaatctgtgaacaacgacatctcctcctggacaaagggcagaagcggagaagctctgagcctcctgaagaaaagattctcccatagacccgtgcaggagaagttcgtgtgcctgaactgcggcttcgagacacacgcagccgagcaagccgccctgaacatcgccagatcctggctgttcctgcggagccaggagtacaagaaataccagacaaacaagacaaccggcaacaccgataagagagccttcgtcgagacctggcagtccttttaccggaagaagcttaaggaggtgtggaaacctgccgtgcggtctggcggatctggcggaggctccaccagccccaagaaaaagagaaaagtctaagctgccttctgcggggcttgccttctggccatgcccttcttctctcccttgcacctgtacctcttggtctttgaataaagcctgagtaggaaggctagcaaaaaaaaaaaaaaaaaaaaaaaaaaaaaaaaaaaaaaaaaaaaaaaaaaaaaaaaaaaaaaaaaaaaaaaaaaaaaaaa

SEQ ID NO: 12753 - RNA, 5785 nt, synthetic construct
  source 1..5785: mol_type = other RNA
aggaaataagagagaaaagaagagtaagaagaaatataagagccaccatggcccctaagaagaagcgtaaagtgagccggatggaacgcctcgtctacgaggtgcggcagaagtgcagaaacatcgaggacatctgcatctcctgcggatctctgaacgtgaccctggagcacccactgttcatcggcggcatgtgccagaactgtaaaaactgttttctggagtgtgcctatcaatacgacgatgacggctaccagagctactgcaccatctgttgcggcggaagagaggtgctgatgtgtggaaataacaactgctgccggtgcttctgcgtggaatgcgtggacctgctggtgggccccggcgccgcccaggccgctattaaggaagatccttggaactgctacatgtgcggccacaagggcacatacggcctgctgagacggagagaggactggcctagcagactgcagatgttcttcgccaataaccacgaccaggagttcgacccccctaaggtgtaccctcccgtccccgccgagaagagaaagcccatccgggtcctgagcctgttcgatggcatcgccaccggtctgctggtgctgaaggacctgggcatccaggtggataggtacattgcctccgaggtgtgcgaggactccatcaccgtgggaatggtgcgtcatcagggcaagatcatgtacgtgggcgacgtgcggagcgtgacacagaagcatatccaggagtggggccctttcgacctggtgatcggcggcagcccttgcaatgacctgagcatcgtgaacccagcccggaagggcctgtacgagggaaccggcagactgttcttcgagttttacagactgctgcacgacgcccggcctaaggaaggcgacgaccggcccttcttttggctgttcgagaatgtggtggccatgggagtcagcgacaagcgggatattagccggttcctggagagcaaccccgtgatgatcgatgccaaggaagtgagcgccgcccaccgggccagatacttctggggcaatctgcctggcatgaacagacccctggccagcaccgtgaacgacaagctggagctgcaggagtgcctggagcacggccggatcgccaagttcagcaaggtgagaaccatcaccacccgaagcaacagcatcaaacaaggcaaggaccagcactttcctgtgttcatgaacgagaaggaggacatcctgtggtgtaccgagatggagagagtgttcgggttcccagtccactacacagatgtcagcaacatgtctagactggccagacagagactgctgggaagaagctggtccgtccctgtgatcagacacctgttcgcccctctgaaggagtacttcgcctgcgtgagcagcggcaacagcaacgccaacagccggggccccagcttctctagcggcctggtgccactgtccctgagagggagccacatgggccccatggagatctacaaaaccgtgagcgcctggaagcggcagcctgtgcgcgtgctgagcctgtttcggaatatcgataaagtcctgaaaagcctgggattcctggagagcggctctggctccggcggtggcaccctgaagtacgtggaggatgtgacaaacgtggtcagacgggatgtggagaagtggggccccttcgatctggtgtacggcagcacccaacccctgggcagctcttgtgaccggtgccctggctggtacatgtttcagttccaccggatcctgcagtacgccctgccgagacaggagtcccagcggccattcttttggattttcatggacaacttgctgctgaccgaggatgaccaggaaactaccactcggttcctgcagaccgaagccgtgaccctgcaggacgtgagaggccgggactaccagaacgccatgcgggtgtggtccaacatccctggactgaaaagcaagcacgcacctctgacccctaaagaagaggagtacctgcaggcccaggtgcggagcagaagcaagctggacgcccctaaggtggatctgctggtgaagaattgcctcctgcccctgagagagtacttcaagtatttcagccagaatagtctgcccctgggaggcagcggcggcggcatgagcctgggcagcgagctgttcagggacgtggccatcgtgttcagccaggaggagtggcagtggctggcccccgcccagagggacctgtacagggacgtgatgctggagacctacagcaacctggtgagcctgggcctggccgtgagcaagcccgacgtgatcagcttcctggagcagggcaaggagccctggatggtggagagggtggtgagcggcggcctgtgccccggcgccaagggcggcggcccaagcagcggcgcccctcctcccagcggcggcagcccagccggctccccaacctctaccgaggagggcacctctgagtccgccacccccgagagcggccctggcacctccaccgagcccagcgagggcagcgcacccggcagccctgccggcagccccacctccacagaggagggaaccagcaccgagcccagcgaaggcagcgccccaggcaccagcaccgagcctagtgagcaggagattaaacggatcaacaagatcagaagaagacttgtgaaagacagcaacaccaagaaggccggcaagacaggccccatgaaaaccctgctggttagagtgatgacacccgatctgagagagcggctggaaaacctgagaaagaagcctgaaaatatcccccagcccatcagcaatacatctagagccaacctgaataagctgctgaccgattacaccgaaatgaagaaggcgatcctgcatgtgtactgggaagagttccagaaggaccctgtgggcctgatgagccgggtggcccagcctgccagcaagaagatcgatcagaacaagctgaaacctgagatggacgagaagggcaacctgaccaccgccggctttgcctgctctcagtgtggccagcccctgttcgtgtacaagctggagcaggtgtctgagaagggcaaggcttacaccaactacttcggacggtgcaatgtggccgagcacgaaaagctgatcctgctggcccagctgaagcccgagaaggatagcgacgaagccgtgacatatagcctgggaaagtttgggcagagggccctggatttctacagcattcatgtgaccaaggagtccacccaccccgtgaagcccctggcccagatcgccggaaacagatacgcctccggacctgtgggaaaggccctgagcgacgcatgtatgggcacaatcgcctccttcctgtctaagtaccaggacatcatcatcgaacaccagaaggtggtgaagggcaaccagaagagactggagagcctgcgggagctggccggcaaggaaaacctggaataccctagcgtgaccctgccacctcagcctcacaccaaggagggcgttgatgcctacaacgaagtgatcgcccgggtgcgaatgtgggtgaacctgaacctgtggcagaagctgaagctaagcagagatgatgccaagcctctgctgagactgaagggattcccttcctttcctctggtcgagagacaggccaacgaagtggactggtgggacatggtgtgtaacgtgaagaagctgatcaacgagaaaaaggaggatggcaaggtgttttggcagaatctggctggctacaagagacaggaagccctgagaccatacctgagcagcgaggaagatcggaagaagggaaagaaattcgctcggtaccagctgggcgacctgctgctgcacctggaaaagaagcacggcgaggactggggaaaggtgtacgacgaggcctgggagcggattgacaagaaagtggaaggcctgagcaagcacatcaagctggaagaggaacggagaagcgaggacgcccagagcaaggccgccctgaccgactggctgcgggctaaggccagcttcgtgatcgagggcctgaaggaggccgacaaggacgagttctgcagatgcgagctgaagctgcagaagtggtacggggacctgcggggaaagcccttcgccatcgaagccgagaacagcatcctggacatcagcggcttcagcaagcagtacaactgtgccttcatctggcagaaggacggcgtgaagaagctgaacctgtacctgatcatcaactacttcaagggcggcaagctgcggttcaagaagatcaaacctgaagccttcgaagccaacagattctacaccgtgatcaacaaaaagagcggcgagatcgtgcccatggaggtgaacttcaacttcgacgaccccaacctgatcatcctgcctctggcctttggcaagagacagggcagagaattcatctggaacgacctgctgtccctggaaaccggcagcctgaagctggccaacggaagagtgatcgagaagacactgtacaacagaagaacccggcaggatgagcctgccctgttcgtggccctgaccttcgagcggcgggaggtcctggactcctccaatatcaaaccaatgaacctgatcggcgtggcaagaggcgaaaacatccccgccgtgatcgccctgaccgaccccgagggctgcccactgagccggtttaaggatagcctgggaaacccaacccacatcctgagaatcggcgagagctataaggagaagcagcggaccatccaggccaagaaggaggtggagcagcggagagccggcggctacagccggaagtacgccagcaaagccaagaatctggcagacgatatggtgagaaacaccgctagagatctgctgtactacgccgtgacccaggatgccatgctgatcttcgccaacctgagccggggcttcggccggcagggcaagcggaccttcatggccgagagacagtacacacggatggaggactggctgaccgccaagctggcctacgagggcctgagcaagacctacctgtccaagacactggcccagtacacctccaagacatgcagcaactgtgggtttaccatcaccagcgccgactacgacagggtgctggagaagctgaagaagacagcaacaggctggatgaccacaattaacggcaaggagctgaaggtggagggccagattacctactacaacagatacaagagacagaacgtagtcaaggacctgtccgtcgagctggatagactgagcgaagaatctgtgaacaacgacatctcctcctggacaaagggcagaagcggagaagctctgagcctcctgaagaaaagattctcccatagacccgtgcaggagaagttcgtgtgcctgaactgcggcttcgagacacacgcagccgagcaagccgccctgaacatcgccagatcctggctgttcctgcggagccaggagtacaagaaataccagacaaacaagacaaccggcaacaccgataagagagccttcgtcgagacctggcagtccttttaccggaagaagcttaaggaggtgtggaaacctgccgtgcggtctggcggatctggcggaggctccaccagccccaagaaaaagagaaaagtctaagctgccttctgcggggcttgccttctggccatgcccttcttctctcccttgcacctgtacctcttggtctttgaataaagcctgagtaggaaggctagcaaaaaaaaaaaaaaaaaaaaaaaaaaaaaaaaaaaaaaaaaaaaaaaaaaaaaaaaaaaaaaaaaaaaaaaaaaaaaaaa

SEQ ID NO: 12754 - RNA, 5785 nt, synthetic construct
  source 1..5785: mol_type = other RNA
aggaaataagagagaaaagaagagtaagaagaaatataagagccaccatggcccctaagaagaagcgtaaagtgagccggatggaacgcctcgtctacgaggtgcggcagaagtgcagaaacatcgaggacatctgcatctcctgcggatctctgaacgtgaccctggagcacccactgttcatcggcggcatgtgccagaactgtaaaaactgttttctggagtgtgcctatcaatacgacgatgacggctaccagagctactgcaccatctgttgcggcggaagagaggtgctgatgtgtggaaataacaactgctgccggtgcttctgcgtggaatgcgtggacctgctggtgggccccggcgccgcccaggccgctattaaggaagatccttggaactgctacatgtgcggccacaagggcacatacggcctgctgagacggagagaggactggcctagcagactgcagatgttcttcgccaataaccacgaccaggagttcgacccccctaaggtgtaccctcccgtccccgccgagaagagaaagcccatccgggtcctgagcctgttcgatggcatcgccaccggtctgctggtgctgaaggacctgggcatccaggtggataggtacattgcctccgaggtgtgcgaggactccatcaccgtgggaatggtgcgtcatcagggcaagatcatgtacgtgggcgacgtgcggagcgtgacacagaagcatatccaggagtggggccctttcgacctggtgatcggcggcagcccttgcaatgacctgagcatcgtgaacccagcccggaagggcctgtacgagggaaccggcagactgttcttcgagttttacagactgctgcacgacgcccggcctaaggaaggcgacgaccggcccttcttttggctgttcgagaatgtggtggccatgggagtcagcgacaagcgggatattagccggttcctggagagcaaccccgtgatgatcgatgccaaggaagtgagcgccgcccaccgggccagatacttctggggcaatctgcctggcatgaacagacccctggccagcaccgtgaacgacaagctggagctgcaggagtgcctggagcacggccggatcgccaagttcagcaaggtgagaaccatcaccacccgaagcaacagcatcaaacaaggcaaggaccagcactttcctgtgttcatgaacgagaaggaggacatcctgtggtgtaccgagatggagagagtgttcgggttcccagtccactacacagatgtcagcaacatgtctagactggccagacagagactgctgggaagaagctggtccgtccctgtgatcagacacctgttcgcccctctgaaggagtacttcgcctgcgtgagcagcggcaacagcaacgccaacagccggggccccagcttctctagcggcctggtgccactgtccctgagagggagccacatgggccccatggagatctacaaaaccgtgagcgcctggaagcggcagcctgtgcgcgtgctgagcctgtttcggaatatcgataaagtcctgaaaagcctgggattcctggagagcggctctggctccggcggtggcaccctgaagtacgtggaggatgtgacaaacgtggtcagacgggatgtggagaagtggggccccttcgatctggtgtacggcagcacccaacccctgggcagctcttgtgaccggtgccctggctggtacatgtttcagttccaccggatcctgcagtacgccctgccgagacaggagtcccagcggccattcttttggattttcatggacaacttgctgctgaccgaggatgaccaggaaactaccactcggttcctgcagaccgaagccgtgaccctgcaggacgtgagaggccgggactaccagaacgccatgcgggtgtggtccaacatccctggactgaaaagcaagcacgcacctctgacccctaaagaagaggagtacctgcaggcccaggtgcggagcagaagcaagctggacgcccctaaggtggatctgctggtgaagaattgcctcctgcccctgagagagtacttcaagtatttcagccagaatagtctgcccctgggaggcagcggcggcggcagccaggagcccgtgaccttcgaggacgtggccgtgtacttcacccagaaccagtgggccagcctggaccccacccagagggccctgtacagggaggtgatgctggagaactacgccaacatcaccagcctggccttccccttccccaagcccgacctgatcctgcagctggagaggggcgaggccaggtggggcctggacccctggatcgccatcgagggcgaggccctgggcggcgtgcacggcggcccaagcagcggcgcccctcctcccagcggcggcagcccagccggctccccaacctctaccgaggagggcacctctgagtccgccacccccgagagcggccctggcacctccaccgagcccagcgagggcagcgcacccggcagccctgccggcagccccacctccacagaggagggaaccagcaccgagcccagcgaaggcagcgccccaggcaccagcaccgagcctagtgagcaggagattaaacggatcaacaagatcagaagaagacttgtgaaagacagcaacaccaagaaggccggcaagacaggccccatgaaaaccctgctggttagagtgatgacacccgatctgagagagcggctggaaaacctgagaaagaagcctgaaaatatcccccagcccatcagcaatacatctagagccaacctgaataagctgctgaccgattacaccgaaatgaagaaggcgatcctgcatgtgtactgggaagagttccagaaggaccctgtgggcctgatgagccgggtggcccagcctgccagcaagaagatcgatcagaacaagctgaaacctgagatggacgagaagggcaacctgaccaccgccggctttgcctgctctcagtgtggccagcccctgttcgtgtacaagctggagcaggtgtctgagaagggcaaggcttacaccaactacttcggacggtgcaatgtggccgagcacgaaaagctgatcctgctggcccagctgaagcccgagaaggatagcgacgaagccgtgacatatagcctgggaaagtttgggcagagggccctggatttctacagcattcatgtgaccaaggagtccacccaccccgtgaagcccctggcccagatcgccggaaacagatacgcctccggacctgtgggaaaggccctgagcgacgcatgtatgggcacaatcgcctccttcctgtctaagtaccaggacatcatcatcgaacaccagaaggtggtgaagggcaaccagaagagactggagagcctgcgggagctggccggcaaggaaaacctggaataccctagcgtgaccctgccacctcagcctcacaccaaggagggcgttgatgcctacaacgaagtgatcgcccgggtgcgaatgtgggtgaacctgaacctgtggcagaagctgaagctaagcagagatgatgccaagcctctgctgagactgaagggattcccttcctttcctctggtcgagagacaggccaacgaagtggactggtgggacatggtgtgtaacgtgaagaagctgatcaacgagaaaaaggaggatggcaaggtgttttggcagaatctggctggctacaagagacaggaagccctgagaccatacctgagcagcgaggaagatcggaagaagggaaagaaattcgctcggtaccagctgggcgacctgctgctgcacctggaaaagaagcacggcgaggactggggaaaggtgtacgacgaggcctgggagcggattgacaagaaagtggaaggcctgagcaagcacatcaagctggaagaggaacggagaagcgaggacgcccagagcaaggccgccctgaccgactggctgcgggctaaggccagcttcgtgatcgagggcctgaaggaggccgacaaggacgagttctgcagatgcgagctgaagctgcagaagtggtacggggacctgcggggaaagcccttcgccatcgaagccgagaacagcatcctggacatcagcggcttcagcaagcagtacaactgtgccttcatctggcagaaggacggcgtgaagaagctgaacctgtacctgatcatcaactacttcaagggcggcaagctgcggttcaagaagatcaaacctgaagccttcgaagccaacagattctacaccgtgatcaacaaaaagagcggcgagatcgtgcccatggaggtgaacttcaacttcgacgaccccaacctgatcatcctgcctctggcctttggcaagagacagggcagagaattcatctggaacgacctgctgtccctggaaaccggcagcctgaagctggccaacggaagagtgatcgagaagacactgtacaacagaagaacccggcaggatgagcctgccctgttcgtggccctgaccttcgagcggcgggaggtcctggactcctccaatatcaaaccaatgaacctgatcggcgtggcaagaggcgaaaacatccccgccgtgatcgccctgaccgaccccgagggctgcccactgagccggtttaaggatagcctgggaaacccaacccacatcctgagaatcggcgagagctataaggagaagcagcggaccatccaggccaagaaggaggtggagcagcggagagccggcggctacagccggaagtacgccagcaaagccaagaatctggcagacgatatggtgagaaacaccgctagagatctgctgtactacgccgtgacccaggatgccatgctgatcttcgccaacctgagccggggcttcggccggcagggcaagcggaccttcatggccgagagacagtacacacggatggaggactggctgaccgccaagctggcctacgagggcctgagcaagacctacctgtccaagacactggcccagtacacctccaagacatgcagcaactgtgggtttaccatcaccagcgccgactacgacagggtgctggagaagctgaagaagacagcaacaggctggatgaccacaattaacggcaaggagctgaaggtggagggccagattacctactacaacagatacaagagacagaacgtagtcaaggacctgtccgtcgagctggatagactgagcgaagaatctgtgaacaacgacatctcctcctggacaaagggcagaagcggagaagctctgagcctcctgaagaaaagattctcccatagacccgtgcaggagaagttcgtgtgcctgaactgcggcttcgagacacacgcagccgagcaagccgccctgaacatcgccagatcctggctgttcctgcggagccaggagtacaagaaataccagacaaacaagacaaccggcaacaccgataagagagccttcgtcgagacctggcagtccttttaccggaagaagcttaaggaggtgtggaaacctgccgtgcggtctggcggatctggcggaggctccaccagccccaagaaaaagagaaaagtctaagctgccttctgcggggcttgccttctggccatgcccttcttctctcccttgcacctgtacctcttggtctttgaataaagcctgagtaggaaggctagcaaaaaaaaaaaaaaaaaaaaaaaaaaaaaaaaaaaaaaaaaaaaaaaaaaaaaaaaaaaaaaaaaaaaaaaaaaaaaaaa

SEQ ID NO: 12755 - RNA, 5785 nt, synthetic construct
  source 1..5785: mol_type = other RNA
aggaaataagagagaaaagaagagtaagaagaaatataagagccaccatggcccctaagaagaagcgtaaagtgagccggatggaacgcctcgtctacgaggtgcggcagaagtgcagaaacatcgaggacatctgcatctcctgcggatctctgaacgtgaccctggagcacccactgttcatcggcggcatgtgccagaactgtaaaaactgttttctggagtgtgcctatcaatacgacgatgacggctaccagagctactgcaccatctgttgcggcggaagagaggtgctgatgtgtggaaataacaactgctgccggtgcttctgcgtggaatgcgtggacctgctggtgggccccggcgccgcccaggccgctattaaggaagatccttggaactgctacatgtgcggccacaagggcacatacggcctgctgagacggagagaggactggcctagcagactgcagatgttcttcgccaataaccacgaccaggagttcgacccccctaaggtgtaccctcccgtccccgccgagaagagaaagcccatccgggtcctgagcctgttcgatggcatcgccaccggtctgctggtgctgaaggacctgggcatccaggtggataggtacattgcctccgaggtgtgcgaggactccatcaccgtgggaatggtgcgtcatcagggcaagatcatgtacgtgggcgacgtgcggagcgtgacacagaagcatatccaggagtggggccctttcgacctggtgatcggcggcagcccttgcaatgacctgagcatcgtgaacccagcccggaagggcctgtacgagggaaccggcagactgttcttcgagttttacagactgctgcacgacgcccggcctaaggaaggcgacgaccggcccttcttttggctgttcgagaatgtggtggccatgggagtcagcgacaagcgggatattagccggttcctggagagcaaccccgtgatgatcgatgccaaggaagtgagcgccgcccaccgggccagatacttctggggcaatctgcctggcatgaacagacccctggccagcaccgtgaacgacaagctggagctgcaggagtgcctggagcacggccggatcgccaagttcagcaaggtgagaaccatcaccacccgaagcaacagcatcaaacaaggcaaggaccagcactttcctgtgttcatgaacgagaaggaggacatcctgtggtgtaccgagatggagagagtgttcgggttcccagtccactacacagatgtcagcaacatgtctagactggccagacagagactgctgggaagaagctggtccgtccctgtgatcagacacctgttcgcccctctgaaggagtacttcgcctgcgtgagcagcggcaacagcaacgccaacagccggggccccagcttctctagcggcctggtgccactgtccctgagagggagccacatgggccccatggagatctacaaaaccgtgagcgcctggaagcggcagcctgtgcgcgtgctgagcctgtttcggaatatcgataaagtcctgaaaagcctgggattcctggagagcggctctggctccggcggtggcaccctgaagtacgtggaggatgtgacaaacgtggtcagacgggatgtggagaagtggggccccttcgatctggtgtacggcagcacccaacccctgggcagctcttgtgaccggtgccctggctggtacatgtttcagttccaccggatcctgcagtacgccctgccgagacaggagtcccagcggccattcttttggattttcatggacaacttgctgctgaccgaggatgaccaggaaactaccactcggttcctgcagaccgaagccgtgaccctgcaggacgtgagaggccgggactaccagaacgccatgcgggtgtggtccaacatccctggactgaaaagcaagcacgcacctctgacccctaaagaagaggagtacctgcaggcccaggtgcggagcagaagcaagctggacgcccctaaggtggatctgctggtgaagaattgcctcctgcccctgagagagtacttcaagtatttcagccagaatagtctgcccctgggaggcagcggcggcggcgtgaagttcgccgacgtggccgtgtacttcagccccgaggagtggggctgcctgaggcccgcccagagggccctgtacagggacgtgatgagggagaactacggccacctgggcgccctgggctgcgccggccccaagcccgccctgatcagctggctggagaggaacaccgaggactgggagcccgccgccctggacccccaggactgccccaggggcctgatggtgcagaggaagtggcccggcggcccaagcagcggcgcccctcctcccagcggcggcagcccagccggctccccaacctctaccgaggagggcacctctgagtccgccacccccgagagcggccctggcacctccaccgagcccagcgagggcagcgcacccggcagccctgccggcagccccacctccacagaggagggaaccagcaccgagcccagcgaaggcagcgccccaggcaccagcaccgagcctagtgagcaggagattaaacggatcaacaagatcagaagaagacttgtgaaagacagcaacaccaagaaggccggcaagacaggccccatgaaaaccctgctggttagagtgatgacacccgatctgagagagcggctggaaaacctgagaaagaagcctgaaaatatcccccagcccatcagcaatacatctagagccaacctgaataagctgctgaccgattacaccgaaatgaagaaggcgatcctgcatgtgtactgggaagagttccagaaggaccctgtgggcctgatgagccgggtggcccagcctgccagcaagaagatcgatcagaacaagctgaaacctgagatggacgagaagggcaacctgaccaccgccggctttgcctgctctcagtgtggccagcccctgttcgtgtacaagctggagcaggtgtctgagaagggcaaggcttacaccaactacttcggacggtgcaatgtggccgagcacgaaaagctgatcctgctggcccagctgaagcccgagaaggatagcgacgaagccgtgacatatagcctgggaaagtttgggcagagggccctggatttctacagcattcatgtgaccaaggagtccacccaccccgtgaagcccctggcccagatcgccggaaacagatacgcctccggacctgtgggaaaggccctgagcgacgcatgtatgggcacaatcgcctccttcctgtctaagtaccaggacatcatcatcgaacaccagaaggtggtgaagggcaaccagaagagactggagagcctgcgggagctggccggcaaggaaaacctggaataccctagcgtgaccctgccacctcagcctcacaccaaggagggcgttgatgcctacaacgaagtgatcgcccgggtgcgaatgtgggtgaacctgaacctgtggcagaagctgaagctaagcagagatgatgccaagcctctgctgagactgaagggattcccttcctttcctctggtcgagagacaggccaacgaagtggactggtgggacatggtgtgtaacgtgaagaagctgatcaacgagaaaaaggaggatggcaaggtgttttggcagaatctggctggctacaagagacaggaagccctgagaccatacctgagcagcgaggaagatcggaagaagggaaagaaattcgctcggtaccagctgggcgacctgctgctgcacctggaaaagaagcacggcgaggactggggaaaggtgtacgacgaggcctgggagcggattgacaagaaagtggaaggcctgagcaagcacatcaagctggaagaggaacggagaagcgaggacgcccagagcaaggccgccctgaccgactggctgcgggctaaggccagcttcgtgatcgagggcctgaaggaggccgacaaggacgagttctgcagatgcgagctgaagctgcagaagtggtacggggacctgcggggaaagcccttcgccatcgaagccgagaacagcatcctggacatcagcggcttcagcaagcagtacaactgtgccttcatctggcagaaggacggcgtgaagaagctgaacctgtacctgatcatcaactacttcaagggcggcaagctgcggttcaagaagatcaaacctgaagccttcgaagccaacagattctacaccgtgatcaacaaaaagagcggcgagatcgtgcccatggaggtgaacttcaacttcgacgaccccaacctgatcatcctgcctctggcctttggcaagagacagggcagagaattcatctggaacgacctgctgtccctggaaaccggcagcctgaagctggccaacggaagagtgatcgagaagacactgtacaacagaagaacccggcaggatgagcctgccctgttcgtggccctgaccttcgagcggcgggaggtcctggactcctccaatatcaaaccaatgaacctgatcggcgtggcaagaggcgaaaacatccccgccgtgatcgccctgaccgaccccgagggctgcccactgagccggtttaaggatagcctgggaaacccaacccacatcctgagaatcggcgagagctataaggagaagcagcggaccatccaggccaagaaggaggtggagcagcggagagccggcggctacagccggaagtacgccagcaaagccaagaatctggcagacgatatggtgagaaacaccgctagagatctgctgtactacgccgtgacccaggatgccatgctgatcttcgccaacctgagccggggcttcggccggcagggcaagcggaccttcatggccgagagacagtacacacggatggaggactggctgaccgccaagctggcctacgagggcctgagcaagacctacctgtccaagacactggcccagtacacctccaagacatgcagcaactgtgggtttaccatcaccagcgccgactacgacagggtgctggagaagctgaagaagacagcaacaggctggatgaccacaattaacggcaaggagctgaaggtggagggccagattacctactacaacagatacaagagacagaacgtagtcaaggacctgtccgtcgagctggatagactgagcgaagaatctgtgaacaacgacatctcctcctggacaaagggcagaagcggagaagctctgagcctcctgaagaaaagattctcccatagacccgtgcaggagaagttcgtgtgcctgaactgcggcttcgagacacacgcagccgagcaagccgccctgaacatcgccagatcctggctgttcctgcggagccaggagtacaagaaataccagacaaacaagacaaccggcaacaccgataagagagccttcgtcgagacctggcagtccttttaccggaagaagcttaaggaggtgtggaaacctgccgtgcggtctggcggatctggcggaggctccaccagccccaagaaaaagagaaaagtctaagctgccttctgcggggcttgccttctggccatgcccttcttctctcccttgcacctgtacctcttggtctttgaataaagcctgagtaggaaggctagcaaaaaaaaaaaaaaaaaaaaaaaaaaaaaaaaaaaaaaaaaaaaaaaaaaaaaaaaaaaaaaaaaaaaaaaaaaaaaaaa

SEQ ID NO: 12756 - RNA, 5785 nt, synthetic construct
  source 1..5785: mol_type = other RNA
aggaaataagagagaaaagaagagtaagaagaaatataagagccaccatggcccctaagaagaagcgtaaagtgagccggatggaacgcctcgtctacgaggtgcggcagaagtgcagaaacatcgaggacatctgcatctcctgcggatctctgaacgtgaccctggagcacccactgttcatcggcggcatgtgccagaactgtaaaaactgttttctggagtgtgcctatcaatacgacgatgacggctaccagagctactgcaccatctgttgcggcggaagagaggtgctgatgtgtggaaataacaactgctgccggtgcttctgcgtggaatgcgtggacctgctggtgggccccggcgccgcccaggccgctattaaggaagatccttggaactgctacatgtgcggccacaagggcacatacggcctgctgagacggagagaggactggcctagcagactgcagatgttcttcgccaataaccacgaccaggagttcgacccccctaaggtgtaccctcccgtccccgccgagaagagaaagcccatccgggtcctgagcctgttcgatggcatcgccaccggtctgctggtgctgaaggacctgggcatccaggtggataggtacattgcctccgaggtgtgcgaggactccatcaccgtgggaatggtgcgtcatcagggcaagatcatgtacgtgggcgacgtgcggagcgtgacacagaagcatatccaggagtggggccctttcgacctggtgatcggcggcagcccttgcaatgacctgagcatcgtgaacccagcccggaagggcctgtacgagggaaccggcagactgttcttcgagttttacagactgctgcacgacgcccggcctaaggaaggcgacgaccggcccttcttttggctgttcgagaatgtggtggccatgggagtcagcgacaagcgggatattagccggttcctggagagcaaccccgtgatgatcgatgccaaggaagtgagcgccgcccaccgggccagatacttctggggcaatctgcctggcatgaacagacccctggccagcaccgtgaacgacaagctggagctgcaggagtgcctggagcacggccggatcgccaagttcagcaaggtgagaaccatcaccacccgaagcaacagcatcaaacaaggcaaggaccagcactttcctgtgttcatgaacgagaaggaggacatcctgtggtgtaccgagatggagagagtgttcgggttcccagtccactacacagatgtcagcaacatgtctagactggccagacagagactgctgggaagaagctggtccgtccctgtgatcagacacctgttcgcccctctgaaggagtacttcgcctgcgtgagcagcggcaacagcaacgccaacagccggggccccagcttctctagcggcctggtgccactgtccctgagagggagccacatgggccccatggagatctacaaaaccgtgagcgcctggaagcggcagcctgtgcgcgtgctgagcctgtttcggaatatcgataaagtcctgaaaagcctgggattcctggagagcggctctggctccggcggtggcaccctgaagtacgtggaggatgtgacaaacgtggtcagacgggatgtggagaagtggggccccttcgatctggtgtacggcagcacccaacccctgggcagctcttgtgaccggtgccctggctggtacatgtttcagttccaccggatcctgcagtacgccctgccgagacaggagtcccagcggccattcttttggattttcatggacaacttgctgctgaccgaggatgaccaggaaactaccactcggttcctgcagaccgaagccgtgaccctgcaggacgtgagaggccgggactaccagaacgccatgcgggtgtggtccaacatccctggactgaaaagcaagcacgcacctctgacccctaaagaagaggagtacctgcaggcccaggtgcggagcagaagcaagctggacgcccctaaggtggatctgctggtgaagaattgcctcctgcccctgagagagtacttcaagtatttcagccagaatagtctgcccctgggaggcagcggcggcggcgaccccgcccaggtgcccgtggccgccgacctgctgaccgaccacgaggagcagggctacgtgaccttcgaggacgtggccgtgtacttcagccaggaggagtggaggctgctggacgacgcccagaggctgctgtacaggaacgtgatgctggagaacttcaccctgctggccagcctgggcctggccagcagcaagacccacgagatcacccagctggagagctgggaggagcccttcatgggcggcccaagcagcggcgcccctcctcccagcggcggcagcccagccggctccccaacctctaccgaggagggcacctctgagtccgccacccccgagagcggccctggcacctccaccgagcccagcgagggcagcgcacccggcagccctgccggcagccccacctccacagaggagggaaccagcaccgagcccagcgaaggcagcgccccaggcaccagcaccgagcctagtgagcaggagattaaacggatcaacaagatcagaagaagacttgtgaaagacagcaacaccaagaaggccggcaagacaggccccatgaaaaccctgctggttagagtgatgacacccgatctgagagagcggctggaaaacctgagaaagaagcctgaaaatatcccccagcccatcagcaatacatctagagccaacctgaataagctgctgaccgattacaccgaaatgaagaaggcgatcctgcatgtgtactgggaagagttccagaaggaccctgtgggcctgatgagccgggtggcccagcctgccagcaagaagatcgatcagaacaagctgaaacctgagatggacgagaagggcaacctgaccaccgccggctttgcctgctctcagtgtggccagcccctgttcgtgtacaagctggagcaggtgtctgagaagggcaaggcttacaccaactacttcggacggtgcaatgtggccgagcacgaaaagctgatcctgctggcccagctgaagcccgagaaggatagcgacgaagccgtgacatatagcctgggaaagtttgggcagagggccctggatttctacagcattcatgtgaccaaggagtccacccaccccgtgaagcccctggcccagatcgccggaaacagatacgcctccggacctgtgggaaaggccctgagcgacgcatgtatgggcacaatcgcctccttcctgtctaagtaccaggacatcatcatcgaacaccagaaggtggtgaagggcaaccagaagagactggagagcctgcgggagctggccggcaaggaaaacctggaataccctagcgtgaccctgccacctcagcctcacaccaaggagggcgttgatgcctacaacgaagtgatcgcccgggtgcgaatgtgggtgaacctgaacctgtggcagaagctgaagctaagcagagatgatgccaagcctctgctgagactgaagggattcccttcctttcctctggtcgagagacaggccaacgaagtggactggtgggacatggtgtgtaacgtgaagaagctgatcaacgagaaaaaggaggatggcaaggtgttttggcagaatctggctggctacaagagacaggaagccctgagaccatacctgagcagcgaggaagatcggaagaagggaaagaaattcgctcggtaccagctgggcgacctgctgctgcacctggaaaagaagcacggcgaggactggggaaaggtgtacgacgaggcctgggagcggattgacaagaaagtggaaggcctgagcaagcacatcaagctggaagaggaacggagaagcgaggacgcccagagcaaggccgccctgaccgactggctgcgggctaaggccagcttcgtgatcgagggcctgaaggaggccgacaaggacgagttctgcagatgcgagctgaagctgcagaagtggtacggggacctgcggggaaagcccttcgccatcgaagccgagaacagcatcctggacatcagcggcttcagcaagcagtacaactgtgccttcatctggcagaaggacggcgtgaagaagctgaacctgtacctgatcatcaactacttcaagggcggcaagctgcggttcaagaagatcaaacctgaagccttcgaagccaacagattctacaccgtgatcaacaaaaagagcggcgagatcgtgcccatggaggtgaacttcaacttcgacgaccccaacctgatcatcctgcctctggcctttggcaagagacagggcagagaattcatctggaacgacctgctgtccctggaaaccggcagcctgaagctggccaacggaagagtgatcgagaagacactgtacaacagaagaacccggcaggatgagcctgccctgttcgtggccctgaccttcgagcggcgggaggtcctggactcctccaatatcaaaccaatgaacctgatcggcgtggcaagaggcgaaaacatccccgccgtgatcgccctgaccgaccccgagggctgcccactgagccggtttaaggatagcctgggaaacccaacccacatcctgagaatcggcgagagctataaggagaagcagcggaccatccaggccaagaaggaggtggagcagcggagagccggcggctacagccggaagtacgccagcaaagccaagaatctggcagacgatatggtgagaaacaccgctagagatctgctgtactacgccgtgacccaggatgccatgctgatcttcgccaacctgagccggggcttcggccggcagggcaagcggaccttcatggccgagagacagtacacacggatggaggactggctgaccgccaagctggcctacgagggcctgagcaagacctacctgtccaagacactggcccagtacacctccaagacatgcagcaactgtgggtttaccatcaccagcgccgactacgacagggtgctggagaagctgaagaagacagcaacaggctggatgaccacaattaacggcaaggagctgaaggtggagggccagattacctactacaacagatacaagagacagaacgtagtcaaggacctgtccgtcgagctggatagactgagcgaagaatctgtgaacaacgacatctcctcctggacaaagggcagaagcggagaagctctgagcctcctgaagaaaagattctcccatagacccgtgcaggagaagttcgtgtgcctgaactgcggcttcgagacacacgcagccgagcaagccgccctgaacatcgccagatcctggctgttcctgcggagccaggagtacaagaaataccagacaaacaagacaaccggcaacaccgataagagagccttcgtcgagacctggcagtccttttaccggaagaagcttaaggaggtgtggaaacctgccgtgcggtctggcggatctggcggaggctccaccagccccaagaaaaagagaaaagtctaagctgccttctgcggggcttgccttctggccatgcccttcttctctcccttgcacctgtacctcttggtctttgaataaagcctgagtaggaaggctagcaaaaaaaaaaaaaaaaaaaaaaaaaaaaaaaaaaaaaaaaaaaaaaaaaaaaaaaaaaaaaaaaaaaaaaaaaaaaaaaa

SEQ ID NO: 12757 - RNA, 5785 nt, synthetic construct
  source 1..5785: mol_type = other RNA
aggaaataagagagaaaagaagagtaagaagaaatataagagccaccatggcccctaagaagaagcgtaaagtgagccggatggaacgcctcgtctacgaggtgcggcagaagtgcagaaacatcgaggacatctgcatctcctgcggatctctgaacgtgaccctggagcacccactgttcatcggcggcatgtgccagaactgtaaaaactgttttctggagtgtgcctatcaatacgacgatgacggctaccagagctactgcaccatctgttgcggcggaagagaggtgctgatgtgtggaaataacaactgctgccggtgcttctgcgtggaatgcgtggacctgctggtgggccccggcgccgcccaggccgctattaaggaagatccttggaactgctacatgtgcggccacaagggcacatacggcctgctgagacggagagaggactggcctagcagactgcagatgttcttcgccaataaccacgaccaggagttcgacccccctaaggtgtaccctcccgtccccgccgagaagagaaagcccatccgggtcctgagcctgttcgatggcatcgccaccggtctgctggtgctgaaggacctgggcatccaggtggataggtacattgcctccgaggtgtgcgaggactccatcaccgtgggaatggtgcgtcatcagggcaagatcatgtacgtgggcgacgtgcggagcgtgacacagaagcatatccaggagtggggccctttcgacctggtgatcggcggcagcccttgcaatgacctgagcatcgtgaacccagcccggaagggcctgtacgagggaaccggcagactgttcttcgagttttacagactgctgcacgacgcccggcctaaggaaggcgacgaccggcccttcttttggctgttcgagaatgtggtggccatgggagtcagcgacaagcgggatattagccggttcctggagagcaaccccgtgatgatcgatgccaaggaagtgagcgccgcccaccgggccagatacttctggggcaatctgcctggcatgaacagacccctggccagcaccgtgaacgacaagctggagctgcaggagtgcctggagcacggccggatcgccaagttcagcaaggtgagaaccatcaccacccgaagcaacagcatcaaacaaggcaaggaccagcactttcctgtgttcatgaacgagaaggaggacatcctgtggtgtaccgagatggagagagtgttcgggttcccagtccactacacagatgtcagcaacatgtctagactggccagacagagactgctgggaagaagctggtccgtccctgtgatcagacacctgttcgcccctctgaaggagtacttcgcctgcgtgagcagcggcaacagcaacgccaacagccggggccccagcttctctagcggcctggtgccactgtccctgagagggagccacatgggccccatggagatctacaaaaccgtgagcgcctggaagcggcagcctgtgcgcgtgctgagcctgtttcggaatatcgataaagtcctgaaaagcctgggattcctggagagcggctctggctccggcggtggcaccctgaagtacgtggaggatgtgacaaacgtggtcagacgggatgtggagaagtggggccccttcgatctggtgtacggcagcacccaacccctgggcagctcttgtgaccggtgccctggctggtacatgtttcagttccaccggatcctgcagtacgccctgccgagacaggagtcccagcggccattcttttggattttcatggacaacttgctgctgaccgaggatgaccaggaaactaccactcggttcctgcagaccgaagccgtgaccctgcaggacgtgagaggccgggactaccagaacgccatgcgggtgtggtccaacatccctggactgaaaagcaagcacgcacctctgacccctaaagaagaggagtacctgcaggcccaggtgcggagcagaagcaagctggacgcccctaaggtggatctgctggtgaagaattgcctcctgcccctgagagagtacttcaagtatttcagccagaatagtctgcccctgggaggcagcggcggcggccacagggtgggcctgatcaggagctacaacagcaagaccatgacctgcttccaggagctggtgaccttcagggacgtggccatcgacttcagcaggcaggagtgggagtacctggaccccaaccagagggacctgtacagggacgtgatgctggagaactacaggaacctggtgagcctgggcggccacagcatcagcaagcccgtggtggtggacctgctggagaggggcaaggagccctggggcggcccaagcagcggcgcccctcctcccagcggcggcagcccagccggctccccaacctctaccgaggagggcacctctgagtccgccacccccgagagcggccctggcacctccaccgagcccagcgagggcagcgcacccggcagccctgccggcagccccacctccacagaggagggaaccagcaccgagcccagcgaaggcagcgccccaggcaccagcaccgagcctagtgagcaggagattaaacggatcaacaagatcagaagaagacttgtgaaagacagcaacaccaagaaggccggcaagacaggccccatgaaaaccctgctggttagagtgatgacacccgatctgagagagcggctggaaaacctgagaaagaagcctgaaaatatcccccagcccatcagcaatacatctagagccaacctgaataagctgctgaccgattacaccgaaatgaagaaggcgatcctgcatgtgtactgggaagagttccagaaggaccctgtgggcctgatgagccgggtggcccagcctgccagcaagaagatcgatcagaacaagctgaaacctgagatggacgagaagggcaacctgaccaccgccggctttgcctgctctcagtgtggccagcccctgttcgtgtacaagctggagcaggtgtctgagaagggcaaggcttacaccaactacttcggacggtgcaatgtggccgagcacgaaaagctgatcctgctggcccagctgaagcccgagaaggatagcgacgaagccgtgacatatagcctgggaaagtttgggcagagggccctggatttctacagcattcatgtgaccaaggagtccacccaccccgtgaagcccctggcccagatcgccggaaacagatacgcctccggacctgtgggaaaggccctgagcgacgcatgtatgggcacaatcgcctccttcctgtctaagtaccaggacatcatcatcgaacaccagaaggtggtgaagggcaaccagaagagactggagagcctgcgggagctggccggcaaggaaaacctggaataccctagcgtgaccctgccacctcagcctcacaccaaggagggcgttgatgcctacaacgaagtgatcgcccgggtgcgaatgtgggtgaacctgaacctgtggcagaagctgaagctaagcagagatgatgccaagcctctgctgagactgaagggattcccttcctttcctctggtcgagagacaggccaacgaagtggactggtgggacatggtgtgtaacgtgaagaagctgatcaacgagaaaaaggaggatggcaaggtgttttggcagaatctggctggctacaagagacaggaagccctgagaccatacctgagcagcgaggaagatcggaagaagggaaagaaattcgctcggtaccagctgggcgacctgctgctgcacctggaaaagaagcacggcgaggactggggaaaggtgtacgacgaggcctgggagcggattgacaagaaagtggaaggcctgagcaagcacatcaagctggaagaggaacggagaagcgaggacgcccagagcaaggccgccctgaccgactggctgcgggctaaggccagcttcgtgatcgagggcctgaaggaggccgacaaggacgagttctgcagatgcgagctgaagctgcagaagtggtacggggacctgcggggaaagcccttcgccatcgaagccgagaacagcatcctggacatcagcggcttcagcaagcagtacaactgtgccttcatctggcagaaggacggcgtgaagaagctgaacctgtacctgatcatcaactacttcaagggcggcaagctgcggttcaagaagatcaaacctgaagccttcgaagccaacagattctacaccgtgatcaacaaaaagagcggcgagatcgtgcccatggaggtgaacttcaacttcgacgaccccaacctgatcatcctgcctctggcctttggcaagagacagggcagagaattcatctggaacgacctgctgtccctggaaaccggcagcctgaagctggccaacggaagagtgatcgagaagacactgtacaacagaagaacccggcaggatgagcctgccctgttcgtggccctgaccttcgagcggcgggaggtcctggactcctccaatatcaaaccaatgaacctgatcggcgtggcaagaggcgaaaacatccccgccgtgatcgccctgaccgaccccgagggctgcccactgagccggtttaaggatagcctgggaaacccaacccacatcctgagaatcggcgagagctataaggagaagcagcggaccatccaggccaagaaggaggtggagcagcggagagccggcggctacagccggaagtacgccagcaaagccaagaatctggcagacgatatggtgagaaacaccgctagagatctgctgtactacgccgtgacccaggatgccatgctgatcttcgccaacctgagccggggcttcggccggcagggcaagcggaccttcatggccgagagacagtacacacggatggaggactggctgaccgccaagctggcctacgagggcctgagcaagacctacctgtccaagacactggcccagtacacctccaagacatgcagcaactgtgggtttaccatcaccagcgccgactacgacagggtgctggagaagctgaagaagacagcaacaggctggatgaccacaattaacggcaaggagctgaaggtggagggccagattacctactacaacagatacaagagacagaacgtagtcaaggacctgtccgtcgagctggatagactgagcgaagaatctgtgaacaacgacatctcctcctggacaaagggcagaagcggagaagctctgagcctcctgaagaaaagattctcccatagacccgtgcaggagaagttcgtgtgcctgaactgcggcttcgagacacacgcagccgagcaagccgccctgaacatcgccagatcctggctgttcctgcggagccaggagtacaagaaataccagacaaacaagacaaccggcaacaccgataagagagccttcgtcgagacctggcagtccttttaccggaagaagcttaaggaggtgtggaaacctgccgtgcggtctggcggatctggcggaggctccaccagccccaagaaaaagagaaaagtctaagctgccttctgcggggcttgccttctggccatgcccttcttctctcccttgcacctgtacctcttggtctttgaataaagcctgagtaggaaggctagcaaaaaaaaaaaaaaaaaaaaaaaaaaaaaaaaaaaaaaaaaaaaaaaaaaaaaaaaaaaaaaaaaaaaaaaaaaaaaaaa

SEQ ID NO: 12758 - RNA, 5785 nt, synthetic construct
  source 1..5785: mol_type = other RNA
aggaaataagagagaaaagaagagtaagaagaaatataagagccaccatggcccctaagaagaagcgtaaagtgagccggatggaacgcctcgtctacgaggtgcggcagaagtgcagaaacatcgaggacatctgcatctcctgcggatctctgaacgtgaccctggagcacccactgttcatcggcggcatgtgccagaactgtaaaaactgttttctggagtgtgcctatcaatacgacgatgacggctaccagagctactgcaccatctgttgcggcggaagagaggtgctgatgtgtggaaataacaactgctgccggtgcttctgcgtggaatgcgtggacctgctggtgggccccggcgccgcccaggccgctattaaggaagatccttggaactgctacatgtgcggccacaagggcacatacggcctgctgagacggagagaggactggcctagcagactgcagatgttcttcgccaataaccacgaccaggagttcgacccccctaaggtgtaccctcccgtccccgccgagaagagaaagcccatccgggtcctgagcctgttcgatggcatcgccaccggtctgctggtgctgaaggacctgggcatccaggtggataggtacattgcctccgaggtgtgcgaggactccatcaccgtgggaatggtgcgtcatcagggcaagatcatgtacgtgggcgacgtgcggagcgtgacacagaagcatatccaggagtggggccctttcgacctggtgatcggcggcagcccttgcaatgacctgagcatcgtgaacccagcccggaagggcctgtacgagggaaccggcagactgttcttcgagttttacagactgctgcacgacgcccggcctaaggaaggcgacgaccggcccttcttttggctgttcgagaatgtggtggccatgggagtcagcgacaagcgggatattagccggttcctggagagcaaccccgtgatgatcgatgccaaggaagtgagcgccgcccaccgggccagatacttctggggcaatctgcctggcatgaacagacccctggccagcaccgtgaacgacaagctggagctgcaggagtgcctggagcacggccggatcgccaagttcagcaaggtgagaaccatcaccacccgaagcaacagcatcaaacaaggcaaggaccagcactttcctgtgttcatgaacgagaaggaggacatcctgtggtgtaccgagatggagagagtgttcgggttcccagtccactacacagatgtcagcaacatgtctagactggccagacagagactgctgggaagaagctggtccgtccctgtgatcagacacctgttcgcccctctgaaggagtacttcgcctgcgtgagcagcggcaacagcaacgccaacagccggggccccagcttctctagcggcctggtgccactgtccctgagagggagccacatgggccccatggagatctacaaaaccgtgagcgcctggaagcggcagcctgtgcgcgtgctgagcctgtttcggaatatcgataaagtcctgaaaagcctgggattcctggagagcggctctggctccggcggtggcaccctgaagtacgtggaggatgtgacaaacgtggtcagacgggatgtggagaagtggggccccttcgatctggtgtacggcagcacccaacccctgggcagctcttgtgaccggtgccctggctggtacatgtttcagttccaccggatcctgcagtacgccctgccgagacaggagtcccagcggccattcttttggattttcatggacaacttgctgctgaccgaggatgaccaggaaactaccactcggttcctgcagaccgaagccgtgaccctgcaggacgtgagaggccgggactaccagaacgccatgcgggtgtggtccaacatccctggactgaaaagcaagcacgcacctctgacccctaaagaagaggagtacctgcaggcccaggtgcggagcagaagcaagctggacgcccctaaggtggatctgctggtgaagaattgcctcctgcccctgagagagtacttcaagtatttcagccagaatagtctgcccctgggaggcagcggcggcggcgtgcaggccagcctgagcttcgaggacgtggccgtgaggttcacctgggaggagtggcagctgctggaccccagccagaaggacctgtacaggaacgtgatgctggagaactactgcaacctggtgagcgtgggctaccagacccccaagcccgacagcctgttccagctggagcagggcgagcccccctggagggtggagggcgccggccagagccagacctgccccgaggagatctgggagggcggcccaagcagcggcgcccctcctcccagcggcggcagcccagccggctccccaacctctaccgaggagggcacctctgagtccgccacccccgagagcggccctggcacctccaccgagcccagcgagggcagcgcacccggcagccctgccggcagccccacctccacagaggagggaaccagcaccgagcccagcgaaggcagcgccccaggcaccagcaccgagcctagtgagcaggagattaaacggatcaacaagatcagaagaagacttgtgaaagacagcaacaccaagaaggccggcaagacaggccccatgaaaaccctgctggttagagtgatgacacccgatctgagagagcggctggaaaacctgagaaagaagcctgaaaatatcccccagcccatcagcaatacatctagagccaacctgaataagctgctgaccgattacaccgaaatgaagaaggcgatcctgcatgtgtactgggaagagttccagaaggaccctgtgggcctgatgagccgggtggcccagcctgccagcaagaagatcgatcagaacaagctgaaacctgagatggacgagaagggcaacctgaccaccgccggctttgcctgctctcagtgtggccagcccctgttcgtgtacaagctggagcaggtgtctgagaagggcaaggcttacaccaactacttcggacggtgcaatgtggccgagcacgaaaagctgatcctgctggcccagctgaagcccgagaaggatagcgacgaagccgtgacatatagcctgggaaagtttgggcagagggccctggatttctacagcattcatgtgaccaaggagtccacccaccccgtgaagcccctggcccagatcgccggaaacagatacgcctccggacctgtgggaaaggccctgagcgacgcatgtatgggcacaatcgcctccttcctgtctaagtaccaggacatcatcatcgaacaccagaaggtggtgaagggcaaccagaagagactggagagcctgcgggagctggccggcaaggaaaacctggaataccctagcgtgaccctgccacctcagcctcacaccaaggagggcgttgatgcctacaacgaagtgatcgcccgggtgcgaatgtgggtgaacctgaacctgtggcagaagctgaagctaagcagagatgatgccaagcctctgctgagactgaagggattcccttcctttcctctggtcgagagacaggccaacgaagtggactggtgggacatggtgtgtaacgtgaagaagctgatcaacgagaaaaaggaggatggcaaggtgttttggcagaatctggctggctacaagagacaggaagccctgagaccatacctgagcagcgaggaagatcggaagaagggaaagaaattcgctcggtaccagctgggcgacctgctgctgcacctggaaaagaagcacggcgaggactggggaaaggtgtacgacgaggcctgggagcggattgacaagaaagtggaaggcctgagcaagcacatcaagctggaagaggaacggagaagcgaggacgcccagagcaaggccgccctgaccgactggctgcgggctaaggccagcttcgtgatcgagggcctgaaggaggccgacaaggacgagttctgcagatgcgagctgaagctgcagaagtggtacggggacctgcggggaaagcccttcgccatcgaagccgagaacagcatcctggacatcagcggcttcagcaagcagtacaactgtgccttcatctggcagaaggacggcgtgaagaagctgaacctgtacctgatcatcaactacttcaagggcggcaagctgcggttcaagaagatcaaacctgaagccttcgaagccaacagattctacaccgtgatcaacaaaaagagcggcgagatcgtgcccatggaggtgaacttcaacttcgacgaccccaacctgatcatcctgcctctggcctttggcaagagacagggcagagaattcatctggaacgacctgctgtccctggaaaccggcagcctgaagctggccaacggaagagtgatcgagaagacactgtacaacagaagaacccggcaggatgagcctgccctgttcgtggccctgaccttcgagcggcgggaggtcctggactcctccaatatcaaaccaatgaacctgatcggcgtggcaagaggcgaaaacatccccgccgtgatcgccctgaccgaccccgagggctgcccactgagccggtttaaggatagcctgggaaacccaacccacatcctgagaatcggcgagagctataaggagaagcagcggaccatccaggccaagaaggaggtggagcagcggagagccggcggctacagccggaagtacgccagcaaagccaagaatctggcagacgatatggtgagaaacaccgctagagatctgctgtactacgccgtgacccaggatgccatgctgatcttcgccaacctgagccggggcttcggccggcagggcaagcggaccttcatggccgagagacagtacacacggatggaggactggctgaccgccaagctggcctacgagggcctgagcaagacctacctgtccaagacactggcccagtacacctccaagacatgcagcaactgtgggtttaccatcaccagcgccgactacgacagggtgctggagaagctgaagaagacagcaacaggctggatgaccacaattaacggcaaggagctgaaggtggagggccagattacctactacaacagatacaagagacagaacgtagtcaaggacctgtccgtcgagctggatagactgagcgaagaatctgtgaacaacgacatctcctcctggacaaagggcagaagcggagaagctctgagcctcctgaagaaaagattctcccatagacccgtgcaggagaagttcgtgtgcctgaactgcggcttcgagacacacgcagccgagcaagccgccctgaacatcgccagatcctggctgttcctgcggagccaggagtacaagaaataccagacaaacaagacaaccggcaacaccgataagagagccttcgtcgagacctggcagtccttttaccggaagaagcttaaggaggtgtggaaacctgccgtgcggtctggcggatctggcggaggctccaccagccccaagaaaaagagaaaagtctaagctgccttctgcggggcttgccttctggccatgcccttcttctctcccttgcacctgtacctcttggtctttgaataaagcctgagtaggaaggctagcaaaaaaaaaaaaaaaaaaaaaaaaaaaaaaaaaaaaaaaaaaaaaaaaaaaaaaaaaaaaaaaaaaaaaaaaaaaaaaaa

SEQ ID NO: 12759 - RNA, 5785 nt, synthetic construct
  source 1..5785: mol_type = other RNA
aggaaataagagagaaaagaagagtaagaagaaatataagagccaccatggcccctaagaagaagcgtaaagtgagccggatggaacgcctcgtctacgaggtgcggcagaagtgcagaaacatcgaggacatctgcatctcctgcggatctctgaacgtgaccctggagcacccactgttcatcggcggcatgtgccagaactgtaaaaactgttttctggagtgtgcctatcaatacgacgatgacggctaccagagctactgcaccatctgttgcggcggaagagaggtgctgatgtgtggaaataacaactgctgccggtgcttctgcgtggaatgcgtggacctgctggtgggccccggcgccgcccaggccgctattaaggaagatccttggaactgctacatgtgcggccacaagggcacatacggcctgctgagacggagagaggactggcctagcagactgcagatgttcttcgccaataaccacgaccaggagttcgacccccctaaggtgtaccctcccgtccccgccgagaagagaaagcccatccgggtcctgagcctgttcgatggcatcgccaccggtctgctggtgctgaaggacctgggcatccaggtggataggtacattgcctccgaggtgtgcgaggactccatcaccgtgggaatggtgcgtcatcagggcaagatcatgtacgtgggcgacgtgcggagcgtgacacagaagcatatccaggagtggggccctttcgacctggtgatcggcggcagcccttgcaatgacctgagcatcgtgaacccagcccggaagggcctgtacgagggaaccggcagactgttcttcgagttttacagactgctgcacgacgcccggcctaaggaaggcgacgaccggcccttcttttggctgttcgagaatgtggtggccatgggagtcagcgacaagcgggatattagccggttcctggagagcaaccccgtgatgatcgatgccaaggaagtgagcgccgcccaccgggccagatacttctggggcaatctgcctggcatgaacagacccctggccagcaccgtgaacgacaagctggagctgcaggagtgcctggagcacggccggatcgccaagttcagcaaggtgagaaccatcaccacccgaagcaacagcatcaaacaaggcaaggaccagcactttcctgtgttcatgaacgagaaggaggacatcctgtggtgtaccgagatggagagagtgttcgggttcccagtccactacacagatgtcagcaacatgtctagactggccagacagagactgctgggaagaagctggtccgtccctgtgatcagacacctgttcgcccctctgaaggagtacttcgcctgcgtgagcagcggcaacagcaacgccaacagccggggccccagcttctctagcggcctggtgccactgtccctgagagggagccacatgggccccatggagatctacaaaaccgtgagcgcctggaagcggcagcctgtgcgcgtgctgagcctgtttcggaatatcgataaagtcctgaaaagcctgggattcctggagagcggctctggctccggcggtggcaccctgaagtacgtggaggatgtgacaaacgtggtcagacgggatgtggagaagtggggccccttcgatctggtgtacggcagcacccaacccctgggcagctcttgtgaccggtgccctggctggtacatgtttcagttccaccggatcctgcagtacgccctgccgagacaggagtcccagcggccattcttttggattttcatggacaacttgctgctgaccgaggatgaccaggaaactaccactcggttcctgcagaccgaagccgtgaccctgcaggacgtgagaggccgggactaccagaacgccatgcgggtgtggtccaacatccctggactgaaaagcaagcacgcacctctgacccctaaagaagaggagtacctgcaggcccaggtgcggagcagaagcaagctggacgcccctaaggtggatctgctggtgaagaattgcctcctgcccctgagagagtacttcaagtatttcagccagaatagtctgcccctgggaggcagcggcggcggcctgctgcacggctgctgcagcctggagacccacagcatcagggacaagaacgccgtgacctacggcgacgtgcacgtgaacttcacccaggaggagtgggccctgctggaccccagccagaagaagctgtacaaggacgtgatgctggagacctacaggaacctgaacgccatcggcttcaactgggacgacaagaacaccgaggagcactgccccagcaccaggaggtggaggaggtaccccggcggcccaagcagcggcgcccctcctcccagcggcggcagcccagccggctccccaacctctaccgaggagggcacctctgagtccgccacccccgagagcggccctggcacctccaccgagcccagcgagggcagcgcacccggcagccctgccggcagccccacctccacagaggagggaaccagcaccgagcccagcgaaggcagcgccccaggcaccagcaccgagcctagtgagcaggagattaaacggatcaacaagatcagaagaagacttgtgaaagacagcaacaccaagaaggccggcaagacaggccccatgaaaaccctgctggttagagtgatgacacccgatctgagagagcggctggaaaacctgagaaagaagcctgaaaatatcccccagcccatcagcaatacatctagagccaacctgaataagctgctgaccgattacaccgaaatgaagaaggcgatcctgcatgtgtactgggaagagttccagaaggaccctgtgggcctgatgagccgggtggcccagcctgccagcaagaagatcgatcagaacaagctgaaacctgagatggacgagaagggcaacctgaccaccgccggctttgcctgctctcagtgtggccagcccctgttcgtgtacaagctggagcaggtgtctgagaagggcaaggcttacaccaactacttcggacggtgcaatgtggccgagcacgaaaagctgatcctgctggcccagctgaagcccgagaaggatagcgacgaagccgtgacatatagcctgggaaagtttgggcagagggccctggatttctacagcattcatgtgaccaaggagtccacccaccccgtgaagcccctggcccagatcgccggaaacagatacgcctccggacctgtgggaaaggccctgagcgacgcatgtatgggcacaatcgcctccttcctgtctaagtaccaggacatcatcatcgaacaccagaaggtggtgaagggcaaccagaagagactggagagcctgcgggagctggccggcaaggaaaacctggaataccctagcgtgaccctgccacctcagcctcacaccaaggagggcgttgatgcctacaacgaagtgatcgcccgggtgcgaatgtgggtgaacctgaacctgtggcagaagctgaagctaagcagagatgatgccaagcctctgctgagactgaagggattcccttcctttcctctggtcgagagacaggccaacgaagtggactggtgggacatggtgtgtaacgtgaagaagctgatcaacgagaaaaaggaggatggcaaggtgttttggcagaatctggctggctacaagagacaggaagccctgagaccatacctgagcagcgaggaagatcggaagaagggaaagaaattcgctcggtaccagctgggcgacctgctgctgcacctggaaaagaagcacggcgaggactggggaaaggtgtacgacgaggcctgggagcggattgacaagaaagtggaaggcctgagcaagcacatcaagctggaagaggaacggagaagcgaggacgcccagagcaaggccgccctgaccgactggctgcgggctaaggccagcttcgtgatcgagggcctgaaggaggccgacaaggacgagttctgcagatgcgagctgaagctgcagaagtggtacggggacctgcggggaaagcccttcgccatcgaagccgagaacagcatcctggacatcagcggcttcagcaagcagtacaactgtgccttcatctggcagaaggacggcgtgaagaagctgaacctgtacctgatcatcaactacttcaagggcggcaagctgcggttcaagaagatcaaacctgaagccttcgaagccaacagattctacaccgtgatcaacaaaaagagcggcgagatcgtgcccatggaggtgaacttcaacttcgacgaccccaacctgatcatcctgcctctggcctttggcaagagacagggcagagaattcatctggaacgacctgctgtccctggaaaccggcagcctgaagctggccaacggaagagtgatcgagaagacactgtacaacagaagaacccggcaggatgagcctgccctgttcgtggccctgaccttcgagcggcgggaggtcctggactcctccaatatcaaaccaatgaacctgatcggcgtggcaagaggcgaaaacatccccgccgtgatcgccctgaccgaccccgagggctgcccactgagccggtttaaggatagcctgggaaacccaacccacatcctgagaatcggcgagagctataaggagaagcagcggaccatccaggccaagaaggaggtggagcagcggagagccggcggctacagccggaagtacgccagcaaagccaagaatctggcagacgatatggtgagaaacaccgctagagatctgctgtactacgccgtgacccaggatgccatgctgatcttcgccaacctgagccggggcttcggccggcagggcaagcggaccttcatggccgagagacagtacacacggatggaggactggctgaccgccaagctggcctacgagggcctgagcaagacctacctgtccaagacactggcccagtacacctccaagacatgcagcaactgtgggtttaccatcaccagcgccgactacgacagggtgctggagaagctgaagaagacagcaacaggctggatgaccacaattaacggcaaggagctgaaggtggagggccagattacctactacaacagatacaagagacagaacgtagtcaaggacctgtccgtcgagctggatagactgagcgaagaatctgtgaacaacgacatctcctcctggacaaagggcagaagcggagaagctctgagcctcctgaagaaaagattctcccatagacccgtgcaggagaagttcgtgtgcctgaactgcggcttcgagacacacgcagccgagcaagccgccctgaacatcgccagatcctggctgttcctgcggagccaggagtacaagaaataccagacaaacaagacaaccggcaacaccgataagagagccttcgtcgagacctggcagtccttttaccggaagaagcttaaggaggtgtggaaacctgccgtgcggtctggcggatctggcggaggctccaccagccccaagaaaaagagaaaagtctaagctgccttctgcggggcttgccttctggccatgcccttcttctctcccttgcacctgtacctcttggtctttgaataaagcctgagtaggaaggctagcaaaaaaaaaaaaaaaaaaaaaaaaaaaaaaaaaaaaaaaaaaaaaaaaaaaaaaaaaaaaaaaaaaaaaaaaaaaaaaaa

SEQ ID NO: 12760 - RNA, 5785 nt, synthetic construct
  source 1..5785: mol_type = other RNA
aggaaataagagagaaaagaagagtaagaagaaatataagagccaccatggcccctaagaagaagcgtaaagtgagccggatggaacgcctcgtctacgaggtgcggcagaagtgcagaaacatcgaggacatctgcatctcctgcggatctctgaacgtgaccctggagcacccactgttcatcggcggcatgtgccagaactgtaaaaactgttttctggagtgtgcctatcaatacgacgatgacggctaccagagctactgcaccatctgttgcggcggaagagaggtgctgatgtgtggaaataacaactgctgccggtgcttctgcgtggaatgcgtggacctgctggtgggccccggcgccgcccaggccgctattaaggaagatccttggaactgctacatgtgcggccacaagggcacatacggcctgctgagacggagagaggactggcctagcagactgcagatgttcttcgccaataaccacgaccaggagttcgacccccctaaggtgtaccctcccgtccccgccgagaagagaaagcccatccgggtcctgagcctgttcgatggcatcgccaccggtctgctggtgctgaaggacctgggcatccaggtggataggtacattgcctccgaggtgtgcgaggactccatcaccgtgggaatggtgcgtcatcagggcaagatcatgtacgtgggcgacgtgcggagcgtgacacagaagcatatccaggagtggggccctttcgacctggtgatcggcggcagcccttgcaatgacctgagcatcgtgaacccagcccggaagggcctgtacgagggaaccggcagactgttcttcgagttttacagactgctgcacgacgcccggcctaaggaaggcgacgaccggcccttcttttggctgttcgagaatgtggtggccatgggagtcagcgacaagcgggatattagccggttcctggagagcaaccccgtgatgatcgatgccaaggaagtgagcgccgcccaccgggccagatacttctggggcaatctgcctggcatgaacagacccctggccagcaccgtgaacgacaagctggagctgcaggagtgcctggagcacggccggatcgccaagttcagcaaggtgagaaccatcaccacccgaagcaacagcatcaaacaaggcaaggaccagcactttcctgtgttcatgaacgagaaggaggacatcctgtggtgtaccgagatggagagagtgttcgggttcccagtccactacacagatgtcagcaacatgtctagactggccagacagagactgctgggaagaagctggtccgtccctgtgatcagacacctgttcgcccctctgaaggagtacttcgcctgcgtgagcagcggcaacagcaacgccaacagccggggccccagcttctctagcggcctggtgccactgtccctgagagggagccacatgggccccatggagatctacaaaaccgtgagcgcctggaagcggcagcctgtgcgcgtgctgagcctgtttcggaatatcgataaagtcctgaaaagcctgggattcctggagagcggctctggctccggcggtggcaccctgaagtacgtggaggatgtgacaaacgtggtcagacgggatgtggagaagtggggccccttcgatctggtgtacggcagcacccaacccctgggcagctcttgtgaccggtgccctggctggtacatgtttcagttccaccggatcctgcagtacgccctgccgagacaggagtcccagcggccattcttttggattttcatggacaacttgctgctgaccgaggatgaccaggaaactaccactcggttcctgcagaccgaagccgtgaccctgcaggacgtgagaggccgggactaccagaacgccatgcgggtgtggtccaacatccctggactgaaaagcaagcacgcacctctgacccctaaagaagaggagtacctgcaggcccaggtgcggagcagaagcaagctggacgcccctaaggtggatctgctggtgaagaattgcctcctgcccctgagagagtacttcaagtatttcagccagaatagtctgcccctgggaggcagcggcggcggcatgggcctgctgaccttcagggacgtggccatcgagttcagcctggaggagtggcagtgcctggacaccgcccagaagaacctgtacaggaacgtgatgctggagaactacaggaacctggccttcctgggcatcgccgtgagcaagcccgacctgatcatctgcctggagaaggagaaggagccctggaacatgaagaggcacgagatggtggacgagccccccgacatctgcccccacttcggcggcccaagcagcggcgcccctcctcccagcggcggcagcccagccggctccccaacctctaccgaggagggcacctctgagtccgccacccccgagagcggccctggcacctccaccgagcccagcgagggcagcgcacccggcagccctgccggcagccccacctccacagaggagggaaccagcaccgagcccagcgaaggcagcgccccaggcaccagcaccgagcctagtgagcaggagattaaacggatcaacaagatcagaagaagacttgtgaaagacagcaacaccaagaaggccggcaagacaggccccatgaaaaccctgctggttagagtgatgacacccgatctgagagagcggctggaaaacctgagaaagaagcctgaaaatatcccccagcccatcagcaatacatctagagccaacctgaataagctgctgaccgattacaccgaaatgaagaaggcgatcctgcatgtgtactgggaagagttccagaaggaccctgtgggcctgatgagccgggtggcccagcctgccagcaagaagatcgatcagaacaagctgaaacctgagatggacgagaagggcaacctgaccaccgccggctttgcctgctctcagtgtggccagcccctgttcgtgtacaagctggagcaggtgtctgagaagggcaaggcttacaccaactacttcggacggtgcaatgtggccgagcacgaaaagctgatcctgctggcccagctgaagcccgagaaggatagcgacgaagccgtgacatatagcctgggaaagtttgggcagagggccctggatttctacagcattcatgtgaccaaggagtccacccaccccgtgaagcccctggcccagatcgccggaaacagatacgcctccggacctgtgggaaaggccctgagcgacgcatgtatgggcacaatcgcctccttcctgtctaagtaccaggacatcatcatcgaacaccagaaggtggtgaagggcaaccagaagagactggagagcctgcgggagctggccggcaaggaaaacctggaataccctagcgtgaccctgccacctcagcctcacaccaaggagggcgttgatgcctacaacgaagtgatcgcccgggtgcgaatgtgggtgaacctgaacctgtggcagaagctgaagctaagcagagatgatgccaagcctctgctgagactgaagggattcccttcctttcctctggtcgagagacaggccaacgaagtggactggtgggacatggtgtgtaacgtgaagaagctgatcaacgagaaaaaggaggatggcaaggtgttttggcagaatctggctggctacaagagacaggaagccctgagaccatacctgagcagcgaggaagatcggaagaagggaaagaaattcgctcggtaccagctgggcgacctgctgctgcacctggaaaagaagcacggcgaggactggggaaaggtgtacgacgaggcctgggagcggattgacaagaaagtggaaggcctgagcaagcacatcaagctggaagaggaacggagaagcgaggacgcccagagcaaggccgccctgaccgactggctgcgggctaaggccagcttcgtgatcgagggcctgaaggaggccgacaaggacgagttctgcagatgcgagctgaagctgcagaagtggtacggggacctgcggggaaagcccttcgccatcgaagccgagaacagcatcctggacatcagcggcttcagcaagcagtacaactgtgccttcatctggcagaaggacggcgtgaagaagctgaacctgtacctgatcatcaactacttcaagggcggcaagctgcggttcaagaagatcaaacctgaagccttcgaagccaacagattctacaccgtgatcaacaaaaagagcggcgagatcgtgcccatggaggtgaacttcaacttcgacgaccccaacctgatcatcctgcctctggcctttggcaagagacagggcagagaattcatctggaacgacctgctgtccctggaaaccggcagcctgaagctggccaacggaagagtgatcgagaagacactgtacaacagaagaacccggcaggatgagcctgccctgttcgtggccctgaccttcgagcggcgggaggtcctggactcctccaatatcaaaccaatgaacctgatcggcgtggcaagaggcgaaaacatccccgccgtgatcgccctgaccgaccccgagggctgcccactgagccggtttaaggatagcctgggaaacccaacccacatcctgagaatcggcgagagctataaggagaagcagcggaccatccaggccaagaaggaggtggagcagcggagagccggcggctacagccggaagtacgccagcaaagccaagaatctggcagacgatatggtgagaaacaccgctagagatctgctgtactacgccgtgacccaggatgccatgctgatcttcgccaacctgagccggggcttcggccggcagggcaagcggaccttcatggccgagagacagtacacacggatggaggactggctgaccgccaagctggcctacgagggcctgagcaagacctacctgtccaagacactggcccagtacacctccaagacatgcagcaactgtgggtttaccatcaccagcgccgactacgacagggtgctggagaagctgaagaagacagcaacaggctggatgaccacaattaacggcaaggagctgaaggtggagggccagattacctactacaacagatacaagagacagaacgtagtcaaggacctgtccgtcgagctggatagactgagcgaagaatctgtgaacaacgacatctcctcctggacaaagggcagaagcggagaagctctgagcctcctgaagaaaagattctcccatagacccgtgcaggagaagttcgtgtgcctgaactgcggcttcgagacacacgcagccgagcaagccgccctgaacatcgccagatcctggctgttcctgcggagccaggagtacaagaaataccagacaaacaagacaaccggcaacaccgataagagagccttcgtcgagacctggcagtccttttaccggaagaagcttaaggaggtgtggaaacctgccgtgcggtctggcggatctggcggaggctccaccagccccaagaaaaagagaaaagtctaagctgccttctgcggggcttgccttctggccatgcccttcttctctcccttgcacctgtacctcttggtctttgaataaagcctgagtaggaaggctagcaaaaaaaaaaaaaaaaaaaaaaaaaaaaaaaaaaaaaaaaaaaaaaaaaaaaaaaaaaaaaaaaaaaaaaaaaaaaaaaa

SEQ ID NO: 12761 - RNA, 5794 nt, synthetic construct
  source 1..5794: mol_type = other RNA
aggaaataagagagaaaagaagagtaagaagaaatataagagccaccatggcccctaagaagaagcgtaaagtgagccggatggaacgcctcgtctacgaggtgcggcagaagtgcagaaacatcgaggacatctgcatctcctgcggatctctgaacgtgaccctggagcacccactgttcatcggcggcatgtgccagaactgtaaaaactgttttctggagtgtgcctatcaatacgacgatgacggctaccagagctactgcaccatctgttgcggcggaagagaggtgctgatgtgtggaaataacaactgctgccggtgcttctgcgtggaatgcgtggacctgctggtgggccccggcgccgcccaggccgctattaaggaagatccttggaactgctacatgtgcggccacaagggcacatacggcctgctgagacggagagaggactggcctagcagactgcagatgttcttcgccaataaccacgaccaggagttcgacccccctaaggtgtaccctcccgtccccgccgagaagagaaagcccatccgggtcctgagcctgttcgatggcatcgccaccggtctgctggtgctgaaggacctgggcatccaggtggataggtacattgcctccgaggtgtgcgaggactccatcaccgtgggaatggtgcgtcatcagggcaagatcatgtacgtgggcgacgtgcggagcgtgacacagaagcatatccaggagtggggccctttcgacctggtgatcggcggcagcccttgcaatgacctgagcatcgtgaacccagcccggaagggcctgtacgagggaaccggcagactgttcttcgagttttacagactgctgcacgacgcccggcctaaggaaggcgacgaccggcccttcttttggctgttcgagaatgtggtggccatgggagtcagcgacaagcgggatattagccggttcctggagagcaaccccgtgatgatcgatgccaaggaagtgagcgccgcccaccgggccagatacttctggggcaatctgcctggcatgaacagacccctggccagcaccgtgaacgacaagctggagctgcaggagtgcctggagcacggccggatcgccaagttcagcaaggtgagaaccatcaccacccgaagcaacagcatcaaacaaggcaaggaccagcactttcctgtgttcatgaacgagaaggaggacatcctgtggtgtaccgagatggagagagtgttcgggttcccagtccactacacagatgtcagcaacatgtctagactggccagacagagactgctgggaagaagctggtccgtccctgtgatcagacacctgttcgcccctctgaaggagtacttcgcctgcgtgagcagcggcaacagcaacgccaacagccggggccccagcttctctagcggcctggtgccactgtccctgagagggagccacatgggccccatggagatctacaaaaccgtgagcgcctggaagcggcagcctgtgcgcgtgctgagcctgtttcggaatatcgataaagtcctgaaaagcctgggattcctggagagcggctctggctccggcggtggcaccctgaagtacgtggaggatgtgacaaacgtggtcagacgggatgtggagaagtggggccccttcgatctggtgtacggcagcacccaacccctgggcagctcttgtgaccggtgccctggctggtacatgtttcagttccaccggatcctgcagtacgccctgccgagacaggagtcccagcggccattcttttggattttcatggacaacttgctgctgaccgaggatgaccaggaaactaccactcggttcctgcagaccgaagccgtgaccctgcaggacgtgagaggccgggactaccagaacgccatgcgggtgtggtccaacatccctggactgaaaagcaagcacgcacctctgacccctaaagaagaggagtacctgcaggcccaggtgcggagcagaagcaagctggacgcccctaaggtggatctgctggtgaagaattgcctcctgcccctgagagagtacttcaagtatttcagccagaatagtctgcccctgggaggcagcggcggcggcgtgacctacgaggacgtgcacgtgaacttcagccacgaggagtgggccctgctggacagcagccagaagagcctgtacagggacgtgatgctggagacctgcaggaacctgatggccatcggctacaggctggaggaccacaacatcgaggagcactgccagagcagcaggaggcccggcaggtacaacatctgcaactgcggctacaagccctgcgagaacgaggaccacggcaagaagcagtgcaccttcggcggcccaagcagcggcgcccctcctcccagcggcggcagcccagccggctccccaacctctaccgaggagggcacctctgagtccgccacccccgagagcggccctggcacctccaccgagcccagcgagggcagcgcacccggcagccctgccggcagccccacctccacagaggagggaaccagcaccgagcccagcgaaggcagcgccccaggcaccagcaccgagcctagtgagcaggagattaaacggatcaacaagatcagaagaagacttgtgaaagacagcaacaccaagaaggccggcaagacaggccccatgaaaaccctgctggttagagtgatgacacccgatctgagagagcggctggaaaacctgagaaagaagcctgaaaatatcccccagcccatcagcaatacatctagagccaacctgaataagctgctgaccgattacaccgaaatgaagaaggcgatcctgcatgtgtactgggaagagttccagaaggaccctgtgggcctgatgagccgggtggcccagcctgccagcaagaagatcgatcagaacaagctgaaacctgagatggacgagaagggcaacctgaccaccgccggctttgcctgctctcagtgtggccagcccctgttcgtgtacaagctggagcaggtgtctgagaagggcaaggcttacaccaactacttcggacggtgcaatgtggccgagcacgaaaagctgatcctgctggcccagctgaagcccgagaaggatagcgacgaagccgtgacatatagcctgggaaagtttgggcagagggccctggatttctacagcattcatgtgaccaaggagtccacccaccccgtgaagcccctggcccagatcgccggaaacagatacgcctccggacctgtgggaaaggccctgagcgacgcatgtatgggcacaatcgcctccttcctgtctaagtaccaggacatcatcatcgaacaccagaaggtggtgaagggcaaccagaagagactggagagcctgcgggagctggccggcaaggaaaacctggaataccctagcgtgaccctgccacctcagcctcacaccaaggagggcgttgatgcctacaacgaagtgatcgcccgggtgcgaatgtgggtgaacctgaacctgtggcagaagctgaagctaagcagagatgatgccaagcctctgctgagactgaagggattcccttcctttcctctggtcgagagacaggccaacgaagtggactggtgggacatggtgtgtaacgtgaagaagctgatcaacgagaaaaaggaggatggcaaggtgttttggcagaatctggctggctacaagagacaggaagccctgagaccatacctgagcagcgaggaagatcggaagaagggaaagaaattcgctcggtaccagctgggcgacctgctgctgcacctggaaaagaagcacggcgaggactggggaaaggtgtacgacgaggcctgggagcggattgacaagaaagtggaaggcctgagcaagcacatcaagctggaagaggaacggagaagcgaggacgcccagagcaaggccgccctgaccgactggctgcgggctaaggccagcttcgtgatcgagggcctgaaggaggccgacaaggacgagttctgcagatgcgagctgaagctgcagaagtggtacggggacctgcggggaaagcccttcgccatcgaagccgagaacagcatcctggacatcagcggcttcagcaagcagtacaactgtgccttcatctggcagaaggacggcgtgaagaagctgaacctgtacctgatcatcaactacttcaagggcggcaagctgcggttcaagaagatcaaacctgaagccttcgaagccaacagattctacaccgtgatcaacaaaaagagcggcgagatcgtgcccatggaggtgaacttcaacttcgacgaccccaacctgatcatcctgcctctggcctttggcaagagacagggcagagaattcatctggaacgacctgctgtccctggaaaccggcagcctgaagctggccaacggaagagtgatcgagaagacactgtacaacagaagaacccggcaggatgagcctgccctgttcgtggccctgaccttcgagcggcgggaggtcctggactcctccaatatcaaaccaatgaacctgatcggcgtggcaagaggcgaaaacatccccgccgtgatcgccctgaccgaccccgagggctgcccactgagccggtttaaggatagcctgggaaacccaacccacatcctgagaatcggcgagagctataaggagaagcagcggaccatccaggccaagaaggaggtggagcagcggagagccggcggctacagccggaagtacgccagcaaagccaagaatctggcagacgatatggtgagaaacaccgctagagatctgctgtactacgccgtgacccaggatgccatgctgatcttcgccaacctgagccggggcttcggccggcagggcaagcggaccttcatggccgagagacagtacacacggatggaggactggctgaccgccaagctggcctacgagggcctgagcaagacctacctgtccaagacactggcccagtacacctccaagacatgcagcaactgtgggtttaccatcaccagcgccgactacgacagggtgctggagaagctgaagaagacagcaacaggctggatgaccacaattaacggcaaggagctgaaggtggagggccagattacctactacaacagatacaagagacagaacgtagtcaaggacctgtccgtcgagctggatagactgagcgaagaatctgtgaacaacgacatctcctcctggacaaagggcagaagcggagaagctctgagcctcctgaagaaaagattctcccatagacccgtgcaggagaagttcgtgtgcctgaactgcggcttcgagacacacgcagccgagcaagccgccctgaacatcgccagatcctggctgttcctgcggagccaggagtacaagaaataccagacaaacaagacaaccggcaacaccgataagagagccttcgtcgagacctggcagtccttttaccggaagaagcttaaggaggtgtggaaacctgccgtgcggtctggcggatctggcggaggctccaccagccccaagaaaaagagaaaagtctaagctgccttctgcggggcttgccttctggccatgcccttcttctctcccttgcacctgtacctcttggtctttgaataaagcctgagtaggaaggctagcaaaaaaaaaaaaaaaaaaaaaaaaaaaaaaaaaaaaaaaaaaaaaaaaaaaaaaaaaaaaaaaaaaaaaaaaaaaaaaaa

SEQ ID NO: 12762 - RNA, 5794 nt, synthetic construct
  source 1..5794: mol_type = other RNA
aggaaataagagagaaaagaagagtaagaagaaatataagagccaccatggcccctaagaagaagcgtaaagtgagccggatggaacgcctcgtctacgaggtgcggcagaagtgcagaaacatcgaggacatctgcatctcctgcggatctctgaacgtgaccctggagcacccactgttcatcggcggcatgtgccagaactgtaaaaactgttttctggagtgtgcctatcaatacgacgatgacggctaccagagctactgcaccatctgttgcggcggaagagaggtgctgatgtgtggaaataacaactgctgccggtgcttctgcgtggaatgcgtggacctgctggtgggccccggcgccgcccaggccgctattaaggaagatccttggaactgctacatgtgcggccacaagggcacatacggcctgctgagacggagagaggactggcctagcagactgcagatgttcttcgccaataaccacgaccaggagttcgacccccctaaggtgtaccctcccgtccccgccgagaagagaaagcccatccgggtcctgagcctgttcgatggcatcgccaccggtctgctggtgctgaaggacctgggcatccaggtggataggtacattgcctccgaggtgtgcgaggactccatcaccgtgggaatggtgcgtcatcagggcaagatcatgtacgtgggcgacgtgcggagcgtgacacagaagcatatccaggagtggggccctttcgacctggtgatcggcggcagcccttgcaatgacctgagcatcgtgaacccagcccggaagggcctgtacgagggaaccggcagactgttcttcgagttttacagactgctgcacgacgcccggcctaaggaaggcgacgaccggcccttcttttggctgttcgagaatgtggtggccatgggagtcagcgacaagcgggatattagccggttcctggagagcaaccccgtgatgatcgatgccaaggaagtgagcgccgcccaccgggccagatacttctggggcaatctgcctggcatgaacagacccctggccagcaccgtgaacgacaagctggagctgcaggagtgcctggagcacggccggatcgccaagttcagcaaggtgagaaccatcaccacccgaagcaacagcatcaaacaaggcaaggaccagcactttcctgtgttcatgaacgagaaggaggacatcctgtggtgtaccgagatggagagagtgttcgggttcccagtccactacacagatgtcagcaacatgtctagactggccagacagagactgctgggaagaagctggtccgtccctgtgatcagacacctgttcgcccctctgaaggagtacttcgcctgcgtgagcagcggcaacagcaacgccaacagccggggccccagcttctctagcggcctggtgccactgtccctgagagggagccacatgggccccatggagatctacaaaaccgtgagcgcctggaagcggcagcctgtgcgcgtgctgagcctgtttcggaatatcgataaagtcctgaaaagcctgggattcctggagagcggctctggctccggcggtggcaccctgaagtacgtggaggatgtgacaaacgtggtcagacgggatgtggagaagtggggccccttcgatctggtgtacggcagcacccaacccctgggcagctcttgtgaccggtgccctggctggtacatgtttcagttccaccggatcctgcagtacgccctgccgagacaggagtcccagcggccattcttttggattttcatggacaacttgctgctgaccgaggatgaccaggaaactaccactcggttcctgcagaccgaagccgtgaccctgcaggacgtgagaggccgggactaccagaacgccatgcgggtgtggtccaacatccctggactgaaaagcaagcacgcacctctgacccctaaagaagaggagtacctgcaggcccaggtgcggagcagaagcaagctggacgcccctaaggtggatctgctggtgaagaattgcctcctgcccctgagagagtacttcaagtatttcagccagaatagtctgcccctgggaggcagcggcggcggcctgacctacgacgacgtgtacgtgaacttcacccaggaggagtgggccctgctgaaccccagccagaagagcctgtacaaggacgtgatgctggagacctacaggaacctgatcgccgtgggctacaactgggaggaccacaacatcgaggagcactgccagagcagcaggaggcacggcaggaacgagaggatcctgaccggcgagaacccctacgagggcatccagtgcggcgaggccttcgtgcaccacggcggcccaagcagcggcgcccctcctcccagcggcggcagcccagccggctccccaacctctaccgaggagggcacctctgagtccgccacccccgagagcggccctggcacctccaccgagcccagcgagggcagcgcacccggcagccctgccggcagccccacctccacagaggagggaaccagcaccgagcccagcgaaggcagcgccccaggcaccagcaccgagcctagtgagcaggagattaaacggatcaacaagatcagaagaagacttgtgaaagacagcaacaccaagaaggccggcaagacaggccccatgaaaaccctgctggttagagtgatgacacccgatctgagagagcggctggaaaacctgagaaagaagcctgaaaatatcccccagcccatcagcaatacatctagagccaacctgaataagctgctgaccgattacaccgaaatgaagaaggcgatcctgcatgtgtactgggaagagttccagaaggaccctgtgggcctgatgagccgggtggcccagcctgccagcaagaagatcgatcagaacaagctgaaacctgagatggacgagaagggcaacctgaccaccgccggctttgcctgctctcagtgtggccagcccctgttcgtgtacaagctggagcaggtgtctgagaagggcaaggcttacaccaactacttcggacggtgcaatgtggccgagcacgaaaagctgatcctgctggcccagctgaagcccgagaaggatagcgacgaagccgtgacatatagcctgggaaagtttgggcagagggccctggatttctacagcattcatgtgaccaaggagtccacccaccccgtgaagcccctggcccagatcgccggaaacagatacgcctccggacctgtgggaaaggccctgagcgacgcatgtatgggcacaatcgcctccttcctgtctaagtaccaggacatcatcatcgaacaccagaaggtggtgaagggcaaccagaagagactggagagcctgcgggagctggccggcaaggaaaacctggaataccctagcgtgaccctgccacctcagcctcacaccaaggagggcgttgatgcctacaacgaagtgatcgcccgggtgcgaatgtgggtgaacctgaacctgtggcagaagctgaagctaagcagagatgatgccaagcctctgctgagactgaagggattcccttcctttcctctggtcgagagacaggccaacgaagtggactggtgggacatggtgtgtaacgtgaagaagctgatcaacgagaaaaaggaggatggcaaggtgttttggcagaatctggctggctacaagagacaggaagccctgagaccatacctgagcagcgaggaagatcggaagaagggaaagaaattcgctcggtaccagctgggcgacctgctgctgcacctggaaaagaagcacggcgaggactggggaaaggtgtacgacgaggcctgggagcggattgacaagaaagtggaaggcctgagcaagcacatcaagctggaagaggaacggagaagcgaggacgcccagagcaaggccgccctgaccgactggctgcgggctaaggccagcttcgtgatcgagggcctgaaggaggccgacaaggacgagttctgcagatgcgagctgaagctgcagaagtggtacggggacctgcggggaaagcccttcgccatcgaagccgagaacagcatcctggacatcagcggcttcagcaagcagtacaactgtgccttcatctggcagaaggacggcgtgaagaagctgaacctgtacctgatcatcaactacttcaagggcggcaagctgcggttcaagaagatcaaacctgaagccttcgaagccaacagattctacaccgtgatcaacaaaaagagcggcgagatcgtgcccatggaggtgaacttcaacttcgacgaccccaacctgatcatcctgcctctggcctttggcaagagacagggcagagaattcatctggaacgacctgctgtccctggaaaccggcagcctgaagctggccaacggaagagtgatcgagaagacactgtacaacagaagaacccggcaggatgagcctgccctgttcgtggccctgaccttcgagcggcgggaggtcctggactcctccaatatcaaaccaatgaacctgatcggcgtggcaagaggcgaaaacatccccgccgtgatcgccctgaccgaccccgagggctgcccactgagccggtttaaggatagcctgggaaacccaacccacatcctgagaatcggcgagagctataaggagaagcagcggaccatccaggccaagaaggaggtggagcagcggagagccggcggctacagccggaagtacgccagcaaagccaagaatctggcagacgatatggtgagaaacaccgctagagatctgctgtactacgccgtgacccaggatgccatgctgatcttcgccaacctgagccggggcttcggccggcagggcaagcggaccttcatggccgagagacagtacacacggatggaggactggctgaccgccaagctggcctacgagggcctgagcaagacctacctgtccaagacactggcccagtacacctccaagacatgcagcaactgtgggtttaccatcaccagcgccgactacgacagggtgctggagaagctgaagaagacagcaacaggctggatgaccacaattaacggcaaggagctgaaggtggagggccagattacctactacaacagatacaagagacagaacgtagtcaaggacctgtccgtcgagctggatagactgagcgaagaatctgtgaacaacgacatctcctcctggacaaagggcagaagcggagaagctctgagcctcctgaagaaaagattctcccatagacccgtgcaggagaagttcgtgtgcctgaactgcggcttcgagacacacgcagccgagcaagccgccctgaacatcgccagatcctggctgttcctgcggagccaggagtacaagaaataccagacaaacaagacaaccggcaacaccgataagagagccttcgtcgagacctggcagtccttttaccggaagaagcttaaggaggtgtggaaacctgccgtgcggtctggcggatctggcggaggctccaccagccccaagaaaaagagaaaagtctaagctgccttctgcggggcttgccttctggccatgcccttcttctctcccttgcacctgtacctcttggtctttgaataaagcctgagtaggaaggctagcaaaaaaaaaaaaaaaaaaaaaaaaaaaaaaaaaaaaaaaaaaaaaaaaaaaaaaaaaaaaaaaaaaaaaaaaaaaaaaaa

SEQ ID NO: 12763 - RNA, 5785 nt, synthetic construct
  source 1..5785: mol_type = other RNA
aggaaataagagagaaaagaagagtaagaagaaatataagagccaccatggcccctaagaagaagcgtaaagtgagccggatggaacgcctcgtctacgaggtgcggcagaagtgcagaaacatcgaggacatctgcatctcctgcggatctctgaacgtgaccctggagcacccactgttcatcggcggcatgtgccagaactgtaaaaactgttttctggagtgtgcctatcaatacgacgatgacggctaccagagctactgcaccatctgttgcggcggaagagaggtgctgatgtgtggaaataacaactgctgccggtgcttctgcgtggaatgcgtggacctgctggtgggccccggcgccgcccaggccgctattaaggaagatccttggaactgctacatgtgcggccacaagggcacatacggcctgctgagacggagagaggactggcctagcagactgcagatgttcttcgccaataaccacgaccaggagttcgacccccctaaggtgtaccctcccgtccccgccgagaagagaaagcccatccgggtcctgagcctgttcgatggcatcgccaccggtctgctggtgctgaaggacctgggcatccaggtggataggtacattgcctccgaggtgtgcgaggactccatcaccgtgggaatggtgcgtcatcagggcaagatcatgtacgtgggcgacgtgcggagcgtgacacagaagcatatccaggagtggggccctttcgacctggtgatcggcggcagcccttgcaatgacctgagcatcgtgaacccagcccggaagggcctgtacgagggaaccggcagactgttcttcgagttttacagactgctgcacgacgcccggcctaaggaaggcgacgaccggcccttcttttggctgttcgagaatgtggtggccatgggagtcagcgacaagcgggatattagccggttcctggagagcaaccccgtgatgatcgatgccaaggaagtgagcgccgcccaccgggccagatacttctggggcaatctgcctggcatgaacagacccctggccagcaccgtgaacgacaagctggagctgcaggagtgcctggagcacggccggatcgccaagttcagcaaggtgagaaccatcaccacccgaagcaacagcatcaaacaaggcaaggaccagcactttcctgtgttcatgaacgagaaggaggacatcctgtggtgtaccgagatggagagagtgttcgggttcccagtccactacacagatgtcagcaacatgtctagactggccagacagagactgctgggaagaagctggtccgtccctgtgatcagacacctgttcgcccctctgaaggagtacttcgcctgcgtgagcagcggcaacagcaacgccaacagccggggccccagcttctctagcggcctggtgccactgtccctgagagggagccacatgggccccatggagatctacaaaaccgtgagcgcctggaagcggcagcctgtgcgcgtgctgagcctgtttcggaatatcgataaagtcctgaaaagcctgggattcctggagagcggctctggctccggcggtggcaccctgaagtacgtggaggatgtgacaaacgtggtcagacgggatgtggagaagtggggccccttcgatctggtgtacggcagcacccaacccctgggcagctcttgtgaccggtgccctggctggtacatgtttcagttccaccggatcctgcagtacgccctgccgagacaggagtcccagcggccattcttttggattttcatggacaacttgctgctgaccgaggatgaccaggaaactaccactcggttcctgcagaccgaagccgtgaccctgcaggacgtgagaggccgggactaccagaacgccatgcgggtgtggtccaacatccctggactgaaaagcaagcacgcacctctgacccctaaagaagaggagtacctgcaggcccaggtgcggagcagaagcaagctggacgcccctaaggtggatctgctggtgaagaattgcctcctgcccctgagagagtacttcaagtatttcagccagaatagtctgcccctgggaggcagcggcggcggcctggagggcctggtgaccttcgaggaggtggccgtgtacttcaccgagagcgagtggagcctgctggaccccgcccagagggccctgtacagggacgtgatggaggagaactacgagaacgtgaccagcctgggcttccccgtgagcaagcccgacgtgatcagctggctggagaggggcgaggacccctgggtgcccgacctgcaggaccccgagaagagggagaccctgagggaggcctgcggcggcccaagcagcggcgcccctcctcccagcggcggcagcccagccggctccccaacctctaccgaggagggcacctctgagtccgccacccccgagagcggccctggcacctccaccgagcccagcgagggcagcgcacccggcagccctgccggcagccccacctccacagaggagggaaccagcaccgagcccagcgaaggcagcgccccaggcaccagcaccgagcctagtgagcaggagattaaacggatcaacaagatcagaagaagacttgtgaaagacagcaacaccaagaaggccggcaagacaggccccatgaaaaccctgctggttagagtgatgacacccgatctgagagagcggctggaaaacctgagaaagaagcctgaaaatatcccccagcccatcagcaatacatctagagccaacctgaataagctgctgaccgattacaccgaaatgaagaaggcgatcctgcatgtgtactgggaagagttccagaaggaccctgtgggcctgatgagccgggtggcccagcctgccagcaagaagatcgatcagaacaagctgaaacctgagatggacgagaagggcaacctgaccaccgccggctttgcctgctctcagtgtggccagcccctgttcgtgtacaagctggagcaggtgtctgagaagggcaaggcttacaccaactacttcggacggtgcaatgtggccgagcacgaaaagctgatcctgctggcccagctgaagcccgagaaggatagcgacgaagccgtgacatatagcctgggaaagtttgggcagagggccctggatttctacagcattcatgtgaccaaggagtccacccaccccgtgaagcccctggcccagatcgccggaaacagatacgcctccggacctgtgggaaaggccctgagcgacgcatgtatgggcacaatcgcctccttcctgtctaagtaccaggacatcatcatcgaacaccagaaggtggtgaagggcaaccagaagagactggagagcctgcgggagctggccggcaaggaaaacctggaataccctagcgtgaccctgccacctcagcctcacaccaaggagggcgttgatgcctacaacgaagtgatcgcccgggtgcgaatgtgggtgaacctgaacctgtggcagaagctgaagctaagcagagatgatgccaagcctctgctgagactgaagggattcccttcctttcctctggtcgagagacaggccaacgaagtggactggtgggacatggtgtgtaacgtgaagaagctgatcaacgagaaaaaggaggatggcaaggtgttttggcagaatctggctggctacaagagacaggaagccctgagaccatacctgagcagcgaggaagatcggaagaagggaaagaaattcgctcggtaccagctgggcgacctgctgctgcacctggaaaagaagcacggcgaggactggggaaaggtgtacgacgaggcctgggagcggattgacaagaaagtggaaggcctgagcaagcacatcaagctggaagaggaacggagaagcgaggacgcccagagcaaggccgccctgaccgactggctgcgggctaaggccagcttcgtgatcgagggcctgaaggaggccgacaaggacgagttctgcagatgcgagctgaagctgcagaagtggtacggggacctgcggggaaagcccttcgccatcgaagccgagaacagcatcctggacatcagcggcttcagcaagcagtacaactgtgccttcatctggcagaaggacggcgtgaagaagctgaacctgtacctgatcatcaactacttcaagggcggcaagctgcggttcaagaagatcaaacctgaagccttcgaagccaacagattctacaccgtgatcaacaaaaagagcggcgagatcgtgcccatggaggtgaacttcaacttcgacgaccccaacctgatcatcctgcctctggcctttggcaagagacagggcagagaattcatctggaacgacctgctgtccctggaaaccggcagcctgaagctggccaacggaagagtgatcgagaagacactgtacaacagaagaacccggcaggatgagcctgccctgttcgtggccctgaccttcgagcggcgggaggtcctggactcctccaatatcaaaccaatgaacctgatcggcgtggcaagaggcgaaaacatccccgccgtgatcgccctgaccgaccccgagggctgcccactgagccggtttaaggatagcctgggaaacccaacccacatcctgagaatcggcgagagctataaggagaagcagcggaccatccaggccaagaaggaggtggagcagcggagagccggcggctacagccggaagtacgccagcaaagccaagaatctggcagacgatatggtgagaaacaccgctagagatctgctgtactacgccgtgacccaggatgccatgctgatcttcgccaacctgagccggggcttcggccggcagggcaagcggaccttcatggccgagagacagtacacacggatggaggactggctgaccgccaagctggcctacgagggcctgagcaagacctacctgtccaagacactggcccagtacacctccaagacatgcagcaactgtgggtttaccatcaccagcgccgactacgacagggtgctggagaagctgaagaagacagcaacaggctggatgaccacaattaacggcaaggagctgaaggtggagggccagattacctactacaacagatacaagagacagaacgtagtcaaggacctgtccgtcgagctggatagactgagcgaagaatctgtgaacaacgacatctcctcctggacaaagggcagaagcggagaagctctgagcctcctgaagaaaagattctcccatagacccgtgcaggagaagttcgtgtgcctgaactgcggcttcgagacacacgcagccgagcaagccgccctgaacatcgccagatcctggctgttcctgcggagccaggagtacaagaaataccagacaaacaagacaaccggcaacaccgataagagagccttcgtcgagacctggcagtccttttaccggaagaagcttaaggaggtgtggaaacctgccgtgcggtctggcggatctggcggaggctccaccagccccaagaaaaagagaaaagtctaagctgccttctgcggggcttgccttctggccatgcccttcttctctcccttgcacctgtacctcttggtctttgaataaagcctgagtaggaaggctagcaaaaaaaaaaaaaaaaaaaaaaaaaaaaaaaaaaaaaaaaaaaaaaaaaaaaaaaaaaaaaaaaaaaaaaaaaaaaaaaa

SEQ ID NO: 12764 - RNA, 5785 nt, synthetic construct
  source 1..5785: mol_type = other RNA
aggaaataagagagaaaagaagagtaagaagaaatataagagccaccatggcccctaagaagaagcgtaaagtgagccggatggaacgcctcgtctacgaggtgcggcagaagtgcagaaacatcgaggacatctgcatctcctgcggatctctgaacgtgaccctggagcacccactgttcatcggcggcatgtgccagaactgtaaaaactgttttctggagtgtgcctatcaatacgacgatgacggctaccagagctactgcaccatctgttgcggcggaagagaggtgctgatgtgtggaaataacaactgctgccggtgcttctgcgtggaatgcgtggacctgctggtgggccccggcgccgcccaggccgctattaaggaagatccttggaactgctacatgtgcggccacaagggcacatacggcctgctgagacggagagaggactggcctagcagactgcagatgttcttcgccaataaccacgaccaggagttcgacccccctaaggtgtaccctcccgtccccgccgagaagagaaagcccatccgggtcctgagcctgttcgatggcatcgccaccggtctgctggtgctgaaggacctgggcatccaggtggataggtacattgcctccgaggtgtgcgaggactccatcaccgtgggaatggtgcgtcatcagggcaagatcatgtacgtgggcgacgtgcggagcgtgacacagaagcatatccaggagtggggccctttcgacctggtgatcggcggcagcccttgcaatgacctgagcatcgtgaacccagcccggaagggcctgtacgagggaaccggcagactgttcttcgagttttacagactgctgcacgacgcccggcctaaggaaggcgacgaccggcccttcttttggctgttcgagaatgtggtggccatgggagtcagcgacaagcgggatattagccggttcctggagagcaaccccgtgatgatcgatgccaaggaagtgagcgccgcccaccgggccagatacttctggggcaatctgcctggcatgaacagacccctggccagcaccgtgaacgacaagctggagctgcaggagtgcctggagcacggccggatcgccaagttcagcaaggtgagaaccatcaccacccgaagcaacagcatcaaacaaggcaaggaccagcactttcctgtgttcatgaacgagaaggaggacatcctgtggtgtaccgagatggagagagtgttcgggttcccagtccactacacagatgtcagcaacatgtctagactggccagacagagactgctgggaagaagctggtccgtccctgtgatcagacacctgttcgcccctctgaaggagtacttcgcctgcgtgagcagcggcaacagcaacgccaacagccggggccccagcttctctagcggcctggtgccactgtccctgagagggagccacatgggccccatggagatctacaaaaccgtgagcgcctggaagcggcagcctgtgcgcgtgctgagcctgtttcggaatatcgataaagtcctgaaaagcctgggattcctggagagcggctctggctccggcggtggcaccctgaagtacgtggaggatgtgacaaacgtggtcagacgggatgtggagaagtggggccccttcgatctggtgtacggcagcacccaacccctgggcagctcttgtgaccggtgccctggctggtacatgtttcagttccaccggatcctgcagtacgccctgccgagacaggagtcccagcggccattcttttggattttcatggacaacttgctgctgaccgaggatgaccaggaaactaccactcggttcctgcagaccgaagccgtgaccctgcaggacgtgagaggccgggactaccagaacgccatgcgggtgtggtccaacatccctggactgaaaagcaagcacgcacctctgacccctaaagaagaggagtacctgcaggcccaggtgcggagcagaagcaagctggacgcccctaaggtggatctgctggtgaagaattgcctcctgcccctgagagagtacttcaagtatttcagccagaatagtctgcccctgggaggcagcggcggcggcatccaggagagcgtgaccttcaaggacgtgagcgtggacttcacctgggaggagtggaggcacctggaccccgcccagagggacctgtacaggaacgtgatgctggagaactacgagaacctggtgagcgtgggcatcagcgtgagcaccgtggacatgatcagcctgctggagaagagggacggcccctggatgcccgagggcgaggtgagcggcgccatctgccccgacagcctgaacgagggcggcccaagcagcggcgcccctcctcccagcggcggcagcccagccggctccccaacctctaccgaggagggcacctctgagtccgccacccccgagagcggccctggcacctccaccgagcccagcgagggcagcgcacccggcagccctgccggcagccccacctccacagaggagggaaccagcaccgagcccagcgaaggcagcgccccaggcaccagcaccgagcctagtgagcaggagattaaacggatcaacaagatcagaagaagacttgtgaaagacagcaacaccaagaaggccggcaagacaggccccatgaaaaccctgctggttagagtgatgacacccgatctgagagagcggctggaaaacctgagaaagaagcctgaaaatatcccccagcccatcagcaatacatctagagccaacctgaataagctgctgaccgattacaccgaaatgaagaaggcgatcctgcatgtgtactgggaagagttccagaaggaccctgtgggcctgatgagccgggtggcccagcctgccagcaagaagatcgatcagaacaagctgaaacctgagatggacgagaagggcaacctgaccaccgccggctttgcctgctctcagtgtggccagcccctgttcgtgtacaagctggagcaggtgtctgagaagggcaaggcttacaccaactacttcggacggtgcaatgtggccgagcacgaaaagctgatcctgctggcccagctgaagcccgagaaggatagcgacgaagccgtgacatatagcctgggaaagtttgggcagagggccctggatttctacagcattcatgtgaccaaggagtccacccaccccgtgaagcccctggcccagatcgccggaaacagatacgcctccggacctgtgggaaaggccctgagcgacgcatgtatgggcacaatcgcctccttcctgtctaagtaccaggacatcatcatcgaacaccagaaggtggtgaagggcaaccagaagagactggagagcctgcgggagctggccggcaaggaaaacctggaataccctagcgtgaccctgccacctcagcctcacaccaaggagggcgttgatgcctacaacgaagtgatcgcccgggtgcgaatgtgggtgaacctgaacctgtggcagaagctgaagctaagcagagatgatgccaagcctctgctgagactgaagggattcccttcctttcctctggtcgagagacaggccaacgaagtggactggtgggacatggtgtgtaacgtgaagaagctgatcaacgagaaaaaggaggatggcaaggtgttttggcagaatctggctggctacaagagacaggaagccctgagaccatacctgagcagcgaggaagatcggaagaagggaaagaaattcgctcggtaccagctgggcgacctgctgctgcacctggaaaagaagcacggcgaggactggggaaaggtgtacgacgaggcctgggagcggattgacaagaaagtggaaggcctgagcaagcacatcaagctggaagaggaacggagaagcgaggacgcccagagcaaggccgccctgaccgactggctgcgggctaaggccagcttcgtgatcgagggcctgaaggaggccgacaaggacgagttctgcagatgcgagctgaagctgcagaagtggtacggggacctgcggggaaagcccttcgccatcgaagccgagaacagcatcctggacatcagcggcttcagcaagcagtacaactgtgccttcatctggcagaaggacggcgtgaagaagctgaacctgtacctgatcatcaactacttcaagggcggcaagctgcggttcaagaagatcaaacctgaagccttcgaagccaacagattctacaccgtgatcaacaaaaagagcggcgagatcgtgcccatggaggtgaacttcaacttcgacgaccccaacctgatcatcctgcctctggcctttggcaagagacagggcagagaattcatctggaacgacctgctgtccctggaaaccggcagcctgaagctggccaacggaagagtgatcgagaagacactgtacaacagaagaacccggcaggatgagcctgccctgttcgtggccctgaccttcgagcggcgggaggtcctggactcctccaatatcaaaccaatgaacctgatcggcgtggcaagaggcgaaaacatccccgccgtgatcgccctgaccgaccccgagggctgcccactgagccggtttaaggatagcctgggaaacccaacccacatcctgagaatcggcgagagctataaggagaagcagcggaccatccaggccaagaaggaggtggagcagcggagagccggcggctacagccggaagtacgccagcaaagccaagaatctggcagacgatatggtgagaaacaccgctagagatctgctgtactacgccgtgacccaggatgccatgctgatcttcgccaacctgagccggggcttcggccggcagggcaagcggaccttcatggccgagagacagtacacacggatggaggactggctgaccgccaagctggcctacgagggcctgagcaagacctacctgtccaagacactggcccagtacacctccaagacatgcagcaactgtgggtttaccatcaccagcgccgactacgacagggtgctggagaagctgaagaagacagcaacaggctggatgaccacaattaacggcaaggagctgaaggtggagggccagattacctactacaacagatacaagagacagaacgtagtcaaggacctgtccgtcgagctggatagactgagcgaagaatctgtgaacaacgacatctcctcctggacaaagggcagaagcggagaagctctgagcctcctgaagaaaagattctcccatagacccgtgcaggagaagttcgtgtgcctgaactgcggcttcgagacacacgcagccgagcaagccgccctgaacatcgccagatcctggctgttcctgcggagccaggagtacaagaaataccagacaaacaagacaaccggcaacaccgataagagagccttcgtcgagacctggcagtccttttaccggaagaagcttaaggaggtgtggaaacctgccgtgcggtctggcggatctggcggaggctccaccagccccaagaaaaagagaaaagtctaagctgccttctgcggggcttgccttctggccatgcccttcttctctcccttgcacctgtacctcttggtctttgaataaagcctgagtaggaaggctagcaaaaaaaaaaaaaaaaaaaaaaaaaaaaaaaaaaaaaaaaaaaaaaaaaaaaaaaaaaaaaaaaaaaaaaaaaaaaaaaa

SEQ ID NO: 12765 - RNA, 5785 nt, synthetic construct
  source 1..5785: mol_type = other RNA
aggaaataagagagaaaagaagagtaagaagaaatataagagccaccatggcccctaagaagaagcgtaaagtgagccggatggaacgcctcgtctacgaggtgcggcagaagtgcagaaacatcgaggacatctgcatctcctgcggatctctgaacgtgaccctggagcacccactgttcatcggcggcatgtgccagaactgtaaaaactgttttctggagtgtgcctatcaatacgacgatgacggctaccagagctactgcaccatctgttgcggcggaagagaggtgctgatgtgtggaaataacaactgctgccggtgcttctgcgtggaatgcgtggacctgctggtgggccccggcgccgcccaggccgctattaaggaagatccttggaactgctacatgtgcggccacaagggcacatacggcctgctgagacggagagaggactggcctagcagactgcagatgttcttcgccaataaccacgaccaggagttcgacccccctaaggtgtaccctcccgtccccgccgagaagagaaagcccatccgggtcctgagcctgttcgatggcatcgccaccggtctgctggtgctgaaggacctgggcatccaggtggataggtacattgcctccgaggtgtgcgaggactccatcaccgtgggaatggtgcgtcatcagggcaagatcatgtacgtgggcgacgtgcggagcgtgacacagaagcatatccaggagtggggccctttcgacctggtgatcggcggcagcccttgcaatgacctgagcatcgtgaacccagcccggaagggcctgtacgagggaaccggcagactgttcttcgagttttacagactgctgcacgacgcccggcctaaggaaggcgacgaccggcccttcttttggctgttcgagaatgtggtggccatgggagtcagcgacaagcgggatattagccggttcctggagagcaaccccgtgatgatcgatgccaaggaagtgagcgccgcccaccgggccagatacttctggggcaatctgcctggcatgaacagacccctggccagcaccgtgaacgacaagctggagctgcaggagtgcctggagcacggccggatcgccaagttcagcaaggtgagaaccatcaccacccgaagcaacagcatcaaacaaggcaaggaccagcactttcctgtgttcatgaacgagaaggaggacatcctgtggtgtaccgagatggagagagtgttcgggttcccagtccactacacagatgtcagcaacatgtctagactggccagacagagactgctgggaagaagctggtccgtccctgtgatcagacacctgttcgcccctctgaaggagtacttcgcctgcgtgagcagcggcaacagcaacgccaacagccggggccccagcttctctagcggcctggtgccactgtccctgagagggagccacatgggccccatggagatctacaaaaccgtgagcgcctggaagcggcagcctgtgcgcgtgctgagcctgtttcggaatatcgataaagtcctgaaaagcctgggattcctggagagcggctctggctccggcggtggcaccctgaagtacgtggaggatgtgacaaacgtggtcagacgggatgtggagaagtggggccccttcgatctggtgtacggcagcacccaacccctgggcagctcttgtgaccggtgccctggctggtacatgtttcagttccaccggatcctgcagtacgccctgccgagacaggagtcccagcggccattcttttggattttcatggacaacttgctgctgaccgaggatgaccaggaaactaccactcggttcctgcagaccgaagccgtgaccctgcaggacgtgagaggccgggactaccagaacgccatgcgggtgtggtccaacatccctggactgaaaagcaagcacgcacctctgacccctaaagaagaggagtacctgcaggcccaggtgcggagcagaagcaagctggacgcccctaaggtggatctgctggtgaagaattgcctcctgcccctgagagagtacttcaagtatttcagccagaatagtctgcccctgggaggcagcggcggcggcaagacccaggtgagcctggagttcaacgacgtggccgtggagttcgcctgggaggagtggcagctgctggaccccgcccagaaggacctgtacagggaggtgatgctggagaacttccacaacctggtgagcgtgggctgccaggtgggcaagcccgacgtgctgttcaggctggagagggagcccccctggagcctggaggacgagatccacagccagaacttcagcgagatccaggaggtgggcggcccaagcagcggcgcccctcctcccagcggcggcagcccagccggctccccaacctctaccgaggagggcacctctgagtccgccacccccgagagcggccctggcacctccaccgagcccagcgagggcagcgcacccggcagccctgccggcagccccacctccacagaggagggaaccagcaccgagcccagcgaaggcagcgccccaggcaccagcaccgagcctagtgagcaggagattaaacggatcaacaagatcagaagaagacttgtgaaagacagcaacaccaagaaggccggcaagacaggccccatgaaaaccctgctggttagagtgatgacacccgatctgagagagcggctggaaaacctgagaaagaagcctgaaaatatcccccagcccatcagcaatacatctagagccaacctgaataagctgctgaccgattacaccgaaatgaagaaggcgatcctgcatgtgtactgggaagagttccagaaggaccctgtgggcctgatgagccgggtggcccagcctgccagcaagaagatcgatcagaacaagctgaaacctgagatggacgagaagggcaacctgaccaccgccggctttgcctgctctcagtgtggccagcccctgttcgtgtacaagctggagcaggtgtctgagaagggcaaggcttacaccaactacttcggacggtgcaatgtggccgagcacgaaaagctgatcctgctggcccagctgaagcccgagaaggatagcgacgaagccgtgacatatagcctgggaaagtttgggcagagggccctggatttctacagcattcatgtgaccaaggagtccacccaccccgtgaagcccctggcccagatcgccggaaacagatacgcctccggacctgtgggaaaggccctgagcgacgcatgtatgggcacaatcgcctccttcctgtctaagtaccaggacatcatcatcgaacaccagaaggtggtgaagggcaaccagaagagactggagagcctgcgggagctggccggcaaggaaaacctggaataccctagcgtgaccctgccacctcagcctcacaccaaggagggcgttgatgcctacaacgaagtgatcgcccgggtgcgaatgtgggtgaacctgaacctgtggcagaagctgaagctaagcagagatgatgccaagcctctgctgagactgaagggattcccttcctttcctctggtcgagagacaggccaacgaagtggactggtgggacatggtgtgtaacgtgaagaagctgatcaacgagaaaaaggaggatggcaaggtgttttggcagaatctggctggctacaagagacaggaagccctgagaccatacctgagcagcgaggaagatcggaagaagggaaagaaattcgctcggtaccagctgggcgacctgctgctgcacctggaaaagaagcacggcgaggactggggaaaggtgtacgacgaggcctgggagcggattgacaagaaagtggaaggcctgagcaagcacatcaagctggaagaggaacggagaagcgaggacgcccagagcaaggccgccctgaccgactggctgcgggctaaggccagcttcgtgatcgagggcctgaaggaggccgacaaggacgagttctgcagatgcgagctgaagctgcagaagtggtacggggacctgcggggaaagcccttcgccatcgaagccgagaacagcatcctggacatcagcggcttcagcaagcagtacaactgtgccttcatctggcagaaggacggcgtgaagaagctgaacctgtacctgatcatcaactacttcaagggcggcaagctgcggttcaagaagatcaaacctgaagccttcgaagccaacagattctacaccgtgatcaacaaaaagagcggcgagatcgtgcccatggaggtgaacttcaacttcgacgaccccaacctgatcatcctgcctctggcctttggcaagagacagggcagagaattcatctggaacgacctgctgtccctggaaaccggcagcctgaagctggccaacggaagagtgatcgagaagacactgtacaacagaagaacccggcaggatgagcctgccctgttcgtggccctgaccttcgagcggcgggaggtcctggactcctccaatatcaaaccaatgaacctgatcggcgtggcaagaggcgaaaacatccccgccgtgatcgccctgaccgaccccgagggctgcccactgagccggtttaaggatagcctgggaaacccaacccacatcctgagaatcggcgagagctataaggagaagcagcggaccatccaggccaagaaggaggtggagcagcggagagccggcggctacagccggaagtacgccagcaaagccaagaatctggcagacgatatggtgagaaacaccgctagagatctgctgtactacgccgtgacccaggatgccatgctgatcttcgccaacctgagccggggcttcggccggcagggcaagcggaccttcatggccgagagacagtacacacggatggaggactggctgaccgccaagctggcctacgagggcctgagcaagacctacctgtccaagacactggcccagtacacctccaagacatgcagcaactgtgggtttaccatcaccagcgccgactacgacagggtgctggagaagctgaagaagacagcaacaggctggatgaccacaattaacggcaaggagctgaaggtggagggccagattacctactacaacagatacaagagacagaacgtagtcaaggacctgtccgtcgagctggatagactgagcgaagaatctgtgaacaacgacatctcctcctggacaaagggcagaagcggagaagctctgagcctcctgaagaaaagattctcccatagacccgtgcaggagaagttcgtgtgcctgaactgcggcttcgagacacacgcagccgagcaagccgccctgaacatcgccagatcctggctgttcctgcggagccaggagtacaagaaataccagacaaacaagacaaccggcaacaccgataagagagccttcgtcgagacctggcagtccttttaccggaagaagcttaaggaggtgtggaaacctgccgtgcggtctggcggatctggcggaggctccaccagccccaagaaaaagagaaaagtctaagctgccttctgcggggcttgccttctggccatgcccttcttctctcccttgcacctgtacctcttggtctttgaataaagcctgagtaggaaggctagcaaaaaaaaaaaaaaaaaaaaaaaaaaaaaaaaaaaaaaaaaaaaaaaaaaaaaaaaaaaaaaaaaaaaaaaaaaaaaaaa

SEQ ID NO: 12766 - RNA, 5785 nt, synthetic construct
  source 1..5785: mol_type = other RNA
aggaaataagagagaaaagaagagtaagaagaaatataagagccaccatggcccctaagaagaagcgtaaagtgagccggatggaacgcctcgtctacgaggtgcggcagaagtgcagaaacatcgaggacatctgcatctcctgcggatctctgaacgtgaccctggagcacccactgttcatcggcggcatgtgccagaactgtaaaaactgttttctggagtgtgcctatcaatacgacgatgacggctaccagagctactgcaccatctgttgcggcggaagagaggtgctgatgtgtggaaataacaactgctgccggtgcttctgcgtggaatgcgtggacctgctggtgggccccggcgccgcccaggccgctattaaggaagatccttggaactgctacatgtgcggccacaagggcacatacggcctgctgagacggagagaggactggcctagcagactgcagatgttcttcgccaataaccacgaccaggagttcgacccccctaaggtgtaccctcccgtccccgccgagaagagaaagcccatccgggtcctgagcctgttcgatggcatcgccaccggtctgctggtgctgaaggacctgggcatccaggtggataggtacattgcctccgaggtgtgcgaggactccatcaccgtgggaatggtgcgtcatcagggcaagatcatgtacgtgggcgacgtgcggagcgtgacacagaagcatatccaggagtggggccctttcgacctggtgatcggcggcagcccttgcaatgacctgagcatcgtgaacccagcccggaagggcctgtacgagggaaccggcagactgttcttcgagttttacagactgctgcacgacgcccggcctaaggaaggcgacgaccggcccttcttttggctgttcgagaatgtggtggccatgggagtcagcgacaagcgggatattagccggttcctggagagcaaccccgtgatgatcgatgccaaggaagtgagcgccgcccaccgggccagatacttctggggcaatctgcctggcatgaacagacccctggccagcaccgtgaacgacaagctggagctgcaggagtgcctggagcacggccggatcgccaagttcagcaaggtgagaaccatcaccacccgaagcaacagcatcaaacaaggcaaggaccagcactttcctgtgttcatgaacgagaaggaggacatcctgtggtgtaccgagatggagagagtgttcgggttcccagtccactacacagatgtcagcaacatgtctagactggccagacagagactgctgggaagaagctggtccgtccctgtgatcagacacctgttcgcccctctgaaggagtacttcgcctgcgtgagcagcggcaacagcaacgccaacagccggggccccagcttctctagcggcctggtgccactgtccctgagagggagccacatgggccccatggagatctacaaaaccgtgagcgcctggaagcggcagcctgtgcgcgtgctgagcctgtttcggaatatcgataaagtcctgaaaagcctgggattcctggagagcggctctggctccggcggtggcaccctgaagtacgtggaggatgtgacaaacgtggtcagacgggatgtggagaagtggggccccttcgatctggtgtacggcagcacccaacccctgggcagctcttgtgaccggtgccctggctggtacatgtttcagttccaccggatcctgcagtacgccctgccgagacaggagtcccagcggccattcttttggattttcatggacaacttgctgctgaccgaggatgaccaggaaactaccactcggttcctgcagaccgaagccgtgaccctgcaggacgtgagaggccgggactaccagaacgccatgcgggtgtggtccaacatccctggactgaaaagcaagcacgcacctctgacccctaaagaagaggagtacctgcaggcccaggtgcggagcagaagcaagctggacgcccctaaggtggatctgctggtgaagaattgcctcctgcccctgagagagtacttcaagtatttcagccagaatagtctgcccctgggaggcagcggcggcggctgcgagggcagcgtgagcttcgaggacgtgaccatggacttcagcagggaggagtggcagcagctggaccccgcccagaggtgcctgtaccaggacgtgatgctggagatctacagccacctgctgttcgtgggctacaacatccccaaccccgagatcatcagcaggatggagaagggcgaggagccctggatgagggaggtgcagctgccccaccagaggcacagggagagggccttcggcggcggcccaagcagcggcgcccctcctcccagcggcggcagcccagccggctccccaacctctaccgaggagggcacctctgagtccgccacccccgagagcggccctggcacctccaccgagcccagcgagggcagcgcacccggcagccctgccggcagccccacctccacagaggagggaaccagcaccgagcccagcgaaggcagcgccccaggcaccagcaccgagcctagtgagcaggagattaaacggatcaacaagatcagaagaagacttgtgaaagacagcaacaccaagaaggccggcaagacaggccccatgaaaaccctgctggttagagtgatgacacccgatctgagagagcggctggaaaacctgagaaagaagcctgaaaatatcccccagcccatcagcaatacatctagagccaacctgaataagctgctgaccgattacaccgaaatgaagaaggcgatcctgcatgtgtactgggaagagttccagaaggaccctgtgggcctgatgagccgggtggcccagcctgccagcaagaagatcgatcagaacaagctgaaacctgagatggacgagaagggcaacctgaccaccgccggctttgcctgctctcagtgtggccagcccctgttcgtgtacaagctggagcaggtgtctgagaagggcaaggcttacaccaactacttcggacggtgcaatgtggccgagcacgaaaagctgatcctgctggcccagctgaagcccgagaaggatagcgacgaagccgtgacatatagcctgggaaagtttgggcagagggccctggatttctacagcattcatgtgaccaaggagtccacccaccccgtgaagcccctggcccagatcgccggaaacagatacgcctccggacctgtgggaaaggccctgagcgacgcatgtatgggcacaatcgcctccttcctgtctaagtaccaggacatcatcatcgaacaccagaaggtggtgaagggcaaccagaagagactggagagcctgcgggagctggccggcaaggaaaacctggaataccctagcgtgaccctgccacctcagcctcacaccaaggagggcgttgatgcctacaacgaagtgatcgcccgggtgcgaatgtgggtgaacctgaacctgtggcagaagctgaagctaagcagagatgatgccaagcctctgctgagactgaagggattcccttcctttcctctggtcgagagacaggccaacgaagtggactggtgggacatggtgtgtaacgtgaagaagctgatcaacgagaaaaaggaggatggcaaggtgttttggcagaatctggctggctacaagagacaggaagccctgagaccatacctgagcagcgaggaagatcggaagaagggaaagaaattcgctcggtaccagctgggcgacctgctgctgcacctggaaaagaagcacggcgaggactggggaaaggtgtacgacgaggcctgggagcggattgacaagaaagtggaaggcctgagcaagcacatcaagctggaagaggaacggagaagcgaggacgcccagagcaaggccgccctgaccgactggctgcgggctaaggccagcttcgtgatcgagggcctgaaggaggccgacaaggacgagttctgcagatgcgagctgaagctgcagaagtggtacggggacctgcggggaaagcccttcgccatcgaagccgagaacagcatcctggacatcagcggcttcagcaagcagtacaactgtgccttcatctggcagaaggacggcgtgaagaagctgaacctgtacctgatcatcaactacttcaagggcggcaagctgcggttcaagaagatcaaacctgaagccttcgaagccaacagattctacaccgtgatcaacaaaaagagcggcgagatcgtgcccatggaggtgaacttcaacttcgacgaccccaacctgatcatcctgcctctggcctttggcaagagacagggcagagaattcatctggaacgacctgctgtccctggaaaccggcagcctgaagctggccaacggaagagtgatcgagaagacactgtacaacagaagaacccggcaggatgagcctgccctgttcgtggccctgaccttcgagcggcgggaggtcctggactcctccaatatcaaaccaatgaacctgatcggcgtggcaagaggcgaaaacatccccgccgtgatcgccctgaccgaccccgagggctgcccactgagccggtttaaggatagcctgggaaacccaacccacatcctgagaatcggcgagagctataaggagaagcagcggaccatccaggccaagaaggaggtggagcagcggagagccggcggctacagccggaagtacgccagcaaagccaagaatctggcagacgatatggtgagaaacaccgctagagatctgctgtactacgccgtgacccaggatgccatgctgatcttcgccaacctgagccggggcttcggccggcagggcaagcggaccttcatggccgagagacagtacacacggatggaggactggctgaccgccaagctggcctacgagggcctgagcaagacctacctgtccaagacactggcccagtacacctccaagacatgcagcaactgtgggtttaccatcaccagcgccgactacgacagggtgctggagaagctgaagaagacagcaacaggctggatgaccacaattaacggcaaggagctgaaggtggagggccagattacctactacaacagatacaagagacagaacgtagtcaaggacctgtccgtcgagctggatagactgagcgaagaatctgtgaacaacgacatctcctcctggacaaagggcagaagcggagaagctctgagcctcctgaagaaaagattctcccatagacccgtgcaggagaagttcgtgtgcctgaactgcggcttcgagacacacgcagccgagcaagccgccctgaacatcgccagatcctggctgttcctgcggagccaggagtacaagaaataccagacaaacaagacaaccggcaacaccgataagagagccttcgtcgagacctggcagtccttttaccggaagaagcttaaggaggtgtggaaacctgccgtgcggtctggcggatctggcggaggctccaccagccccaagaaaaagagaaaagtctaagctgccttctgcggggcttgccttctggccatgcccttcttctctcccttgcacctgtacctcttggtctttgaataaagcctgagtaggaaggctagcaaaaaaaaaaaaaaaaaaaaaaaaaaaaaaaaaaaaaaaaaaaaaaaaaaaaaaaaaaaaaaaaaaaaaaaaaaaaaaaa

SEQ ID NO: 12767 - RNA, 5785 nt, synthetic construct
  source 1..5785: mol_type = other RNA
aggaaataagagagaaaagaagagtaagaagaaatataagagccaccatggcccctaagaagaagcgtaaagtgagccggatggaacgcctcgtctacgaggtgcggcagaagtgcagaaacatcgaggacatctgcatctcctgcggatctctgaacgtgaccctggagcacccactgttcatcggcggcatgtgccagaactgtaaaaactgttttctggagtgtgcctatcaatacgacgatgacggctaccagagctactgcaccatctgttgcggcggaagagaggtgctgatgtgtggaaataacaactgctgccggtgcttctgcgtggaatgcgtggacctgctggtgggccccggcgccgcccaggccgctattaaggaagatccttggaactgctacatgtgcggccacaagggcacatacggcctgctgagacggagagaggactggcctagcagactgcagatgttcttcgccaataaccacgaccaggagttcgacccccctaaggtgtaccctcccgtccccgccgagaagagaaagcccatccgggtcctgagcctgttcgatggcatcgccaccggtctgctggtgctgaaggacctgggcatccaggtggataggtacattgcctccgaggtgtgcgaggactccatcaccgtgggaatggtgcgtcatcagggcaagatcatgtacgtgggcgacgtgcggagcgtgacacagaagcatatccaggagtggggccctttcgacctggtgatcggcggcagcccttgcaatgacctgagcatcgtgaacccagcccggaagggcctgtacgagggaaccggcagactgttcttcgagttttacagactgctgcacgacgcccggcctaaggaaggcgacgaccggcccttcttttggctgttcgagaatgtggtggccatgggagtcagcgacaagcgggatattagccggttcctggagagcaaccccgtgatgatcgatgccaaggaagtgagcgccgcccaccgggccagatacttctggggcaatctgcctggcatgaacagacccctggccagcaccgtgaacgacaagctggagctgcaggagtgcctggagcacggccggatcgccaagttcagcaaggtgagaaccatcaccacccgaagcaacagcatcaaacaaggcaaggaccagcactttcctgtgttcatgaacgagaaggaggacatcctgtggtgtaccgagatggagagagtgttcgggttcccagtccactacacagatgtcagcaacatgtctagactggccagacagagactgctgggaagaagctggtccgtccctgtgatcagacacctgttcgcccctctgaaggagtacttcgcctgcgtgagcagcggcaacagcaacgccaacagccggggccccagcttctctagcggcctggtgccactgtccctgagagggagccacatgggccccatggagatctacaaaaccgtgagcgcctggaagcggcagcctgtgcgcgtgctgagcctgtttcggaatatcgataaagtcctgaaaagcctgggattcctggagagcggctctggctccggcggtggcaccctgaagtacgtggaggatgtgacaaacgtggtcagacgggatgtggagaagtggggccccttcgatctggtgtacggcagcacccaacccctgggcagctcttgtgaccggtgccctggctggtacatgtttcagttccaccggatcctgcagtacgccctgccgagacaggagtcccagcggccattcttttggattttcatggacaacttgctgctgaccgaggatgaccaggaaactaccactcggttcctgcagaccgaagccgtgaccctgcaggacgtgagaggccgggactaccagaacgccatgcgggtgtggtccaacatccctggactgaaaagcaagcacgcacctctgacccctaaagaagaggagtacctgcaggcccaggtgcggagcagaagcaagctggacgcccctaaggtggatctgctggtgaagaattgcctcctgcccctgagagagtacttcaagtatttcagccagaatagtctgcccctgggaggcagcggcggcggcctgcaggagagcgtgaccttcagcgacgtggccgtggacttcaccctggaggagtggggctgcctgtgccccccccagaaggagatgtacagggaggtgatgctggagaactacggcaacctggtgtgcctgggcctggccatgagcaagcccgacgtgatcagcaggctggagaggggcgaggcccccaggagccccggcggcgacctgggcagcgccgactggggcaccgagagcggcgccggcggcccaagcagcggcgcccctcctcccagcggcggcagcccagccggctccccaacctctaccgaggagggcacctctgagtccgccacccccgagagcggccctggcacctccaccgagcccagcgagggcagcgcacccggcagccctgccggcagccccacctccacagaggagggaaccagcaccgagcccagcgaaggcagcgccccaggcaccagcaccgagcctagtgagcaggagattaaacggatcaacaagatcagaagaagacttgtgaaagacagcaacaccaagaaggccggcaagacaggccccatgaaaaccctgctggttagagtgatgacacccgatctgagagagcggctggaaaacctgagaaagaagcctgaaaatatcccccagcccatcagcaatacatctagagccaacctgaataagctgctgaccgattacaccgaaatgaagaaggcgatcctgcatgtgtactgggaagagttccagaaggaccctgtgggcctgatgagccgggtggcccagcctgccagcaagaagatcgatcagaacaagctgaaacctgagatggacgagaagggcaacctgaccaccgccggctttgcctgctctcagtgtggccagcccctgttcgtgtacaagctggagcaggtgtctgagaagggcaaggcttacaccaactacttcggacggtgcaatgtggccgagcacgaaaagctgatcctgctggcccagctgaagcccgagaaggatagcgacgaagccgtgacatatagcctgggaaagtttgggcagagggccctggatttctacagcattcatgtgaccaaggagtccacccaccccgtgaagcccctggcccagatcgccggaaacagatacgcctccggacctgtgggaaaggccctgagcgacgcatgtatgggcacaatcgcctccttcctgtctaagtaccaggacatcatcatcgaacaccagaaggtggtgaagggcaaccagaagagactggagagcctgcgggagctggccggcaaggaaaacctggaataccctagcgtgaccctgccacctcagcctcacaccaaggagggcgttgatgcctacaacgaagtgatcgcccgggtgcgaatgtgggtgaacctgaacctgtggcagaagctgaagctaagcagagatgatgccaagcctctgctgagactgaagggattcccttcctttcctctggtcgagagacaggccaacgaagtggactggtgggacatggtgtgtaacgtgaagaagctgatcaacgagaaaaaggaggatggcaaggtgttttggcagaatctggctggctacaagagacaggaagccctgagaccatacctgagcagcgaggaagatcggaagaagggaaagaaattcgctcggtaccagctgggcgacctgctgctgcacctggaaaagaagcacggcgaggactggggaaaggtgtacgacgaggcctgggagcggattgacaagaaagtggaaggcctgagcaagcacatcaagctggaagaggaacggagaagcgaggacgcccagagcaaggccgccctgaccgactggctgcgggctaaggccagcttcgtgatcgagggcctgaaggaggccgacaaggacgagttctgcagatgcgagctgaagctgcagaagtggtacggggacctgcggggaaagcccttcgccatcgaagccgagaacagcatcctggacatcagcggcttcagcaagcagtacaactgtgccttcatctggcagaaggacggcgtgaagaagctgaacctgtacctgatcatcaactacttcaagggcggcaagctgcggttcaagaagatcaaacctgaagccttcgaagccaacagattctacaccgtgatcaacaaaaagagcggcgagatcgtgcccatggaggtgaacttcaacttcgacgaccccaacctgatcatcctgcctctggcctttggcaagagacagggcagagaattcatctggaacgacctgctgtccctggaaaccggcagcctgaagctggccaacggaagagtgatcgagaagacactgtacaacagaagaacccggcaggatgagcctgccctgttcgtggccctgaccttcgagcggcgggaggtcctggactcctccaatatcaaaccaatgaacctgatcggcgtggcaagaggcgaaaacatccccgccgtgatcgccctgaccgaccccgagggctgcccactgagccggtttaaggatagcctgggaaacccaacccacatcctgagaatcggcgagagctataaggagaagcagcggaccatccaggccaagaaggaggtggagcagcggagagccggcggctacagccggaagtacgccagcaaagccaagaatctggcagacgatatggtgagaaacaccgctagagatctgctgtactacgccgtgacccaggatgccatgctgatcttcgccaacctgagccggggcttcggccggcagggcaagcggaccttcatggccgagagacagtacacacggatggaggactggctgaccgccaagctggcctacgagggcctgagcaagacctacctgtccaagacactggcccagtacacctccaagacatgcagcaactgtgggtttaccatcaccagcgccgactacgacagggtgctggagaagctgaagaagacagcaacaggctggatgaccacaattaacggcaaggagctgaaggtggagggccagattacctactacaacagatacaagagacagaacgtagtcaaggacctgtccgtcgagctggatagactgagcgaagaatctgtgaacaacgacatctcctcctggacaaagggcagaagcggagaagctctgagcctcctgaagaaaagattctcccatagacccgtgcaggagaagttcgtgtgcctgaactgcggcttcgagacacacgcagccgagcaagccgccctgaacatcgccagatcctggctgttcctgcggagccaggagtacaagaaataccagacaaacaagacaaccggcaacaccgataagagagccttcgtcgagacctggcagtccttttaccggaagaagcttaaggaggtgtggaaacctgccgtgcggtctggcggatctggcggaggctccaccagccccaagaaaaagagaaaagtctaagctgccttctgcggggcttgccttctggccatgcccttcttctctcccttgcacctgtacctcttggtctttgaataaagcctgagtaggaaggctagcaaaaaaaaaaaaaaaaaaaaaaaaaaaaaaaaaaaaaaaaaaaaaaaaaaaaaaaaaaaaaaaaaaaaaaaaaaaaaaaa

SEQ ID NO: 12768 - RNA, 5785 nt, synthetic construct
  source 1..5785: mol_type = other RNA
aggaaataagagagaaaagaagagtaagaagaaatataagagccaccatggcccctaagaagaagcgtaaagtgagccggatggaacgcctcgtctacgaggtgcggcagaagtgcagaaacatcgaggacatctgcatctcctgcggatctctgaacgtgaccctggagcacccactgttcatcggcggcatgtgccagaactgtaaaaactgttttctggagtgtgcctatcaatacgacgatgacggctaccagagctactgcaccatctgttgcggcggaagagaggtgctgatgtgtggaaataacaactgctgccggtgcttctgcgtggaatgcgtggacctgctggtgggccccggcgccgcccaggccgctattaaggaagatccttggaactgctacatgtgcggccacaagggcacatacggcctgctgagacggagagaggactggcctagcagactgcagatgttcttcgccaataaccacgaccaggagttcgacccccctaaggtgtaccctcccgtccccgccgagaagagaaagcccatccgggtcctgagcctgttcgatggcatcgccaccggtctgctggtgctgaaggacctgggcatccaggtggataggtacattgcctccgaggtgtgcgaggactccatcaccgtgggaatggtgcgtcatcagggcaagatcatgtacgtgggcgacgtgcggagcgtgacacagaagcatatccaggagtggggccctttcgacctggtgatcggcggcagcccttgcaatgacctgagcatcgtgaacccagcccggaagggcctgtacgagggaaccggcagactgttcttcgagttttacagactgctgcacgacgcccggcctaaggaaggcgacgaccggcccttcttttggctgttcgagaatgtggtggccatgggagtcagcgacaagcgggatattagccggttcctggagagcaaccccgtgatgatcgatgccaaggaagtgagcgccgcccaccgggccagatacttctggggcaatctgcctggcatgaacagacccctggccagcaccgtgaacgacaagctggagctgcaggagtgcctggagcacggccggatcgccaagttcagcaaggtgagaaccatcaccacccgaagcaacagcatcaaacaaggcaaggaccagcactttcctgtgttcatgaacgagaaggaggacatcctgtggtgtaccgagatggagagagtgttcgggttcccagtccactacacagatgtcagcaacatgtctagactggccagacagagactgctgggaagaagctggtccgtccctgtgatcagacacctgttcgcccctctgaaggagtacttcgcctgcgtgagcagcggcaacagcaacgccaacagccggggccccagcttctctagcggcctggtgccactgtccctgagagggagccacatgggccccatggagatctacaaaaccgtgagcgcctggaagcggcagcctgtgcgcgtgctgagcctgtttcggaatatcgataaagtcctgaaaagcctgggattcctggagagcggctctggctccggcggtggcaccctgaagtacgtggaggatgtgacaaacgtggtcagacgggatgtggagaagtggggccccttcgatctggtgtacggcagcacccaacccctgggcagctcttgtgaccggtgccctggctggtacatgtttcagttccaccggatcctgcagtacgccctgccgagacaggagtcccagcggccattcttttggattttcatggacaacttgctgctgaccgaggatgaccaggaaactaccactcggttcctgcagaccgaagccgtgaccctgcaggacgtgagaggccgggactaccagaacgccatgcgggtgtggtccaacatccctggactgaaaagcaagcacgcacctctgacccctaaagaagaggagtacctgcaggcccaggtgcggagcagaagcaagctggacgcccctaaggtggatctgctggtgaagaattgcctcctgcccctgagagagtacttcaagtatttcagccagaatagtctgcccctgggaggcagcggcggcggcagctgggccagcgtggtgttcgaggacgtggccgtgaacttcacccccgaggagtgggccctgctgaacaggggccagaggaagctgtacagggacgtgatgctggagacctgcaggaacctgagcgccgtggagaagaggaagttccacagcagcggcgacctgaccaggatgcaggagggcctgctgaggagccccctggtggagagcgtgtgcgagaggatcgagggcgacccctgcggcggcggcccaagcagcggcgcccctcctcccagcggcggcagcccagccggctccccaacctctaccgaggagggcacctctgagtccgccacccccgagagcggccctggcacctccaccgagcccagcgagggcagcgcacccggcagccctgccggcagccccacctccacagaggagggaaccagcaccgagcccagcgaaggcagcgccccaggcaccagcaccgagcctagtgagcaggagattaaacggatcaacaagatcagaagaagacttgtgaaagacagcaacaccaagaaggccggcaagacaggccccatgaaaaccctgctggttagagtgatgacacccgatctgagagagcggctggaaaacctgagaaagaagcctgaaaatatcccccagcccatcagcaatacatctagagccaacctgaataagctgctgaccgattacaccgaaatgaagaaggcgatcctgcatgtgtactgggaagagttccagaaggaccctgtgggcctgatgagccgggtggcccagcctgccagcaagaagatcgatcagaacaagctgaaacctgagatggacgagaagggcaacctgaccaccgccggctttgcctgctctcagtgtggccagcccctgttcgtgtacaagctggagcaggtgtctgagaagggcaaggcttacaccaactacttcggacggtgcaatgtggccgagcacgaaaagctgatcctgctggcccagctgaagcccgagaaggatagcgacgaagccgtgacatatagcctgggaaagtttgggcagagggccctggatttctacagcattcatgtgaccaaggagtccacccaccccgtgaagcccctggcccagatcgccggaaacagatacgcctccggacctgtgggaaaggccctgagcgacgcatgtatgggcacaatcgcctccttcctgtctaagtaccaggacatcatcatcgaacaccagaaggtggtgaagggcaaccagaagagactggagagcctgcgggagctggccggcaaggaaaacctggaataccctagcgtgaccctgccacctcagcctcacaccaaggagggcgttgatgcctacaacgaagtgatcgcccgggtgcgaatgtgggtgaacctgaacctgtggcagaagctgaagctaagcagagatgatgccaagcctctgctgagactgaagggattcccttcctttcctctggtcgagagacaggccaacgaagtggactggtgggacatggtgtgtaacgtgaagaagctgatcaacgagaaaaaggaggatggcaaggtgttttggcagaatctggctggctacaagagacaggaagccctgagaccatacctgagcagcgaggaagatcggaagaagggaaagaaattcgctcggtaccagctgggcgacctgctgctgcacctggaaaagaagcacggcgaggactggggaaaggtgtacgacgaggcctgggagcggattgacaagaaagtggaaggcctgagcaagcacatcaagctggaagaggaacggagaagcgaggacgcccagagcaaggccgccctgaccgactggctgcgggctaaggccagcttcgtgatcgagggcctgaaggaggccgacaaggacgagttctgcagatgcgagctgaagctgcagaagtggtacggggacctgcggggaaagcccttcgccatcgaagccgagaacagcatcctggacatcagcggcttcagcaagcagtacaactgtgccttcatctggcagaaggacggcgtgaagaagctgaacctgtacctgatcatcaactacttcaagggcggcaagctgcggttcaagaagatcaaacctgaagccttcgaagccaacagattctacaccgtgatcaacaaaaagagcggcgagatcgtgcccatggaggtgaacttcaacttcgacgaccccaacctgatcatcctgcctctggcctttggcaagagacagggcagagaattcatctggaacgacctgctgtccctggaaaccggcagcctgaagctggccaacggaagagtgatcgagaagacactgtacaacagaagaacccggcaggatgagcctgccctgttcgtggccctgaccttcgagcggcgggaggtcctggactcctccaatatcaaaccaatgaacctgatcggcgtggcaagaggcgaaaacatccccgccgtgatcgccctgaccgaccccgagggctgcccactgagccggtttaaggatagcctgggaaacccaacccacatcctgagaatcggcgagagctataaggagaagcagcggaccatccaggccaagaaggaggtggagcagcggagagccggcggctacagccggaagtacgccagcaaagccaagaatctggcagacgatatggtgagaaacaccgctagagatctgctgtactacgccgtgacccaggatgccatgctgatcttcgccaacctgagccggggcttcggccggcagggcaagcggaccttcatggccgagagacagtacacacggatggaggactggctgaccgccaagctggcctacgagggcctgagcaagacctacctgtccaagacactggcccagtacacctccaagacatgcagcaactgtgggtttaccatcaccagcgccgactacgacagggtgctggagaagctgaagaagacagcaacaggctggatgaccacaattaacggcaaggagctgaaggtggagggccagattacctactacaacagatacaagagacagaacgtagtcaaggacctgtccgtcgagctggatagactgagcgaagaatctgtgaacaacgacatctcctcctggacaaagggcagaagcggagaagctctgagcctcctgaagaaaagattctcccatagacccgtgcaggagaagttcgtgtgcctgaactgcggcttcgagacacacgcagccgagcaagccgccctgaacatcgccagatcctggctgttcctgcggagccaggagtacaagaaataccagacaaacaagacaaccggcaacaccgataagagagccttcgtcgagacctggcagtccttttaccggaagaagcttaaggaggtgtggaaacctgccgtgcggtctggcggatctggcggaggctccaccagccccaagaaaaagagaaaagtctaagctgccttctgcggggcttgccttctggccatgcccttcttctctcccttgcacctgtacctcttggtctttgaataaagcctgagtaggaaggctagcaaaaaaaaaaaaaaaaaaaaaaaaaaaaaaaaaaaaaaaaaaaaaaaaaaaaaaaaaaaaaaaaaaaaaaaaaaaaaaaa

SEQ ID NO: 12769 - RNA, 5785 nt, synthetic construct
  source 1..5785: mol_type = other RNA
aggaaataagagagaaaagaagagtaagaagaaatataagagccaccatggcccctaagaagaagcgtaaagtgagccggatggaacgcctcgtctacgaggtgcggcagaagtgcagaaacatcgaggacatctgcatctcctgcggatctctgaacgtgaccctggagcacccactgttcatcggcggcatgtgccagaactgtaaaaactgttttctggagtgtgcctatcaatacgacgatgacggctaccagagctactgcaccatctgttgcggcggaagagaggtgctgatgtgtggaaataacaactgctgccggtgcttctgcgtggaatgcgtggacctgctggtgggccccggcgccgcccaggccgctattaaggaagatccttggaactgctacatgtgcggccacaagggcacatacggcctgctgagacggagagaggactggcctagcagactgcagatgttcttcgccaataaccacgaccaggagttcgacccccctaaggtgtaccctcccgtccccgccgagaagagaaagcccatccgggtcctgagcctgttcgatggcatcgccaccggtctgctggtgctgaaggacctgggcatccaggtggataggtacattgcctccgaggtgtgcgaggactccatcaccgtgggaatggtgcgtcatcagggcaagatcatgtacgtgggcgacgtgcggagcgtgacacagaagcatatccaggagtggggccctttcgacctggtgatcggcggcagcccttgcaatgacctgagcatcgtgaacccagcccggaagggcctgtacgagggaaccggcagactgttcttcgagttttacagactgctgcacgacgcccggcctaaggaaggcgacgaccggcccttcttttggctgttcgagaatgtggtggccatgggagtcagcgacaagcgggatattagccggttcctggagagcaaccccgtgatgatcgatgccaaggaagtgagcgccgcccaccgggccagatacttctggggcaatctgcctggcatgaacagacccctggccagcaccgtgaacgacaagctggagctgcaggagtgcctggagcacggccggatcgccaagttcagcaaggtgagaaccatcaccacccgaagcaacagcatcaaacaaggcaaggaccagcactttcctgtgttcatgaacgagaaggaggacatcctgtggtgtaccgagatggagagagtgttcgggttcccagtccactacacagatgtcagcaacatgtctagactggccagacagagactgctgggaagaagctggtccgtccctgtgatcagacacctgttcgcccctctgaaggagtacttcgcctgcgtgagcagcggcaacagcaacgccaacagccggggccccagcttctctagcggcctggtgccactgtccctgagagggagccacatgggccccatggagatctacaaaaccgtgagcgcctggaagcggcagcctgtgcgcgtgctgagcctgtttcggaatatcgataaagtcctgaaaagcctgggattcctggagagcggctctggctccggcggtggcaccctgaagtacgtggaggatgtgacaaacgtggtcagacgggatgtggagaagtggggccccttcgatctggtgtacggcagcacccaacccctgggcagctcttgtgaccggtgccctggctggtacatgtttcagttccaccggatcctgcagtacgccctgccgagacaggagtcccagcggccattcttttggattttcatggacaacttgctgctgaccgaggatgaccaggaaactaccactcggttcctgcagaccgaagccgtgaccctgcaggacgtgagaggccgggactaccagaacgccatgcgggtgtggtccaacatccctggactgaaaagcaagcacgcacctctgacccctaaagaagaggagtacctgcaggcccaggtgcggagcagaagcaagctggacgcccctaaggtggatctgctggtgaagaattgcctcctgcccctgagagagtacttcaagtatttcagccagaatagtctgcccctgggaggcagcggcggcggcgcccaggagagcctgaccctggaggacgtggccgtggacttcagcagggaggagtggaggctgctggcccccgcccagaaggacctgtacagggacgtgatgctggagaactacaggaacctggtgagcgtgggccaccaggccagcaagcccgacgtgctggccaggctggagaggggcgaggagccctgggccatcgaggaggaggtgaggagcggcaccagccccgagaccggcaaggtgggcggcccaagcagcggcgcccctcctcccagcggcggcagcccagccggctccccaacctctaccgaggagggcacctctgagtccgccacccccgagagcggccctggcacctccaccgagcccagcgagggcagcgcacccggcagccctgccggcagccccacctccacagaggagggaaccagcaccgagcccagcgaaggcagcgccccaggcaccagcaccgagcctagtgagcaggagattaaacggatcaacaagatcagaagaagacttgtgaaagacagcaacaccaagaaggccggcaagacaggccccatgaaaaccctgctggttagagtgatgacacccgatctgagagagcggctggaaaacctgagaaagaagcctgaaaatatcccccagcccatcagcaatacatctagagccaacctgaataagctgctgaccgattacaccgaaatgaagaaggcgatcctgcatgtgtactgggaagagttccagaaggaccctgtgggcctgatgagccgggtggcccagcctgccagcaagaagatcgatcagaacaagctgaaacctgagatggacgagaagggcaacctgaccaccgccggctttgcctgctctcagtgtggccagcccctgttcgtgtacaagctggagcaggtgtctgagaagggcaaggcttacaccaactacttcggacggtgcaatgtggccgagcacgaaaagctgatcctgctggcccagctgaagcccgagaaggatagcgacgaagccgtgacatatagcctgggaaagtttgggcagagggccctggatttctacagcattcatgtgaccaaggagtccacccaccccgtgaagcccctggcccagatcgccggaaacagatacgcctccggacctgtgggaaaggccctgagcgacgcatgtatgggcacaatcgcctccttcctgtctaagtaccaggacatcatcatcgaacaccagaaggtggtgaagggcaaccagaagagactggagagcctgcgggagctggccggcaaggaaaacctggaataccctagcgtgaccctgccacctcagcctcacaccaaggagggcgttgatgcctacaacgaagtgatcgcccgggtgcgaatgtgggtgaacctgaacctgtggcagaagctgaagctaagcagagatgatgccaagcctctgctgagactgaagggattcccttcctttcctctggtcgagagacaggccaacgaagtggactggtgggacatggtgtgtaacgtgaagaagctgatcaacgagaaaaaggaggatggcaaggtgttttggcagaatctggctggctacaagagacaggaagccctgagaccatacctgagcagcgaggaagatcggaagaagggaaagaaattcgctcggtaccagctgggcgacctgctgctgcacctggaaaagaagcacggcgaggactggggaaaggtgtacgacgaggcctgggagcggattgacaagaaagtggaaggcctgagcaagcacatcaagctggaagaggaacggagaagcgaggacgcccagagcaaggccgccctgaccgactggctgcgggctaaggccagcttcgtgatcgagggcctgaaggaggccgacaaggacgagttctgcagatgcgagctgaagctgcagaagtggtacggggacctgcggggaaagcccttcgccatcgaagccgagaacagcatcctggacatcagcggcttcagcaagcagtacaactgtgccttcatctggcagaaggacggcgtgaagaagctgaacctgtacctgatcatcaactacttcaagggcggcaagctgcggttcaagaagatcaaacctgaagccttcgaagccaacagattctacaccgtgatcaacaaaaagagcggcgagatcgtgcccatggaggtgaacttcaacttcgacgaccccaacctgatcatcctgcctctggcctttggcaagagacagggcagagaattcatctggaacgacctgctgtccctggaaaccggcagcctgaagctggccaacggaagagtgatcgagaagacactgtacaacagaagaacccggcaggatgagcctgccctgttcgtggccctgaccttcgagcggcgggaggtcctggactcctccaatatcaaaccaatgaacctgatcggcgtggcaagaggcgaaaacatccccgccgtgatcgccctgaccgaccccgagggctgcccactgagccggtttaaggatagcctgggaaacccaacccacatcctgagaatcggcgagagctataaggagaagcagcggaccatccaggccaagaaggaggtggagcagcggagagccggcggctacagccggaagtacgccagcaaagccaagaatctggcagacgatatggtgagaaacaccgctagagatctgctgtactacgccgtgacccaggatgccatgctgatcttcgccaacctgagccggggcttcggccggcagggcaagcggaccttcatggccgagagacagtacacacggatggaggactggctgaccgccaagctggcctacgagggcctgagcaagacctacctgtccaagacactggcccagtacacctccaagacatgcagcaactgtgggtttaccatcaccagcgccgactacgacagggtgctggagaagctgaagaagacagcaacaggctggatgaccacaattaacggcaaggagctgaaggtggagggccagattacctactacaacagatacaagagacagaacgtagtcaaggacctgtccgtcgagctggatagactgagcgaagaatctgtgaacaacgacatctcctcctggacaaagggcagaagcggagaagctctgagcctcctgaagaaaagattctcccatagacccgtgcaggagaagttcgtgtgcctgaactgcggcttcgagacacacgcagccgagcaagccgccctgaacatcgccagatcctggctgttcctgcggagccaggagtacaagaaataccagacaaacaagacaaccggcaacaccgataagagagccttcgtcgagacctggcagtccttttaccggaagaagcttaaggaggtgtggaaacctgccgtgcggtctggcggatctggcggaggctccaccagccccaagaaaaagagaaaagtctaagctgccttctgcggggcttgccttctggccatgcccttcttctctcccttgcacctgtacctcttggtctttgaataaagcctgagtaggaaggctagcaaaaaaaaaaaaaaaaaaaaaaaaaaaaaaaaaaaaaaaaaaaaaaaaaaaaaaaaaaaaaaaaaaaaaaaaaaaaaaaa

SEQ ID NO: 12770 - RNA, 5785 nt, synthetic construct
  source 1..5785: mol_type = other RNA
aggaaataagagagaaaagaagagtaagaagaaatataagagccaccatggcccctaagaagaagcgtaaagtgagccggatggaacgcctcgtctacgaggtgcggcagaagtgcagaaacatcgaggacatctgcatctcctgcggatctctgaacgtgaccctggagcacccactgttcatcggcggcatgtgccagaactgtaaaaactgttttctggagtgtgcctatcaatacgacgatgacggctaccagagctactgcaccatctgttgcggcggaagagaggtgctgatgtgtggaaataacaactgctgccggtgcttctgcgtggaatgcgtggacctgctggtgggccccggcgccgcccaggccgctattaaggaagatccttggaactgctacatgtgcggccacaagggcacatacggcctgctgagacggagagaggactggcctagcagactgcagatgttcttcgccaataaccacgaccaggagttcgacccccctaaggtgtaccctcccgtccccgccgagaagagaaagcccatccgggtcctgagcctgttcgatggcatcgccaccggtctgctggtgctgaaggacctgggcatccaggtggataggtacattgcctccgaggtgtgcgaggactccatcaccgtgggaatggtgcgtcatcagggcaagatcatgtacgtgggcgacgtgcggagcgtgacacagaagcatatccaggagtggggccctttcgacctggtgatcggcggcagcccttgcaatgacctgagcatcgtgaacccagcccggaagggcctgtacgagggaaccggcagactgttcttcgagttttacagactgctgcacgacgcccggcctaaggaaggcgacgaccggcccttcttttggctgttcgagaatgtggtggccatgggagtcagcgacaagcgggatattagccggttcctggagagcaaccccgtgatgatcgatgccaaggaagtgagcgccgcccaccgggccagatacttctggggcaatctgcctggcatgaacagacccctggccagcaccgtgaacgacaagctggagctgcaggagtgcctggagcacggccggatcgccaagttcagcaaggtgagaaccatcaccacccgaagcaacagcatcaaacaaggcaaggaccagcactttcctgtgttcatgaacgagaaggaggacatcctgtggtgtaccgagatggagagagtgttcgggttcccagtccactacacagatgtcagcaacatgtctagactggccagacagagactgctgggaagaagctggtccgtccctgtgatcagacacctgttcgcccctctgaaggagtacttcgcctgcgtgagcagcggcaacagcaacgccaacagccggggccccagcttctctagcggcctggtgccactgtccctgagagggagccacatgggccccatggagatctacaaaaccgtgagcgcctggaagcggcagcctgtgcgcgtgctgagcctgtttcggaatatcgataaagtcctgaaaagcctgggattcctggagagcggctctggctccggcggtggcaccctgaagtacgtggaggatgtgacaaacgtggtcagacgggatgtggagaagtggggccccttcgatctggtgtacggcagcacccaacccctgggcagctcttgtgaccggtgccctggctggtacatgtttcagttccaccggatcctgcagtacgccctgccgagacaggagtcccagcggccattcttttggattttcatggacaacttgctgctgaccgaggatgaccaggaaactaccactcggttcctgcagaccgaagccgtgaccctgcaggacgtgagaggccgggactaccagaacgccatgcgggtgtggtccaacatccctggactgaaaagcaagcacgcacctctgacccctaaagaagaggagtacctgcaggcccaggtgcggagcagaagcaagctggacgcccctaaggtggatctgctggtgaagaattgcctcctgcccctgagagagtacttcaagtatttcagccagaatagtctgcccctgggaggcagcggcggcggccaggagagcgtgaccttcaaggacgtggccgtggacttcacccaggaggagtggcaccacatggaccccacccagaggatcctgtacagggacgtgatgctggagacctacagccacctggtgagcctgggctaccaggtgagcaagcccgaggtgatcttcaagctggagcagggcgaggagccctggatcagcgaggaggagatccagaggcccttctgccccgactgggagatcaggcccggcggcccaagcagcggcgcccctcctcccagcggcggcagcccagccggctccccaacctctaccgaggagggcacctctgagtccgccacccccgagagcggccctggcacctccaccgagcccagcgagggcagcgcacccggcagccctgccggcagccccacctccacagaggagggaaccagcaccgagcccagcgaaggcagcgccccaggcaccagcaccgagcctagtgagcaggagattaaacggatcaacaagatcagaagaagacttgtgaaagacagcaacaccaagaaggccggcaagacaggccccatgaaaaccctgctggttagagtgatgacacccgatctgagagagcggctggaaaacctgagaaagaagcctgaaaatatcccccagcccatcagcaatacatctagagccaacctgaataagctgctgaccgattacaccgaaatgaagaaggcgatcctgcatgtgtactgggaagagttccagaaggaccctgtgggcctgatgagccgggtggcccagcctgccagcaagaagatcgatcagaacaagctgaaacctgagatggacgagaagggcaacctgaccaccgccggctttgcctgctctcagtgtggccagcccctgttcgtgtacaagctggagcaggtgtctgagaagggcaaggcttacaccaactacttcggacggtgcaatgtggccgagcacgaaaagctgatcctgctggcccagctgaagcccgagaaggatagcgacgaagccgtgacatatagcctgggaaagtttgggcagagggccctggatttctacagcattcatgtgaccaaggagtccacccaccccgtgaagcccctggcccagatcgccggaaacagatacgcctccggacctgtgggaaaggccctgagcgacgcatgtatgggcacaatcgcctccttcctgtctaagtaccaggacatcatcatcgaacaccagaaggtggtgaagggcaaccagaagagactggagagcctgcgggagctggccggcaaggaaaacctggaataccctagcgtgaccctgccacctcagcctcacaccaaggagggcgttgatgcctacaacgaagtgatcgcccgggtgcgaatgtgggtgaacctgaacctgtggcagaagctgaagctaagcagagatgatgccaagcctctgctgagactgaagggattcccttcctttcctctggtcgagagacaggccaacgaagtggactggtgggacatggtgtgtaacgtgaagaagctgatcaacgagaaaaaggaggatggcaaggtgttttggcagaatctggctggctacaagagacaggaagccctgagaccatacctgagcagcgaggaagatcggaagaagggaaagaaattcgctcggtaccagctgggcgacctgctgctgcacctggaaaagaagcacggcgaggactggggaaaggtgtacgacgaggcctgggagcggattgacaagaaagtggaaggcctgagcaagcacatcaagctggaagaggaacggagaagcgaggacgcccagagcaaggccgccctgaccgactggctgcgggctaaggccagcttcgtgatcgagggcctgaaggaggccgacaaggacgagttctgcagatgcgagctgaagctgcagaagtggtacggggacctgcggggaaagcccttcgccatcgaagccgagaacagcatcctggacatcagcggcttcagcaagcagtacaactgtgccttcatctggcagaaggacggcgtgaagaagctgaacctgtacctgatcatcaactacttcaagggcggcaagctgcggttcaagaagatcaaacctgaagccttcgaagccaacagattctacaccgtgatcaacaaaaagagcggcgagatcgtgcccatggaggtgaacttcaacttcgacgaccccaacctgatcatcctgcctctggcctttggcaagagacagggcagagaattcatctggaacgacctgctgtccctggaaaccggcagcctgaagctggccaacggaagagtgatcgagaagacactgtacaacagaagaacccggcaggatgagcctgccctgttcgtggccctgaccttcgagcggcgggaggtcctggactcctccaatatcaaaccaatgaacctgatcggcgtggcaagaggcgaaaacatccccgccgtgatcgccctgaccgaccccgagggctgcccactgagccggtttaaggatagcctgggaaacccaacccacatcctgagaatcggcgagagctataaggagaagcagcggaccatccaggccaagaaggaggtggagcagcggagagccggcggctacagccggaagtacgccagcaaagccaagaatctggcagacgatatggtgagaaacaccgctagagatctgctgtactacgccgtgacccaggatgccatgctgatcttcgccaacctgagccggggcttcggccggcagggcaagcggaccttcatggccgagagacagtacacacggatggaggactggctgaccgccaagctggcctacgagggcctgagcaagacctacctgtccaagacactggcccagtacacctccaagacatgcagcaactgtgggtttaccatcaccagcgccgactacgacagggtgctggagaagctgaagaagacagcaacaggctggatgaccacaattaacggcaaggagctgaaggtggagggccagattacctactacaacagatacaagagacagaacgtagtcaaggacctgtccgtcgagctggatagactgagcgaagaatctgtgaacaacgacatctcctcctggacaaagggcagaagcggagaagctctgagcctcctgaagaaaagattctcccatagacccgtgcaggagaagttcgtgtgcctgaactgcggcttcgagacacacgcagccgagcaagccgccctgaacatcgccagatcctggctgttcctgcggagccaggagtacaagaaataccagacaaacaagacaaccggcaacaccgataagagagccttcgtcgagacctggcagtccttttaccggaagaagcttaaggaggtgtggaaacctgccgtgcggtctggcggatctggcggaggctccaccagccccaagaaaaagagaaaagtctaagctgccttctgcggggcttgccttctggccatgcccttcttctctcccttgcacctgtacctcttggtctttgaataaagcctgagtaggaaggctagcaaaaaaaaaaaaaaaaaaaaaaaaaaaaaaaaaaaaaaaaaaaaaaaaaaaaaaaaaaaaaaaaaaaaaaaaaaaaaaaa

SEQ ID NO: 12771 - RNA, 5785 nt, synthetic construct
  source 1..5785: mol_type = other RNA
aggaaataagagagaaaagaagagtaagaagaaatataagagccaccatggcccctaagaagaagcgtaaagtgagccggatggaacgcctcgtctacgaggtgcggcagaagtgcagaaacatcgaggacatctgcatctcctgcggatctctgaacgtgaccctggagcacccactgttcatcggcggcatgtgccagaactgtaaaaactgttttctggagtgtgcctatcaatacgacgatgacggctaccagagctactgcaccatctgttgcggcggaagagaggtgctgatgtgtggaaataacaactgctgccggtgcttctgcgtggaatgcgtggacctgctggtgggccccggcgccgcccaggccgctattaaggaagatccttggaactgctacatgtgcggccacaagggcacatacggcctgctgagacggagagaggactggcctagcagactgcagatgttcttcgccaataaccacgaccaggagttcgacccccctaaggtgtaccctcccgtccccgccgagaagagaaagcccatccgggtcctgagcctgttcgatggcatcgccaccggtctgctggtgctgaaggacctgggcatccaggtggataggtacattgcctccgaggtgtgcgaggactccatcaccgtgggaatggtgcgtcatcagggcaagatcatgtacgtgggcgacgtgcggagcgtgacacagaagcatatccaggagtggggccctttcgacctggtgatcggcggcagcccttgcaatgacctgagcatcgtgaacccagcccggaagggcctgtacgagggaaccggcagactgttcttcgagttttacagactgctgcacgacgcccggcctaaggaaggcgacgaccggcccttcttttggctgttcgagaatgtggtggccatgggagtcagcgacaagcgggatattagccggttcctggagagcaaccccgtgatgatcgatgccaaggaagtgagcgccgcccaccgggccagatacttctggggcaatctgcctggcatgaacagacccctggccagcaccgtgaacgacaagctggagctgcaggagtgcctggagcacggccggatcgccaagttcagcaaggtgagaaccatcaccacccgaagcaacagcatcaaacaaggcaaggaccagcactttcctgtgttcatgaacgagaaggaggacatcctgtggtgtaccgagatggagagagtgttcgggttcccagtccactacacagatgtcagcaacatgtctagactggccagacagagactgctgggaagaagctggtccgtccctgtgatcagacacctgttcgcccctctgaaggagtacttcgcctgcgtgagcagcggcaacagcaacgccaacagccggggccccagcttctctagcggcctggtgccactgtccctgagagggagccacatgggccccatggagatctacaaaaccgtgagcgcctggaagcggcagcctgtgcgcgtgctgagcctgtttcggaatatcgataaagtcctgaaaagcctgggattcctggagagcggctctggctccggcggtggcaccctgaagtacgtggaggatgtgacaaacgtggtcagacgggatgtggagaagtggggccccttcgatctggtgtacggcagcacccaacccctgggcagctcttgtgaccggtgccctggctggtacatgtttcagttccaccggatcctgcagtacgccctgccgagacaggagtcccagcggccattcttttggattttcatggacaacttgctgctgaccgaggatgaccaggaaactaccactcggttcctgcagaccgaagccgtgaccctgcaggacgtgagaggccgggactaccagaacgccatgcgggtgtggtccaacatccctggactgaaaagcaagcacgcacctctgacccctaaagaagaggagtacctgcaggcccaggtgcggagcagaagcaagctggacgcccctaaggtggatctgctggtgaagaattgcctcctgcccctgagagagtacttcaagtatttcagccagaatagtctgcccctgggaggcagcggcggcggcgccagggacctggtgatgttcagggacgtggccgtggacttcagccaggaggagtgggagtgcctgaacagctaccagaggaacctgtacagggacgtgatcctggagaactacagcaacctggtgagcctgggctgcagcatcagcaagcccgacgtgatcaccctgctggagcagggcaaggagccctggctggtggtgagggacgagaagaggaggtggagcctgggccccaccttcaagggcggcccaagcagcggcgcccctcctcccagcggcggcagcccagccggctccccaacctctaccgaggagggcacctctgagtccgccacccccgagagcggccctggcacctccaccgagcccagcgagggcagcgcacccggcagccctgccggcagccccacctccacagaggagggaaccagcaccgagcccagcgaaggcagcgccccaggcaccagcaccgagcctagtgagcaggagattaaacggatcaacaagatcagaagaagacttgtgaaagacagcaacaccaagaaggccggcaagacaggccccatgaaaaccctgctggttagagtgatgacacccgatctgagagagcggctggaaaacctgagaaagaagcctgaaaatatcccccagcccatcagcaatacatctagagccaacctgaataagctgctgaccgattacaccgaaatgaagaaggcgatcctgcatgtgtactgggaagagttccagaaggaccctgtgggcctgatgagccgggtggcccagcctgccagcaagaagatcgatcagaacaagctgaaacctgagatggacgagaagggcaacctgaccaccgccggctttgcctgctctcagtgtggccagcccctgttcgtgtacaagctggagcaggtgtctgagaagggcaaggcttacaccaactacttcggacggtgcaatgtggccgagcacgaaaagctgatcctgctggcccagctgaagcccgagaaggatagcgacgaagccgtgacatatagcctgggaaagtttgggcagagggccctggatttctacagcattcatgtgaccaaggagtccacccaccccgtgaagcccctggcccagatcgccggaaacagatacgcctccggacctgtgggaaaggccctgagcgacgcatgtatgggcacaatcgcctccttcctgtctaagtaccaggacatcatcatcgaacaccagaaggtggtgaagggcaaccagaagagactggagagcctgcgggagctggccggcaaggaaaacctggaataccctagcgtgaccctgccacctcagcctcacaccaaggagggcgttgatgcctacaacgaagtgatcgcccgggtgcgaatgtgggtgaacctgaacctgtggcagaagctgaagctaagcagagatgatgccaagcctctgctgagactgaagggattcccttcctttcctctggtcgagagacaggccaacgaagtggactggtgggacatggtgtgtaacgtgaagaagctgatcaacgagaaaaaggaggatggcaaggtgttttggcagaatctggctggctacaagagacaggaagccctgagaccatacctgagcagcgaggaagatcggaagaagggaaagaaattcgctcggtaccagctgggcgacctgctgctgcacctggaaaagaagcacggcgaggactggggaaaggtgtacgacgaggcctgggagcggattgacaagaaagtggaaggcctgagcaagcacatcaagctggaagaggaacggagaagcgaggacgcccagagcaaggccgccctgaccgactggctgcgggctaaggccagcttcgtgatcgagggcctgaaggaggccgacaaggacgagttctgcagatgcgagctgaagctgcagaagtggtacggggacctgcggggaaagcccttcgccatcgaagccgagaacagcatcctggacatcagcggcttcagcaagcagtacaactgtgccttcatctggcagaaggacggcgtgaagaagctgaacctgtacctgatcatcaactacttcaagggcggcaagctgcggttcaagaagatcaaacctgaagccttcgaagccaacagattctacaccgtgatcaacaaaaagagcggcgagatcgtgcccatggaggtgaacttcaacttcgacgaccccaacctgatcatcctgcctctggcctttggcaagagacagggcagagaattcatctggaacgacctgctgtccctggaaaccggcagcctgaagctggccaacggaagagtgatcgagaagacactgtacaacagaagaacccggcaggatgagcctgccctgttcgtggccctgaccttcgagcggcgggaggtcctggactcctccaatatcaaaccaatgaacctgatcggcgtggcaagaggcgaaaacatccccgccgtgatcgccctgaccgaccccgagggctgcccactgagccggtttaaggatagcctgggaaacccaacccacatcctgagaatcggcgagagctataaggagaagcagcggaccatccaggccaagaaggaggtggagcagcggagagccggcggctacagccggaagtacgccagcaaagccaagaatctggcagacgatatggtgagaaacaccgctagagatctgctgtactacgccgtgacccaggatgccatgctgatcttcgccaacctgagccggggcttcggccggcagggcaagcggaccttcatggccgagagacagtacacacggatggaggactggctgaccgccaagctggcctacgagggcctgagcaagacctacctgtccaagacactggcccagtacacctccaagacatgcagcaactgtgggtttaccatcaccagcgccgactacgacagggtgctggagaagctgaagaagacagcaacaggctggatgaccacaattaacggcaaggagctgaaggtggagggccagattacctactacaacagatacaagagacagaacgtagtcaaggacctgtccgtcgagctggatagactgagcgaagaatctgtgaacaacgacatctcctcctggacaaagggcagaagcggagaagctctgagcctcctgaagaaaagattctcccatagacccgtgcaggagaagttcgtgtgcctgaactgcggcttcgagacacacgcagccgagcaagccgccctgaacatcgccagatcctggctgttcctgcggagccaggagtacaagaaataccagacaaacaagacaaccggcaacaccgataagagagccttcgtcgagacctggcagtccttttaccggaagaagcttaaggaggtgtggaaacctgccgtgcggtctggcggatctggcggaggctccaccagccccaagaaaaagagaaaagtctaagctgccttctgcggggcttgccttctggccatgcccttcttctctcccttgcacctgtacctcttggtctttgaataaagcctgagtaggaaggctagcaaaaaaaaaaaaaaaaaaaaaaaaaaaaaaaaaaaaaaaaaaaaaaaaaaaaaaaaaaaaaaaaaaaaaaaaaaaaaaaa

SEQ ID NO: 12772 - RNA, 5785 nt, synthetic construct
  source 1..5785: mol_type = other RNA
aggaaataagagagaaaagaagagtaagaagaaatataagagccaccatggcccctaagaagaagcgtaaagtgagccggatggaacgcctcgtctacgaggtgcggcagaagtgcagaaacatcgaggacatctgcatctcctgcggatctctgaacgtgaccctggagcacccactgttcatcggcggcatgtgccagaactgtaaaaactgttttctggagtgtgcctatcaatacgacgatgacggctaccagagctactgcaccatctgttgcggcggaagagaggtgctgatgtgtggaaataacaactgctgccggtgcttctgcgtggaatgcgtggacctgctggtgggccccggcgccgcccaggccgctattaaggaagatccttggaactgctacatgtgcggccacaagggcacatacggcctgctgagacggagagaggactggcctagcagactgcagatgttcttcgccaataaccacgaccaggagttcgacccccctaaggtgtaccctcccgtccccgccgagaagagaaagcccatccgggtcctgagcctgttcgatggcatcgccaccggtctgctggtgctgaaggacctgggcatccaggtggataggtacattgcctccgaggtgtgcgaggactccatcaccgtgggaatggtgcgtcatcagggcaagatcatgtacgtgggcgacgtgcggagcgtgacacagaagcatatccaggagtggggccctttcgacctggtgatcggcggcagcccttgcaatgacctgagcatcgtgaacccagcccggaagggcctgtacgagggaaccggcagactgttcttcgagttttacagactgctgcacgacgcccggcctaaggaaggcgacgaccggcccttcttttggctgttcgagaatgtggtggccatgggagtcagcgacaagcgggatattagccggttcctggagagcaaccccgtgatgatcgatgccaaggaagtgagcgccgcccaccgggccagatacttctggggcaatctgcctggcatgaacagacccctggccagcaccgtgaacgacaagctggagctgcaggagtgcctggagcacggccggatcgccaagttcagcaaggtgagaaccatcaccacccgaagcaacagcatcaaacaaggcaaggaccagcactttcctgtgttcatgaacgagaaggaggacatcctgtggtgtaccgagatggagagagtgttcgggttcccagtccactacacagatgtcagcaacatgtctagactggccagacagagactgctgggaagaagctggtccgtccctgtgatcagacacctgttcgcccctctgaaggagtacttcgcctgcgtgagcagcggcaacagcaacgccaacagccggggccccagcttctctagcggcctggtgccactgtccctgagagggagccacatgggccccatggagatctacaaaaccgtgagcgcctggaagcggcagcctgtgcgcgtgctgagcctgtttcggaatatcgataaagtcctgaaaagcctgggattcctggagagcggctctggctccggcggtggcaccctgaagtacgtggaggatgtgacaaacgtggtcagacgggatgtggagaagtggggccccttcgatctggtgtacggcagcacccaacccctgggcagctcttgtgaccggtgccctggctggtacatgtttcagttccaccggatcctgcagtacgccctgccgagacaggagtcccagcggccattcttttggattttcatggacaacttgctgctgaccgaggatgaccaggaaactaccactcggttcctgcagaccgaagccgtgaccctgcaggacgtgagaggccgggactaccagaacgccatgcgggtgtggtccaacatccctggactgaaaagcaagcacgcacctctgacccctaaagaagaggagtacctgcaggcccaggtgcggagcagaagcaagctggacgcccctaaggtggatctgctggtgaagaattgcctcctgcccctgagagagtacttcaagtatttcagccagaatagtctgcccctgggaggcagcggcggcggcagccagggcaggctgaccttccaggacgtggccatcgacttcacccaggaggagtgggagtgcctggacctgggccagagggagctgtacagggacgtgatgctggagaactacggcaacctggccagcctgggcctggtgatcagcaagcccgacctggtgaccttcctggagcagatgaaggacccctgggacaccaggaggatggagacccccgccgtgcaccccgccgtgagcagccacggcggcccaagcagcggcgcccctcctcccagcggcggcagcccagccggctccccaacctctaccgaggagggcacctctgagtccgccacccccgagagcggccctggcacctccaccgagcccagcgagggcagcgcacccggcagccctgccggcagccccacctccacagaggagggaaccagcaccgagcccagcgaaggcagcgccccaggcaccagcaccgagcctagtgagcaggagattaaacggatcaacaagatcagaagaagacttgtgaaagacagcaacaccaagaaggccggcaagacaggccccatgaaaaccctgctggttagagtgatgacacccgatctgagagagcggctggaaaacctgagaaagaagcctgaaaatatcccccagcccatcagcaatacatctagagccaacctgaataagctgctgaccgattacaccgaaatgaagaaggcgatcctgcatgtgtactgggaagagttccagaaggaccctgtgggcctgatgagccgggtggcccagcctgccagcaagaagatcgatcagaacaagctgaaacctgagatggacgagaagggcaacctgaccaccgccggctttgcctgctctcagtgtggccagcccctgttcgtgtacaagctggagcaggtgtctgagaagggcaaggcttacaccaactacttcggacggtgcaatgtggccgagcacgaaaagctgatcctgctggcccagctgaagcccgagaaggatagcgacgaagccgtgacatatagcctgggaaagtttgggcagagggccctggatttctacagcattcatgtgaccaaggagtccacccaccccgtgaagcccctggcccagatcgccggaaacagatacgcctccggacctgtgggaaaggccctgagcgacgcatgtatgggcacaatcgcctccttcctgtctaagtaccaggacatcatcatcgaacaccagaaggtggtgaagggcaaccagaagagactggagagcctgcgggagctggccggcaaggaaaacctggaataccctagcgtgaccctgccacctcagcctcacaccaaggagggcgttgatgcctacaacgaagtgatcgcccgggtgcgaatgtgggtgaacctgaacctgtggcagaagctgaagctaagcagagatgatgccaagcctctgctgagactgaagggattcccttcctttcctctggtcgagagacaggccaacgaagtggactggtgggacatggtgtgtaacgtgaagaagctgatcaacgagaaaaaggaggatggcaaggtgttttggcagaatctggctggctacaagagacaggaagccctgagaccatacctgagcagcgaggaagatcggaagaagggaaagaaattcgctcggtaccagctgggcgacctgctgctgcacctggaaaagaagcacggcgaggactggggaaaggtgtacgacgaggcctgggagcggattgacaagaaagtggaaggcctgagcaagcacatcaagctggaagaggaacggagaagcgaggacgcccagagcaaggccgccctgaccgactggctgcgggctaaggccagcttcgtgatcgagggcctgaaggaggccgacaaggacgagttctgcagatgcgagctgaagctgcagaagtggtacggggacctgcggggaaagcccttcgccatcgaagccgagaacagcatcctggacatcagcggcttcagcaagcagtacaactgtgccttcatctggcagaaggacggcgtgaagaagctgaacctgtacctgatcatcaactacttcaagggcggcaagctgcggttcaagaagatcaaacctgaagccttcgaagccaacagattctacaccgtgatcaacaaaaagagcggcgagatcgtgcccatggaggtgaacttcaacttcgacgaccccaacctgatcatcctgcctctggcctttggcaagagacagggcagagaattcatctggaacgacctgctgtccctggaaaccggcagcctgaagctggccaacggaagagtgatcgagaagacactgtacaacagaagaacccggcaggatgagcctgccctgttcgtggccctgaccttcgagcggcgggaggtcctggactcctccaatatcaaaccaatgaacctgatcggcgtggcaagaggcgaaaacatccccgccgtgatcgccctgaccgaccccgagggctgcccactgagccggtttaaggatagcctgggaaacccaacccacatcctgagaatcggcgagagctataaggagaagcagcggaccatccaggccaagaaggaggtggagcagcggagagccggcggctacagccggaagtacgccagcaaagccaagaatctggcagacgatatggtgagaaacaccgctagagatctgctgtactacgccgtgacccaggatgccatgctgatcttcgccaacctgagccggggcttcggccggcagggcaagcggaccttcatggccgagagacagtacacacggatggaggactggctgaccgccaagctggcctacgagggcctgagcaagacctacctgtccaagacactggcccagtacacctccaagacatgcagcaactgtgggtttaccatcaccagcgccgactacgacagggtgctggagaagctgaagaagacagcaacaggctggatgaccacaattaacggcaaggagctgaaggtggagggccagattacctactacaacagatacaagagacagaacgtagtcaaggacctgtccgtcgagctggatagactgagcgaagaatctgtgaacaacgacatctcctcctggacaaagggcagaagcggagaagctctgagcctcctgaagaaaagattctcccatagacccgtgcaggagaagttcgtgtgcctgaactgcggcttcgagacacacgcagccgagcaagccgccctgaacatcgccagatcctggctgttcctgcggagccaggagtacaagaaataccagacaaacaagacaaccggcaacaccgataagagagccttcgtcgagacctggcagtccttttaccggaagaagcttaaggaggtgtggaaacctgccgtgcggtctggcggatctggcggaggctccaccagccccaagaaaaagagaaaagtctaagctgccttctgcggggcttgccttctggccatgcccttcttctctcccttgcacctgtacctcttggtctttgaataaagcctgagtaggaaggctagcaaaaaaaaaaaaaaaaaaaaaaaaaaaaaaaaaaaaaaaaaaaaaaaaaaaaaaaaaaaaaaaaaaaaaaaaaaaaaaaa

SEQ ID NO: 12773 - RNA, 5785 nt, synthetic construct
  source 1..5785: mol_type = other RNA
aggaaataagagagaaaagaagagtaagaagaaatataagagccaccatggcccctaagaagaagcgtaaagtgagccggatggaacgcctcgtctacgaggtgcggcagaagtgcagaaacatcgaggacatctgcatctcctgcggatctctgaacgtgaccctggagcacccactgttcatcggcggcatgtgccagaactgtaaaaactgttttctggagtgtgcctatcaatacgacgatgacggctaccagagctactgcaccatctgttgcggcggaagagaggtgctgatgtgtggaaataacaactgctgccggtgcttctgcgtggaatgcgtggacctgctggtgggccccggcgccgcccaggccgctattaaggaagatccttggaactgctacatgtgcggccacaagggcacatacggcctgctgagacggagagaggactggcctagcagactgcagatgttcttcgccaataaccacgaccaggagttcgacccccctaaggtgtaccctcccgtccccgccgagaagagaaagcccatccgggtcctgagcctgttcgatggcatcgccaccggtctgctggtgctgaaggacctgggcatccaggtggataggtacattgcctccgaggtgtgcgaggactccatcaccgtgggaatggtgcgtcatcagggcaagatcatgtacgtgggcgacgtgcggagcgtgacacagaagcatatccaggagtggggccctttcgacctggtgatcggcggcagcccttgcaatgacctgagcatcgtgaacccagcccggaagggcctgtacgagggaaccggcagactgttcttcgagttttacagactgctgcacgacgcccggcctaaggaaggcgacgaccggcccttcttttggctgttcgagaatgtggtggccatgggagtcagcgacaagcgggatattagccggttcctggagagcaaccccgtgatgatcgatgccaaggaagtgagcgccgcccaccgggccagatacttctggggcaatctgcctggcatgaacagacccctggccagcaccgtgaacgacaagctggagctgcaggagtgcctggagcacggccggatcgccaagttcagcaaggtgagaaccatcaccacccgaagcaacagcatcaaacaaggcaaggaccagcactttcctgtgttcatgaacgagaaggaggacatcctgtggtgtaccgagatggagagagtgttcgggttcccagtccactacacagatgtcagcaacatgtctagactggccagacagagactgctgggaagaagctggtccgtccctgtgatcagacacctgttcgcccctctgaaggagtacttcgcctgcgtgagcagcggcaacagcaacgccaacagccggggccccagcttctctagcggcctggtgccactgtccctgagagggagccacatgggccccatggagatctacaaaaccgtgagcgcctggaagcggcagcctgtgcgcgtgctgagcctgtttcggaatatcgataaagtcctgaaaagcctgggattcctggagagcggctctggctccggcggtggcaccctgaagtacgtggaggatgtgacaaacgtggtcagacgggatgtggagaagtggggccccttcgatctggtgtacggcagcacccaacccctgggcagctcttgtgaccggtgccctggctggtacatgtttcagttccaccggatcctgcagtacgccctgccgagacaggagtcccagcggccattcttttggattttcatggacaacttgctgctgaccgaggatgaccaggaaactaccactcggttcctgcagaccgaagccgtgaccctgcaggacgtgagaggccgggactaccagaacgccatgcgggtgtggtccaacatccctggactgaaaagcaagcacgcacctctgacccctaaagaagaggagtacctgcaggcccaggtgcggagcagaagcaagctggacgcccctaaggtggatctgctggtgaagaattgcctcctgcccctgagagagtacttcaagtatttcagccagaatagtctgcccctgggaggcagcggcggcggcatgcaggtgaagttcgaggacgtggccgtgagcttcagccaggaggagtgggagtacctggacgagggccagaaggagctgtacagggaggtgatgaaggagaactacgagaccctgctgagcctgggcctgaagtgcctgcagaagatccacgagagcgacaggcccttcacctaccccgcctgcggcaagagcttcaaccaccagagcaacctgaggaagcacaagaggaaccacaccggcggcggcccaagcagcggcgcccctcctcccagcggcggcagcccagccggctccccaacctctaccgaggagggcacctctgagtccgccacccccgagagcggccctggcacctccaccgagcccagcgagggcagcgcacccggcagccctgccggcagccccacctccacagaggagggaaccagcaccgagcccagcgaaggcagcgccccaggcaccagcaccgagcctagtgagcaggagattaaacggatcaacaagatcagaagaagacttgtgaaagacagcaacaccaagaaggccggcaagacaggccccatgaaaaccctgctggttagagtgatgacacccgatctgagagagcggctggaaaacctgagaaagaagcctgaaaatatcccccagcccatcagcaatacatctagagccaacctgaataagctgctgaccgattacaccgaaatgaagaaggcgatcctgcatgtgtactgggaagagttccagaaggaccctgtgggcctgatgagccgggtggcccagcctgccagcaagaagatcgatcagaacaagctgaaacctgagatggacgagaagggcaacctgaccaccgccggctttgcctgctctcagtgtggccagcccctgttcgtgtacaagctggagcaggtgtctgagaagggcaaggcttacaccaactacttcggacggtgcaatgtggccgagcacgaaaagctgatcctgctggcccagctgaagcccgagaaggatagcgacgaagccgtgacatatagcctgggaaagtttgggcagagggccctggatttctacagcattcatgtgaccaaggagtccacccaccccgtgaagcccctggcccagatcgccggaaacagatacgcctccggacctgtgggaaaggccctgagcgacgcatgtatgggcacaatcgcctccttcctgtctaagtaccaggacatcatcatcgaacaccagaaggtggtgaagggcaaccagaagagactggagagcctgcgggagctggccggcaaggaaaacctggaataccctagcgtgaccctgccacctcagcctcacaccaaggagggcgttgatgcctacaacgaagtgatcgcccgggtgcgaatgtgggtgaacctgaacctgtggcagaagctgaagctaagcagagatgatgccaagcctctgctgagactgaagggattcccttcctttcctctggtcgagagacaggccaacgaagtggactggtgggacatggtgtgtaacgtgaagaagctgatcaacgagaaaaaggaggatggcaaggtgttttggcagaatctggctggctacaagagacaggaagccctgagaccatacctgagcagcgaggaagatcggaagaagggaaagaaattcgctcggtaccagctgggcgacctgctgctgcacctggaaaagaagcacggcgaggactggggaaaggtgtacgacgaggcctgggagcggattgacaagaaagtggaaggcctgagcaagcacatcaagctggaagaggaacggagaagcgaggacgcccagagcaaggccgccctgaccgactggctgcgggctaaggccagcttcgtgatcgagggcctgaaggaggccgacaaggacgagttctgcagatgcgagctgaagctgcagaagtggtacggggacctgcggggaaagcccttcgccatcgaagccgagaacagcatcctggacatcagcggcttcagcaagcagtacaactgtgccttcatctggcagaaggacggcgtgaagaagctgaacctgtacctgatcatcaactacttcaagggcggcaagctgcggttcaagaagatcaaacctgaagccttcgaagccaacagattctacaccgtgatcaacaaaaagagcggcgagatcgtgcccatggaggtgaacttcaacttcgacgaccccaacctgatcatcctgcctctggcctttggcaagagacagggcagagaattcatctggaacgacctgctgtccctggaaaccggcagcctgaagctggccaacggaagagtgatcgagaagacactgtacaacagaagaacccggcaggatgagcctgccctgttcgtggccctgaccttcgagcggcgggaggtcctggactcctccaatatcaaaccaatgaacctgatcggcgtggcaagaggcgaaaacatccccgccgtgatcgccctgaccgaccccgagggctgcccactgagccggtttaaggatagcctgggaaacccaacccacatcctgagaatcggcgagagctataaggagaagcagcggaccatccaggccaagaaggaggtggagcagcggagagccggcggctacagccggaagtacgccagcaaagccaagaatctggcagacgatatggtgagaaacaccgctagagatctgctgtactacgccgtgacccaggatgccatgctgatcttcgccaacctgagccggggcttcggccggcagggcaagcggaccttcatggccgagagacagtacacacggatggaggactggctgaccgccaagctggcctacgagggcctgagcaagacctacctgtccaagacactggcccagtacacctccaagacatgcagcaactgtgggtttaccatcaccagcgccgactacgacagggtgctggagaagctgaagaagacagcaacaggctggatgaccacaattaacggcaaggagctgaaggtggagggccagattacctactacaacagatacaagagacagaacgtagtcaaggacctgtccgtcgagctggatagactgagcgaagaatctgtgaacaacgacatctcctcctggacaaagggcagaagcggagaagctctgagcctcctgaagaaaagattctcccatagacccgtgcaggagaagttcgtgtgcctgaactgcggcttcgagacacacgcagccgagcaagccgccctgaacatcgccagatcctggctgttcctgcggagccaggagtacaagaaataccagacaaacaagacaaccggcaacaccgataagagagccttcgtcgagacctggcagtccttttaccggaagaagcttaaggaggtgtggaaacctgccgtgcggtctggcggatctggcggaggctccaccagccccaagaaaaagagaaaagtctaagctgccttctgcggggcttgccttctggccatgcccttcttctctcccttgcacctgtacctcttggtctttgaataaagcctgagtaggaaggctagcaaaaaaaaaaaaaaaaaaaaaaaaaaaaaaaaaaaaaaaaaaaaaaaaaaaaaaaaaaaaaaaaaaaaaaaaaaaaaaaa

SEQ ID NO: 12774 - RNA, 5785 nt, synthetic construct
  source 1..5785: mol_type = other RNA
aggaaataagagagaaaagaagagtaagaagaaatataagagccaccatggcccctaagaagaagcgtaaagtgagccggatggaacgcctcgtctacgaggtgcggcagaagtgcagaaacatcgaggacatctgcatctcctgcggatctctgaacgtgaccctggagcacccactgttcatcggcggcatgtgccagaactgtaaaaactgttttctggagtgtgcctatcaatacgacgatgacggctaccagagctactgcaccatctgttgcggcggaagagaggtgctgatgtgtggaaataacaactgctgccggtgcttctgcgtggaatgcgtggacctgctggtgggccccggcgccgcccaggccgctattaaggaagatccttggaactgctacatgtgcggccacaagggcacatacggcctgctgagacggagagaggactggcctagcagactgcagatgttcttcgccaataaccacgaccaggagttcgacccccctaaggtgtaccctcccgtccccgccgagaagagaaagcccatccgggtcctgagcctgttcgatggcatcgccaccggtctgctggtgctgaaggacctgggcatccaggtggataggtacattgcctccgaggtgtgcgaggactccatcaccgtgggaatggtgcgtcatcagggcaagatcatgtacgtgggcgacgtgcggagcgtgacacagaagcatatccaggagtggggccctttcgacctggtgatcggcggcagcccttgcaatgacctgagcatcgtgaacccagcccggaagggcctgtacgagggaaccggcagactgttcttcgagttttacagactgctgcacgacgcccggcctaaggaaggcgacgaccggcccttcttttggctgttcgagaatgtggtggccatgggagtcagcgacaagcgggatattagccggttcctggagagcaaccccgtgatgatcgatgccaaggaagtgagcgccgcccaccgggccagatacttctggggcaatctgcctggcatgaacagacccctggccagcaccgtgaacgacaagctggagctgcaggagtgcctggagcacggccggatcgccaagttcagcaaggtgagaaccatcaccacccgaagcaacagcatcaaacaaggcaaggaccagcactttcctgtgttcatgaacgagaaggaggacatcctgtggtgtaccgagatggagagagtgttcgggttcccagtccactacacagatgtcagcaacatgtctagactggccagacagagactgctgggaagaagctggtccgtccctgtgatcagacacctgttcgcccctctgaaggagtacttcgcctgcgtgagcagcggcaacagcaacgccaacagccggggccccagcttctctagcggcctggtgccactgtccctgagagggagccacatgggccccatggagatctacaaaaccgtgagcgcctggaagcggcagcctgtgcgcgtgctgagcctgtttcggaatatcgataaagtcctgaaaagcctgggattcctggagagcggctctggctccggcggtggcaccctgaagtacgtggaggatgtgacaaacgtggtcagacgggatgtggagaagtggggccccttcgatctggtgtacggcagcacccaacccctgggcagctcttgtgaccggtgccctggctggtacatgtttcagttccaccggatcctgcagtacgccctgccgagacaggagtcccagcggccattcttttggattttcatggacaacttgctgctgaccgaggatgaccaggaaactaccactcggttcctgcagaccgaagccgtgaccctgcaggacgtgagaggccgggactaccagaacgccatgcgggtgtggtccaacatccctggactgaaaagcaagcacgcacctctgacccctaaagaagaggagtacctgcaggcccaggtgcggagcagaagcaagctggacgcccctaaggtggatctgctggtgaagaattgcctcctgcccctgagagagtacttcaagtatttcagccagaatagtctgcccctgggaggcagcggcggcggcaggaagaggggcagcctgaccctggaggacgtggccgtggacttcacctgggaggagtggcagctgctggcccccgcccagaaggccctgtacagggacgtgatgctggagaactacggcaacctggtgttcgtgggctaccaggccagcaagcccgccgccctgagcaggctggagaggggcgagccctggcccgtggaggacgaggtgcacagccagctgtgccccgagatgaggaaggacggcggcccaagcagcggcgcccctcctcccagcggcggcagcccagccggctccccaacctctaccgaggagggcacctctgagtccgccacccccgagagcggccctggcacctccaccgagcccagcgagggcagcgcacccggcagccctgccggcagccccacctccacagaggagggaaccagcaccgagcccagcgaaggcagcgccccaggcaccagcaccgagcctagtgagcaggagattaaacggatcaacaagatcagaagaagacttgtgaaagacagcaacaccaagaaggccggcaagacaggccccatgaaaaccctgctggttagagtgatgacacccgatctgagagagcggctggaaaacctgagaaagaagcctgaaaatatcccccagcccatcagcaatacatctagagccaacctgaataagctgctgaccgattacaccgaaatgaagaaggcgatcctgcatgtgtactgggaagagttccagaaggaccctgtgggcctgatgagccgggtggcccagcctgccagcaagaagatcgatcagaacaagctgaaacctgagatggacgagaagggcaacctgaccaccgccggctttgcctgctctcagtgtggccagcccctgttcgtgtacaagctggagcaggtgtctgagaagggcaaggcttacaccaactacttcggacggtgcaatgtggccgagcacgaaaagctgatcctgctggcccagctgaagcccgagaaggatagcgacgaagccgtgacatatagcctgggaaagtttgggcagagggccctggatttctacagcattcatgtgaccaaggagtccacccaccccgtgaagcccctggcccagatcgccggaaacagatacgcctccggacctgtgggaaaggccctgagcgacgcatgtatgggcacaatcgcctccttcctgtctaagtaccaggacatcatcatcgaacaccagaaggtggtgaagggcaaccagaagagactggagagcctgcgggagctggccggcaaggaaaacctggaataccctagcgtgaccctgccacctcagcctcacaccaaggagggcgttgatgcctacaacgaagtgatcgcccgggtgcgaatgtgggtgaacctgaacctgtggcagaagctgaagctaagcagagatgatgccaagcctctgctgagactgaagggattcccttcctttcctctggtcgagagacaggccaacgaagtggactggtgggacatggtgtgtaacgtgaagaagctgatcaacgagaaaaaggaggatggcaaggtgttttggcagaatctggctggctacaagagacaggaagccctgagaccatacctgagcagcgaggaagatcggaagaagggaaagaaattcgctcggtaccagctgggcgacctgctgctgcacctggaaaagaagcacggcgaggactggggaaaggtgtacgacgaggcctgggagcggattgacaagaaagtggaaggcctgagcaagcacatcaagctggaagaggaacggagaagcgaggacgcccagagcaaggccgccctgaccgactggctgcgggctaaggccagcttcgtgatcgagggcctgaaggaggccgacaaggacgagttctgcagatgcgagctgaagctgcagaagtggtacggggacctgcggggaaagcccttcgccatcgaagccgagaacagcatcctggacatcagcggcttcagcaagcagtacaactgtgccttcatctggcagaaggacggcgtgaagaagctgaacctgtacctgatcatcaactacttcaagggcggcaagctgcggttcaagaagatcaaacctgaagccttcgaagccaacagattctacaccgtgatcaacaaaaagagcggcgagatcgtgcccatggaggtgaacttcaacttcgacgaccccaacctgatcatcctgcctctggcctttggcaagagacagggcagagaattcatctggaacgacctgctgtccctggaaaccggcagcctgaagctggccaacggaagagtgatcgagaagacactgtacaacagaagaacccggcaggatgagcctgccctgttcgtggccctgaccttcgagcggcgggaggtcctggactcctccaatatcaaaccaatgaacctgatcggcgtggcaagaggcgaaaacatccccgccgtgatcgccctgaccgaccccgagggctgcccactgagccggtttaaggatagcctgggaaacccaacccacatcctgagaatcggcgagagctataaggagaagcagcggaccatccaggccaagaaggaggtggagcagcggagagccggcggctacagccggaagtacgccagcaaagccaagaatctggcagacgatatggtgagaaacaccgctagagatctgctgtactacgccgtgacccaggatgccatgctgatcttcgccaacctgagccggggcttcggccggcagggcaagcggaccttcatggccgagagacagtacacacggatggaggactggctgaccgccaagctggcctacgagggcctgagcaagacctacctgtccaagacactggcccagtacacctccaagacatgcagcaactgtgggtttaccatcaccagcgccgactacgacagggtgctggagaagctgaagaagacagcaacaggctggatgaccacaattaacggcaaggagctgaaggtggagggccagattacctactacaacagatacaagagacagaacgtagtcaaggacctgtccgtcgagctggatagactgagcgaagaatctgtgaacaacgacatctcctcctggacaaagggcagaagcggagaagctctgagcctcctgaagaaaagattctcccatagacccgtgcaggagaagttcgtgtgcctgaactgcggcttcgagacacacgcagccgagcaagccgccctgaacatcgccagatcctggctgttcctgcggagccaggagtacaagaaataccagacaaacaagacaaccggcaacaccgataagagagccttcgtcgagacctggcagtccttttaccggaagaagcttaaggaggtgtggaaacctgccgtgcggtctggcggatctggcggaggctccaccagccccaagaaaaagagaaaagtctaagctgccttctgcggggcttgccttctggccatgcccttcttctctcccttgcacctgtacctcttggtctttgaataaagcctgagtaggaaggctagcaaaaaaaaaaaaaaaaaaaaaaaaaaaaaaaaaaaaaaaaaaaaaaaaaaaaaaaaaaaaaaaaaaaaaaaaaaaaaaaa

SEQ ID NO: 12775 - RNA, 5785 nt, synthetic construct
  source 1..5785: mol_type = other RNA
aggaaataagagagaaaagaagagtaagaagaaatataagagccaccatggcccctaagaagaagcgtaaagtgagccggatggaacgcctcgtctacgaggtgcggcagaagtgcagaaacatcgaggacatctgcatctcctgcggatctctgaacgtgaccctggagcacccactgttcatcggcggcatgtgccagaactgtaaaaactgttttctggagtgtgcctatcaatacgacgatgacggctaccagagctactgcaccatctgttgcggcggaagagaggtgctgatgtgtggaaataacaactgctgccggtgcttctgcgtggaatgcgtggacctgctggtgggccccggcgccgcccaggccgctattaaggaagatccttggaactgctacatgtgcggccacaagggcacatacggcctgctgagacggagagaggactggcctagcagactgcagatgttcttcgccaataaccacgaccaggagttcgacccccctaaggtgtaccctcccgtccccgccgagaagagaaagcccatccgggtcctgagcctgttcgatggcatcgccaccggtctgctggtgctgaaggacctgggcatccaggtggataggtacattgcctccgaggtgtgcgaggactccatcaccgtgggaatggtgcgtcatcagggcaagatcatgtacgtgggcgacgtgcggagcgtgacacagaagcatatccaggagtggggccctttcgacctggtgatcggcggcagcccttgcaatgacctgagcatcgtgaacccagcccggaagggcctgtacgagggaaccggcagactgttcttcgagttttacagactgctgcacgacgcccggcctaaggaaggcgacgaccggcccttcttttggctgttcgagaatgtggtggccatgggagtcagcgacaagcgggatattagccggttcctggagagcaaccccgtgatgatcgatgccaaggaagtgagcgccgcccaccgggccagatacttctggggcaatctgcctggcatgaacagacccctggccagcaccgtgaacgacaagctggagctgcaggagtgcctggagcacggccggatcgccaagttcagcaaggtgagaaccatcaccacccgaagcaacagcatcaaacaaggcaaggaccagcactttcctgtgttcatgaacgagaaggaggacatcctgtggtgtaccgagatggagagagtgttcgggttcccagtccactacacagatgtcagcaacatgtctagactggccagacagagactgctgggaagaagctggtccgtccctgtgatcagacacctgttcgcccctctgaaggagtacttcgcctgcgtgagcagcggcaacagcaacgccaacagccggggccccagcttctctagcggcctggtgccactgtccctgagagggagccacatgggccccatggagatctacaaaaccgtgagcgcctggaagcggcagcctgtgcgcgtgctgagcctgtttcggaatatcgataaagtcctgaaaagcctgggattcctggagagcggctctggctccggcggtggcaccctgaagtacgtggaggatgtgacaaacgtggtcagacgggatgtggagaagtggggccccttcgatctggtgtacggcagcacccaacccctgggcagctcttgtgaccggtgccctggctggtacatgtttcagttccaccggatcctgcagtacgccctgccgagacaggagtcccagcggccattcttttggattttcatggacaacttgctgctgaccgaggatgaccaggaaactaccactcggttcctgcagaccgaagccgtgaccctgcaggacgtgagaggccgggactaccagaacgccatgcgggtgtggtccaacatccctggactgaaaagcaagcacgcacctctgacccctaaagaagaggagtacctgcaggcccaggtgcggagcagaagcaagctggacgcccctaaggtggatctgctggtgaagaattgcctcctgcccctgagagagtacttcaagtatttcagccagaatagtctgcccctgggaggcagcggcggcggcagcatgggcagcgacctgttcagggacgtggccgtggtgttcagcagggaggagtgggagaggctggcccccgcccagagggacctgtacagggacgtgatgctggagacctacagccacctgaggagcctggacctggccatcagcaagcccgacgtgatcgccttcctggagcagggcgaggagccctggagggccgaggaggccgccagggacggcctgtgccccgtggactgggagtgcggcggcccaagcagcggcgcccctcctcccagcggcggcagcccagccggctccccaacctctaccgaggagggcacctctgagtccgccacccccgagagcggccctggcacctccaccgagcccagcgagggcagcgcacccggcagccctgccggcagccccacctccacagaggagggaaccagcaccgagcccagcgaaggcagcgccccaggcaccagcaccgagcctagtgagcaggagattaaacggatcaacaagatcagaagaagacttgtgaaagacagcaacaccaagaaggccggcaagacaggccccatgaaaaccctgctggttagagtgatgacacccgatctgagagagcggctggaaaacctgagaaagaagcctgaaaatatcccccagcccatcagcaatacatctagagccaacctgaataagctgctgaccgattacaccgaaatgaagaaggcgatcctgcatgtgtactgggaagagttccagaaggaccctgtgggcctgatgagccgggtggcccagcctgccagcaagaagatcgatcagaacaagctgaaacctgagatggacgagaagggcaacctgaccaccgccggctttgcctgctctcagtgtggccagcccctgttcgtgtacaagctggagcaggtgtctgagaagggcaaggcttacaccaactacttcggacggtgcaatgtggccgagcacgaaaagctgatcctgctggcccagctgaagcccgagaaggatagcgacgaagccgtgacatatagcctgggaaagtttgggcagagggccctggatttctacagcattcatgtgaccaaggagtccacccaccccgtgaagcccctggcccagatcgccggaaacagatacgcctccggacctgtgggaaaggccctgagcgacgcatgtatgggcacaatcgcctccttcctgtctaagtaccaggacatcatcatcgaacaccagaaggtggtgaagggcaaccagaagagactggagagcctgcgggagctggccggcaaggaaaacctggaataccctagcgtgaccctgccacctcagcctcacaccaaggagggcgttgatgcctacaacgaagtgatcgcccgggtgcgaatgtgggtgaacctgaacctgtggcagaagctgaagctaagcagagatgatgccaagcctctgctgagactgaagggattcccttcctttcctctggtcgagagacaggccaacgaagtggactggtgggacatggtgtgtaacgtgaagaagctgatcaacgagaaaaaggaggatggcaaggtgttttggcagaatctggctggctacaagagacaggaagccctgagaccatacctgagcagcgaggaagatcggaagaagggaaagaaattcgctcggtaccagctgggcgacctgctgctgcacctggaaaagaagcacggcgaggactggggaaaggtgtacgacgaggcctgggagcggattgacaagaaagtggaaggcctgagcaagcacatcaagctggaagaggaacggagaagcgaggacgcccagagcaaggccgccctgaccgactggctgcgggctaaggccagcttcgtgatcgagggcctgaaggaggccgacaaggacgagttctgcagatgcgagctgaagctgcagaagtggtacggggacctgcggggaaagcccttcgccatcgaagccgagaacagcatcctggacatcagcggcttcagcaagcagtacaactgtgccttcatctggcagaaggacggcgtgaagaagctgaacctgtacctgatcatcaactacttcaagggcggcaagctgcggttcaagaagatcaaacctgaagccttcgaagccaacagattctacaccgtgatcaacaaaaagagcggcgagatcgtgcccatggaggtgaacttcaacttcgacgaccccaacctgatcatcctgcctctggcctttggcaagagacagggcagagaattcatctggaacgacctgctgtccctggaaaccggcagcctgaagctggccaacggaagagtgatcgagaagacactgtacaacagaagaacccggcaggatgagcctgccctgttcgtggccctgaccttcgagcggcgggaggtcctggactcctccaatatcaaaccaatgaacctgatcggcgtggcaagaggcgaaaacatccccgccgtgatcgccctgaccgaccccgagggctgcccactgagccggtttaaggatagcctgggaaacccaacccacatcctgagaatcggcgagagctataaggagaagcagcggaccatccaggccaagaaggaggtggagcagcggagagccggcggctacagccggaagtacgccagcaaagccaagaatctggcagacgatatggtgagaaacaccgctagagatctgctgtactacgccgtgacccaggatgccatgctgatcttcgccaacctgagccggggcttcggccggcagggcaagcggaccttcatggccgagagacagtacacacggatggaggactggctgaccgccaagctggcctacgagggcctgagcaagacctacctgtccaagacactggcccagtacacctccaagacatgcagcaactgtgggtttaccatcaccagcgccgactacgacagggtgctggagaagctgaagaagacagcaacaggctggatgaccacaattaacggcaaggagctgaaggtggagggccagattacctactacaacagatacaagagacagaacgtagtcaaggacctgtccgtcgagctggatagactgagcgaagaatctgtgaacaacgacatctcctcctggacaaagggcagaagcggagaagctctgagcctcctgaagaaaagattctcccatagacccgtgcaggagaagttcgtgtgcctgaactgcggcttcgagacacacgcagccgagcaagccgccctgaacatcgccagatcctggctgttcctgcggagccaggagtacaagaaataccagacaaacaagacaaccggcaacaccgataagagagccttcgtcgagacctggcagtccttttaccggaagaagcttaaggaggtgtggaaacctgccgtgcggtctggcggatctggcggaggctccaccagccccaagaaaaagagaaaagtctaagctgccttctgcggggcttgccttctggccatgcccttcttctctcccttgcacctgtacctcttggtctttgaataaagcctgagtaggaaggctagcaaaaaaaaaaaaaaaaaaaaaaaaaaaaaaaaaaaaaaaaaaaaaaaaaaaaaaaaaaaaaaaaaaaaaaaaaaaaaaaa

SEQ ID NO: 12776 - RNA, 5785 nt, synthetic construct
  source 1..5785: mol_type = other RNA
aggaaataagagagaaaagaagagtaagaagaaatataagagccaccatggcccctaagaagaagcgtaaagtgagccggatggaacgcctcgtctacgaggtgcggcagaagtgcagaaacatcgaggacatctgcatctcctgcggatctctgaacgtgaccctggagcacccactgttcatcggcggcatgtgccagaactgtaaaaactgttttctggagtgtgcctatcaatacgacgatgacggctaccagagctactgcaccatctgttgcggcggaagagaggtgctgatgtgtggaaataacaactgctgccggtgcttctgcgtggaatgcgtggacctgctggtgggccccggcgccgcccaggccgctattaaggaagatccttggaactgctacatgtgcggccacaagggcacatacggcctgctgagacggagagaggactggcctagcagactgcagatgttcttcgccaataaccacgaccaggagttcgacccccctaaggtgtaccctcccgtccccgccgagaagagaaagcccatccgggtcctgagcctgttcgatggcatcgccaccggtctgctggtgctgaaggacctgggcatccaggtggataggtacattgcctccgaggtgtgcgaggactccatcaccgtgggaatggtgcgtcatcagggcaagatcatgtacgtgggcgacgtgcggagcgtgacacagaagcatatccaggagtggggccctttcgacctggtgatcggcggcagcccttgcaatgacctgagcatcgtgaacccagcccggaagggcctgtacgagggaaccggcagactgttcttcgagttttacagactgctgcacgacgcccggcctaaggaaggcgacgaccggcccttcttttggctgttcgagaatgtggtggccatgggagtcagcgacaagcgggatattagccggttcctggagagcaaccccgtgatgatcgatgccaaggaagtgagcgccgcccaccgggccagatacttctggggcaatctgcctggcatgaacagacccctggccagcaccgtgaacgacaagctggagctgcaggagtgcctggagcacggccggatcgccaagttcagcaaggtgagaaccatcaccacccgaagcaacagcatcaaacaaggcaaggaccagcactttcctgtgttcatgaacgagaaggaggacatcctgtggtgtaccgagatggagagagtgttcgggttcccagtccactacacagatgtcagcaacatgtctagactggccagacagagactgctgggaagaagctggtccgtccctgtgatcagacacctgttcgcccctctgaaggagtacttcgcctgcgtgagcagcggcaacagcaacgccaacagccggggccccagcttctctagcggcctggtgccactgtccctgagagggagccacatgggccccatggagatctacaaaaccgtgagcgcctggaagcggcagcctgtgcgcgtgctgagcctgtttcggaatatcgataaagtcctgaaaagcctgggattcctggagagcggctctggctccggcggtggcaccctgaagtacgtggaggatgtgacaaacgtggtcagacgggatgtggagaagtggggccccttcgatctggtgtacggcagcacccaacccctgggcagctcttgtgaccggtgccctggctggtacatgtttcagttccaccggatcctgcagtacgccctgccgagacaggagtcccagcggccattcttttggattttcatggacaacttgctgctgaccgaggatgaccaggaaactaccactcggttcctgcagaccgaagccgtgaccctgcaggacgtgagaggccgggactaccagaacgccatgcgggtgtggtccaacatccctggactgaaaagcaagcacgcacctctgacccctaaagaagaggagtacctgcaggcccaggtgcggagcagaagcaagctggacgcccctaaggtggatctgctggtgaagaattgcctcctgcccctgagagagtacttcaagtatttcagccagaatagtctgcccctgggaggcagcggcggcggcggcagcgtgagcttcgacgaggtgagcgtgaggttcagcaacgaggagtgggccctgctggaccccggccagagggccctgtacgaggaggtgatggaggagatcagggagatgatgaccagcgtgggcgacgtgagcgagttcctgaccgagggcgagcagagcgagcccagcagggagggcgccgaggagcagaaggagcagaggaagcagagggtgcaggtgggcacctacaggaaggagggcggcccaagcagcggcgcccctcctcccagcggcggcagcccagccggctccccaacctctaccgaggagggcacctctgagtccgccacccccgagagcggccctggcacctccaccgagcccagcgagggcagcgcacccggcagccctgccggcagccccacctccacagaggagggaaccagcaccgagcccagcgaaggcagcgccccaggcaccagcaccgagcctagtgagcaggagattaaacggatcaacaagatcagaagaagacttgtgaaagacagcaacaccaagaaggccggcaagacaggccccatgaaaaccctgctggttagagtgatgacacccgatctgagagagcggctggaaaacctgagaaagaagcctgaaaatatcccccagcccatcagcaatacatctagagccaacctgaataagctgctgaccgattacaccgaaatgaagaaggcgatcctgcatgtgtactgggaagagttccagaaggaccctgtgggcctgatgagccgggtggcccagcctgccagcaagaagatcgatcagaacaagctgaaacctgagatggacgagaagggcaacctgaccaccgccggctttgcctgctctcagtgtggccagcccctgttcgtgtacaagctggagcaggtgtctgagaagggcaaggcttacaccaactacttcggacggtgcaatgtggccgagcacgaaaagctgatcctgctggcccagctgaagcccgagaaggatagcgacgaagccgtgacatatagcctgggaaagtttgggcagagggccctggatttctacagcattcatgtgaccaaggagtccacccaccccgtgaagcccctggcccagatcgccggaaacagatacgcctccggacctgtgggaaaggccctgagcgacgcatgtatgggcacaatcgcctccttcctgtctaagtaccaggacatcatcatcgaacaccagaaggtggtgaagggcaaccagaagagactggagagcctgcgggagctggccggcaaggaaaacctggaataccctagcgtgaccctgccacctcagcctcacaccaaggagggcgttgatgcctacaacgaagtgatcgcccgggtgcgaatgtgggtgaacctgaacctgtggcagaagctgaagctaagcagagatgatgccaagcctctgctgagactgaagggattcccttcctttcctctggtcgagagacaggccaacgaagtggactggtgggacatggtgtgtaacgtgaagaagctgatcaacgagaaaaaggaggatggcaaggtgttttggcagaatctggctggctacaagagacaggaagccctgagaccatacctgagcagcgaggaagatcggaagaagggaaagaaattcgctcggtaccagctgggcgacctgctgctgcacctggaaaagaagcacggcgaggactggggaaaggtgtacgacgaggcctgggagcggattgacaagaaagtggaaggcctgagcaagcacatcaagctggaagaggaacggagaagcgaggacgcccagagcaaggccgccctgaccgactggctgcgggctaaggccagcttcgtgatcgagggcctgaaggaggccgacaaggacgagttctgcagatgcgagctgaagctgcagaagtggtacggggacctgcggggaaagcccttcgccatcgaagccgagaacagcatcctggacatcagcggcttcagcaagcagtacaactgtgccttcatctggcagaaggacggcgtgaagaagctgaacctgtacctgatcatcaactacttcaagggcggcaagctgcggttcaagaagatcaaacctgaagccttcgaagccaacagattctacaccgtgatcaacaaaaagagcggcgagatcgtgcccatggaggtgaacttcaacttcgacgaccccaacctgatcatcctgcctctggcctttggcaagagacagggcagagaattcatctggaacgacctgctgtccctggaaaccggcagcctgaagctggccaacggaagagtgatcgagaagacactgtacaacagaagaacccggcaggatgagcctgccctgttcgtggccctgaccttcgagcggcgggaggtcctggactcctccaatatcaaaccaatgaacctgatcggcgtggcaagaggcgaaaacatccccgccgtgatcgccctgaccgaccccgagggctgcccactgagccggtttaaggatagcctgggaaacccaacccacatcctgagaatcggcgagagctataaggagaagcagcggaccatccaggccaagaaggaggtggagcagcggagagccggcggctacagccggaagtacgccagcaaagccaagaatctggcagacgatatggtgagaaacaccgctagagatctgctgtactacgccgtgacccaggatgccatgctgatcttcgccaacctgagccggggcttcggccggcagggcaagcggaccttcatggccgagagacagtacacacggatggaggactggctgaccgccaagctggcctacgagggcctgagcaagacctacctgtccaagacactggcccagtacacctccaagacatgcagcaactgtgggtttaccatcaccagcgccgactacgacagggtgctggagaagctgaagaagacagcaacaggctggatgaccacaattaacggcaaggagctgaaggtggagggccagattacctactacaacagatacaagagacagaacgtagtcaaggacctgtccgtcgagctggatagactgagcgaagaatctgtgaacaacgacatctcctcctggacaaagggcagaagcggagaagctctgagcctcctgaagaaaagattctcccatagacccgtgcaggagaagttcgtgtgcctgaactgcggcttcgagacacacgcagccgagcaagccgccctgaacatcgccagatcctggctgttcctgcggagccaggagtacaagaaataccagacaaacaagacaaccggcaacaccgataagagagccttcgtcgagacctggcagtccttttaccggaagaagcttaaggaggtgtggaaacctgccgtgcggtctggcggatctggcggaggctccaccagccccaagaaaaagagaaaagtctaagctgccttctgcggggcttgccttctggccatgcccttcttctctcccttgcacctgtacctcttggtctttgaataaagcctgagtaggaaggctagcaaaaaaaaaaaaaaaaaaaaaaaaaaaaaaaaaaaaaaaaaaaaaaaaaaaaaaaaaaaaaaaaaaaaaaaaaaaaaaaa

SEQ ID NO: 12777 - RNA, 5785 nt, synthetic construct
  source 1..5785: mol_type = other RNA
aggaaataagagagaaaagaagagtaagaagaaatataagagccaccatggcccctaagaagaagcgtaaagtgagccggatggaacgcctcgtctacgaggtgcggcagaagtgcagaaacatcgaggacatctgcatctcctgcggatctctgaacgtgaccctggagcacccactgttcatcggcggcatgtgccagaactgtaaaaactgttttctggagtgtgcctatcaatacgacgatgacggctaccagagctactgcaccatctgttgcggcggaagagaggtgctgatgtgtggaaataacaactgctgccggtgcttctgcgtggaatgcgtggacctgctggtgggccccggcgccgcccaggccgctattaaggaagatccttggaactgctacatgtgcggccacaagggcacatacggcctgctgagacggagagaggactggcctagcagactgcagatgttcttcgccaataaccacgaccaggagttcgacccccctaaggtgtaccctcccgtccccgccgagaagagaaagcccatccgggtcctgagcctgttcgatggcatcgccaccggtctgctggtgctgaaggacctgggcatccaggtggataggtacattgcctccgaggtgtgcgaggactccatcaccgtgggaatggtgcgtcatcagggcaagatcatgtacgtgggcgacgtgcggagcgtgacacagaagcatatccaggagtggggccctttcgacctggtgatcggcggcagcccttgcaatgacctgagcatcgtgaacccagcccggaagggcctgtacgagggaaccggcagactgttcttcgagttttacagactgctgcacgacgcccggcctaaggaaggcgacgaccggcccttcttttggctgttcgagaatgtggtggccatgggagtcagcgacaagcgggatattagccggttcctggagagcaaccccgtgatgatcgatgccaaggaagtgagcgccgcccaccgggccagatacttctggggcaatctgcctggcatgaacagacccctggccagcaccgtgaacgacaagctggagctgcaggagtgcctggagcacggccggatcgccaagttcagcaaggtgagaaccatcaccacccgaagcaacagcatcaaacaaggcaaggaccagcactttcctgtgttcatgaacgagaaggaggacatcctgtggtgtaccgagatggagagagtgttcgggttcccagtccactacacagatgtcagcaacatgtctagactggccagacagagactgctgggaagaagctggtccgtccctgtgatcagacacctgttcgcccctctgaaggagtacttcgcctgcgtgagcagcggcaacagcaacgccaacagccggggccccagcttctctagcggcctggtgccactgtccctgagagggagccacatgggccccatggagatctacaaaaccgtgagcgcctggaagcggcagcctgtgcgcgtgctgagcctgtttcggaatatcgataaagtcctgaaaagcctgggattcctggagagcggctctggctccggcggtggcaccctgaagtacgtggaggatgtgacaaacgtggtcagacgggatgtggagaagtggggccccttcgatctggtgtacggcagcacccaacccctgggcagctcttgtgaccggtgccctggctggtacatgtttcagttccaccggatcctgcagtacgccctgccgagacaggagtcccagcggccattcttttggattttcatggacaacttgctgctgaccgaggatgaccaggaaactaccactcggttcctgcagaccgaagccgtgaccctgcaggacgtgagaggccgggactaccagaacgccatgcgggtgtggtccaacatccctggactgaaaagcaagcacgcacctctgacccctaaagaagaggagtacctgcaggcccaggtgcggagcagaagcaagctggacgcccctaaggtggatctgctggtgaagaattgcctcctgcccctgagagagtacttcaagtatttcagccagaatagtctgcccctgggaggcagcggcggcggcttccaggaggccgtgaccttcaaggacgtggccgtggtgttcagcgaggaggagctgggcctgctggaccccgcccagaggaagctgtacagggacgtgatgctggagaacttcaggaacctggtgagcgtgggccacagcagcagcaagcccgacatgatcagccagctggagagggaggagaagctgtgcgtgaaggagatccacaccgagaggggcggcaggaaccccaacgaggccgagggcggcccaagcagcggcgcccctcctcccagcggcggcagcccagccggctccccaacctctaccgaggagggcacctctgagtccgccacccccgagagcggccctggcacctccaccgagcccagcgagggcagcgcacccggcagccctgccggcagccccacctccacagaggagggaaccagcaccgagcccagcgaaggcagcgccccaggcaccagcaccgagcctagtgagcaggagattaaacggatcaacaagatcagaagaagacttgtgaaagacagcaacaccaagaaggccggcaagacaggccccatgaaaaccctgctggttagagtgatgacacccgatctgagagagcggctggaaaacctgagaaagaagcctgaaaatatcccccagcccatcagcaatacatctagagccaacctgaataagctgctgaccgattacaccgaaatgaagaaggcgatcctgcatgtgtactgggaagagttccagaaggaccctgtgggcctgatgagccgggtggcccagcctgccagcaagaagatcgatcagaacaagctgaaacctgagatggacgagaagggcaacctgaccaccgccggctttgcctgctctcagtgtggccagcccctgttcgtgtacaagctggagcaggtgtctgagaagggcaaggcttacaccaactacttcggacggtgcaatgtggccgagcacgaaaagctgatcctgctggcccagctgaagcccgagaaggatagcgacgaagccgtgacatatagcctgggaaagtttgggcagagggccctggatttctacagcattcatgtgaccaaggagtccacccaccccgtgaagcccctggcccagatcgccggaaacagatacgcctccggacctgtgggaaaggccctgagcgacgcatgtatgggcacaatcgcctccttcctgtctaagtaccaggacatcatcatcgaacaccagaaggtggtgaagggcaaccagaagagactggagagcctgcgggagctggccggcaaggaaaacctggaataccctagcgtgaccctgccacctcagcctcacaccaaggagggcgttgatgcctacaacgaagtgatcgcccgggtgcgaatgtgggtgaacctgaacctgtggcagaagctgaagctaagcagagatgatgccaagcctctgctgagactgaagggattcccttcctttcctctggtcgagagacaggccaacgaagtggactggtgggacatggtgtgtaacgtgaagaagctgatcaacgagaaaaaggaggatggcaaggtgttttggcagaatctggctggctacaagagacaggaagccctgagaccatacctgagcagcgaggaagatcggaagaagggaaagaaattcgctcggtaccagctgggcgacctgctgctgcacctggaaaagaagcacggcgaggactggggaaaggtgtacgacgaggcctgggagcggattgacaagaaagtggaaggcctgagcaagcacatcaagctggaagaggaacggagaagcgaggacgcccagagcaaggccgccctgaccgactggctgcgggctaaggccagcttcgtgatcgagggcctgaaggaggccgacaaggacgagttctgcagatgcgagctgaagctgcagaagtggtacggggacctgcggggaaagcccttcgccatcgaagccgagaacagcatcctggacatcagcggcttcagcaagcagtacaactgtgccttcatctggcagaaggacggcgtgaagaagctgaacctgtacctgatcatcaactacttcaagggcggcaagctgcggttcaagaagatcaaacctgaagccttcgaagccaacagattctacaccgtgatcaacaaaaagagcggcgagatcgtgcccatggaggtgaacttcaacttcgacgaccccaacctgatcatcctgcctctggcctttggcaagagacagggcagagaattcatctggaacgacctgctgtccctggaaaccggcagcctgaagctggccaacggaagagtgatcgagaagacactgtacaacagaagaacccggcaggatgagcctgccctgttcgtggccctgaccttcgagcggcgggaggtcctggactcctccaatatcaaaccaatgaacctgatcggcgtggcaagaggcgaaaacatccccgccgtgatcgccctgaccgaccccgagggctgcccactgagccggtttaaggatagcctgggaaacccaacccacatcctgagaatcggcgagagctataaggagaagcagcggaccatccaggccaagaaggaggtggagcagcggagagccggcggctacagccggaagtacgccagcaaagccaagaatctggcagacgatatggtgagaaacaccgctagagatctgctgtactacgccgtgacccaggatgccatgctgatcttcgccaacctgagccggggcttcggccggcagggcaagcggaccttcatggccgagagacagtacacacggatggaggactggctgaccgccaagctggcctacgagggcctgagcaagacctacctgtccaagacactggcccagtacacctccaagacatgcagcaactgtgggtttaccatcaccagcgccgactacgacagggtgctggagaagctgaagaagacagcaacaggctggatgaccacaattaacggcaaggagctgaaggtggagggccagattacctactacaacagatacaagagacagaacgtagtcaaggacctgtccgtcgagctggatagactgagcgaagaatctgtgaacaacgacatctcctcctggacaaagggcagaagcggagaagctctgagcctcctgaagaaaagattctcccatagacccgtgcaggagaagttcgtgtgcctgaactgcggcttcgagacacacgcagccgagcaagccgccctgaacatcgccagatcctggctgttcctgcggagccaggagtacaagaaataccagacaaacaagacaaccggcaacaccgataagagagccttcgtcgagacctggcagtccttttaccggaagaagcttaaggaggtgtggaaacctgccgtgcggtctggcggatctggcggaggctccaccagccccaagaaaaagagaaaagtctaagctgccttctgcggggcttgccttctggccatgcccttcttctctcccttgcacctgtacctcttggtctttgaataaagcctgagtaggaaggctagcaaaaaaaaaaaaaaaaaaaaaaaaaaaaaaaaaaaaaaaaaaaaaaaaaaaaaaaaaaaaaaaaaaaaaaaaaaaaaaaa

SEQ ID NO: 12778 - RNA, 5785 nt, synthetic construct
  source 1..5785: mol_type = other RNA
aggaaataagagagaaaagaagagtaagaagaaatataagagccaccatggcccctaagaagaagcgtaaagtgagccggatggaacgcctcgtctacgaggtgcggcagaagtgcagaaacatcgaggacatctgcatctcctgcggatctctgaacgtgaccctggagcacccactgttcatcggcggcatgtgccagaactgtaaaaactgttttctggagtgtgcctatcaatacgacgatgacggctaccagagctactgcaccatctgttgcggcggaagagaggtgctgatgtgtggaaataacaactgctgccggtgcttctgcgtggaatgcgtggacctgctggtgggccccggcgccgcccaggccgctattaaggaagatccttggaactgctacatgtgcggccacaagggcacatacggcctgctgagacggagagaggactggcctagcagactgcagatgttcttcgccaataaccacgaccaggagttcgacccccctaaggtgtaccctcccgtccccgccgagaagagaaagcccatccgggtcctgagcctgttcgatggcatcgccaccggtctgctggtgctgaaggacctgggcatccaggtggataggtacattgcctccgaggtgtgcgaggactccatcaccgtgggaatggtgcgtcatcagggcaagatcatgtacgtgggcgacgtgcggagcgtgacacagaagcatatccaggagtggggccctttcgacctggtgatcggcggcagcccttgcaatgacctgagcatcgtgaacccagcccggaagggcctgtacgagggaaccggcagactgttcttcgagttttacagactgctgcacgacgcccggcctaaggaaggcgacgaccggcccttcttttggctgttcgagaatgtggtggccatgggagtcagcgacaagcgggatattagccggttcctggagagcaaccccgtgatgatcgatgccaaggaagtgagcgccgcccaccgggccagatacttctggggcaatctgcctggcatgaacagacccctggccagcaccgtgaacgacaagctggagctgcaggagtgcctggagcacggccggatcgccaagttcagcaaggtgagaaccatcaccacccgaagcaacagcatcaaacaaggcaaggaccagcactttcctgtgttcatgaacgagaaggaggacatcctgtggtgtaccgagatggagagagtgttcgggttcccagtccactacacagatgtcagcaacatgtctagactggccagacagagactgctgggaagaagctggtccgtccctgtgatcagacacctgttcgcccctctgaaggagtacttcgcctgcgtgagcagcggcaacagcaacgccaacagccggggccccagcttctctagcggcctggtgccactgtccctgagagggagccacatgggccccatggagatctacaaaaccgtgagcgcctggaagcggcagcctgtgcgcgtgctgagcctgtttcggaatatcgataaagtcctgaaaagcctgggattcctggagagcggctctggctccggcggtggcaccctgaagtacgtggaggatgtgacaaacgtggtcagacgggatgtggagaagtggggccccttcgatctggtgtacggcagcacccaacccctgggcagctcttgtgaccggtgccctggctggtacatgtttcagttccaccggatcctgcagtacgccctgccgagacaggagtcccagcggccattcttttggattttcatggacaacttgctgctgaccgaggatgaccaggaaactaccactcggttcctgcagaccgaagccgtgaccctgcaggacgtgagaggccgggactaccagaacgccatgcgggtgtggtccaacatccctggactgaaaagcaagcacgcacctctgacccctaaagaagaggagtacctgcaggcccaggtgcggagcagaagcaagctggacgcccctaaggtggatctgctggtgaagaattgcctcctgcccctgagagagtacttcaagtatttcagccagaatagtctgcccctgggaggcagcggcggcggcctgcaggtgagcgtgagcttcgaggacgtgaccgtgaacttcagcagggaggagtggcagaggctggaccccgcccagaggaggctgtacagggacgtgaccctggagaactacagccacctgaggagcgtgggctaccaggtgcccaagcccgaggtgatcttcaagctggagcagggcgagggcccctggaccctggagggcgagaccccccaccagagctgcagcggcgaggacatcggcggcggcccaagcagcggcgcccctcctcccagcggcggcagcccagccggctccccaacctctaccgaggagggcacctctgagtccgccacccccgagagcggccctggcacctccaccgagcccagcgagggcagcgcacccggcagccctgccggcagccccacctccacagaggagggaaccagcaccgagcccagcgaaggcagcgccccaggcaccagcaccgagcctagtgagcaggagattaaacggatcaacaagatcagaagaagacttgtgaaagacagcaacaccaagaaggccggcaagacaggccccatgaaaaccctgctggttagagtgatgacacccgatctgagagagcggctggaaaacctgagaaagaagcctgaaaatatcccccagcccatcagcaatacatctagagccaacctgaataagctgctgaccgattacaccgaaatgaagaaggcgatcctgcatgtgtactgggaagagttccagaaggaccctgtgggcctgatgagccgggtggcccagcctgccagcaagaagatcgatcagaacaagctgaaacctgagatggacgagaagggcaacctgaccaccgccggctttgcctgctctcagtgtggccagcccctgttcgtgtacaagctggagcaggtgtctgagaagggcaaggcttacaccaactacttcggacggtgcaatgtggccgagcacgaaaagctgatcctgctggcccagctgaagcccgagaaggatagcgacgaagccgtgacatatagcctgggaaagtttgggcagagggccctggatttctacagcattcatgtgaccaaggagtccacccaccccgtgaagcccctggcccagatcgccggaaacagatacgcctccggacctgtgggaaaggccctgagcgacgcatgtatgggcacaatcgcctccttcctgtctaagtaccaggacatcatcatcgaacaccagaaggtggtgaagggcaaccagaagagactggagagcctgcgggagctggccggcaaggaaaacctggaataccctagcgtgaccctgccacctcagcctcacaccaaggagggcgttgatgcctacaacgaagtgatcgcccgggtgcgaatgtgggtgaacctgaacctgtggcagaagctgaagctaagcagagatgatgccaagcctctgctgagactgaagggattcccttcctttcctctggtcgagagacaggccaacgaagtggactggtgggacatggtgtgtaacgtgaagaagctgatcaacgagaaaaaggaggatggcaaggtgttttggcagaatctggctggctacaagagacaggaagccctgagaccatacctgagcagcgaggaagatcggaagaagggaaagaaattcgctcggtaccagctgggcgacctgctgctgcacctggaaaagaagcacggcgaggactggggaaaggtgtacgacgaggcctgggagcggattgacaagaaagtggaaggcctgagcaagcacatcaagctggaagaggaacggagaagcgaggacgcccagagcaaggccgccctgaccgactggctgcgggctaaggccagcttcgtgatcgagggcctgaaggaggccgacaaggacgagttctgcagatgcgagctgaagctgcagaagtggtacggggacctgcggggaaagcccttcgccatcgaagccgagaacagcatcctggacatcagcggcttcagcaagcagtacaactgtgccttcatctggcagaaggacggcgtgaagaagctgaacctgtacctgatcatcaactacttcaagggcggcaagctgcggttcaagaagatcaaacctgaagccttcgaagccaacagattctacaccgtgatcaacaaaaagagcggcgagatcgtgcccatggaggtgaacttcaacttcgacgaccccaacctgatcatcctgcctctggcctttggcaagagacagggcagagaattcatctggaacgacctgctgtccctggaaaccggcagcctgaagctggccaacggaagagtgatcgagaagacactgtacaacagaagaacccggcaggatgagcctgccctgttcgtggccctgaccttcgagcggcgggaggtcctggactcctccaatatcaaaccaatgaacctgatcggcgtggcaagaggcgaaaacatccccgccgtgatcgccctgaccgaccccgagggctgcccactgagccggtttaaggatagcctgggaaacccaacccacatcctgagaatcggcgagagctataaggagaagcagcggaccatccaggccaagaaggaggtggagcagcggagagccggcggctacagccggaagtacgccagcaaagccaagaatctggcagacgatatggtgagaaacaccgctagagatctgctgtactacgccgtgacccaggatgccatgctgatcttcgccaacctgagccggggcttcggccggcagggcaagcggaccttcatggccgagagacagtacacacggatggaggactggctgaccgccaagctggcctacgagggcctgagcaagacctacctgtccaagacactggcccagtacacctccaagacatgcagcaactgtgggtttaccatcaccagcgccgactacgacagggtgctggagaagctgaagaagacagcaacaggctggatgaccacaattaacggcaaggagctgaaggtggagggccagattacctactacaacagatacaagagacagaacgtagtcaaggacctgtccgtcgagctggatagactgagcgaagaatctgtgaacaacgacatctcctcctggacaaagggcagaagcggagaagctctgagcctcctgaagaaaagattctcccatagacccgtgcaggagaagttcgtgtgcctgaactgcggcttcgagacacacgcagccgagcaagccgccctgaacatcgccagatcctggctgttcctgcggagccaggagtacaagaaataccagacaaacaagacaaccggcaacaccgataagagagccttcgtcgagacctggcagtccttttaccggaagaagcttaaggaggtgtggaaacctgccgtgcggtctggcggatctggcggaggctccaccagccccaagaaaaagagaaaagtctaagctgccttctgcggggcttgccttctggccatgcccttcttctctcccttgcacctgtacctcttggtctttgaataaagcctgagtaggaaggctagcaaaaaaaaaaaaaaaaaaaaaaaaaaaaaaaaaaaaaaaaaaaaaaaaaaaaaaaaaaaaaaaaaaaaaaaaaaaaaaaa

SEQ ID NO: 12779 - RNA, 5785 nt, synthetic construct
  source 1..5785: mol_type = other RNA
aggaaataagagagaaaagaagagtaagaagaaatataagagccaccatggcccctaagaagaagcgtaaagtgagccggatggaacgcctcgtctacgaggtgcggcagaagtgcagaaacatcgaggacatctgcatctcctgcggatctctgaacgtgaccctggagcacccactgttcatcggcggcatgtgccagaactgtaaaaactgttttctggagtgtgcctatcaatacgacgatgacggctaccagagctactgcaccatctgttgcggcggaagagaggtgctgatgtgtggaaataacaactgctgccggtgcttctgcgtggaatgcgtggacctgctggtgggccccggcgccgcccaggccgctattaaggaagatccttggaactgctacatgtgcggccacaagggcacatacggcctgctgagacggagagaggactggcctagcagactgcagatgttcttcgccaataaccacgaccaggagttcgacccccctaaggtgtaccctcccgtccccgccgagaagagaaagcccatccgggtcctgagcctgttcgatggcatcgccaccggtctgctggtgctgaaggacctgggcatccaggtggataggtacattgcctccgaggtgtgcgaggactccatcaccgtgggaatggtgcgtcatcagggcaagatcatgtacgtgggcgacgtgcggagcgtgacacagaagcatatccaggagtggggccctttcgacctggtgatcggcggcagcccttgcaatgacctgagcatcgtgaacccagcccggaagggcctgtacgagggaaccggcagactgttcttcgagttttacagactgctgcacgacgcccggcctaaggaaggcgacgaccggcccttcttttggctgttcgagaatgtggtggccatgggagtcagcgacaagcgggatattagccggttcctggagagcaaccccgtgatgatcgatgccaaggaagtgagcgccgcccaccgggccagatacttctggggcaatctgcctggcatgaacagacccctggccagcaccgtgaacgacaagctggagctgcaggagtgcctggagcacggccggatcgccaagttcagcaaggtgagaaccatcaccacccgaagcaacagcatcaaacaaggcaaggaccagcactttcctgtgttcatgaacgagaaggaggacatcctgtggtgtaccgagatggagagagtgttcgggttcccagtccactacacagatgtcagcaacatgtctagactggccagacagagactgctgggaagaagctggtccgtccctgtgatcagacacctgttcgcccctctgaaggagtacttcgcctgcgtgagcagcggcaacagcaacgccaacagccggggccccagcttctctagcggcctggtgccactgtccctgagagggagccacatgggccccatggagatctacaaaaccgtgagcgcctggaagcggcagcctgtgcgcgtgctgagcctgtttcggaatatcgataaagtcctgaaaagcctgggattcctggagagcggctctggctccggcggtggcaccctgaagtacgtggaggatgtgacaaacgtggtcagacgggatgtggagaagtggggccccttcgatctggtgtacggcagcacccaacccctgggcagctcttgtgaccggtgccctggctggtacatgtttcagttccaccggatcctgcagtacgccctgccgagacaggagtcccagcggccattcttttggattttcatggacaacttgctgctgaccgaggatgaccaggaaactaccactcggttcctgcagaccgaagccgtgaccctgcaggacgtgagaggccgggactaccagaacgccatgcgggtgtggtccaacatccctggactgaaaagcaagcacgcacctctgacccctaaagaagaggagtacctgcaggcccaggtgcggagcagaagcaagctggacgcccctaaggtggatctgctggtgaagaattgcctcctgcccctgagagagtacttcaagtatttcagccagaatagtctgcccctgggaggcagcggcggcggcgcccagggcctggtgaccttcagggacgtggccatcgagttcagccaggaggagtggaagtgcctggagcccgcccagaggaacctgtacagggacgtgaccctggagaacttcagcaacctggtgagcctgggcctgagcatcagcaagcccgacctgatcagcctgctggagcagggcagggagccctggatgatcgccaacgacatgaccggcccctggtgccccgagctggagagcaggggcggcccaagcagcggcgcccctcctcccagcggcggcagcccagccggctccccaacctctaccgaggagggcacctctgagtccgccacccccgagagcggccctggcacctccaccgagcccagcgagggcagcgcacccggcagccctgccggcagccccacctccacagaggagggaaccagcaccgagcccagcgaaggcagcgccccaggcaccagcaccgagcctagtgagcaggagattaaacggatcaacaagatcagaagaagacttgtgaaagacagcaacaccaagaaggccggcaagacaggccccatgaaaaccctgctggttagagtgatgacacccgatctgagagagcggctggaaaacctgagaaagaagcctgaaaatatcccccagcccatcagcaatacatctagagccaacctgaataagctgctgaccgattacaccgaaatgaagaaggcgatcctgcatgtgtactgggaagagttccagaaggaccctgtgggcctgatgagccgggtggcccagcctgccagcaagaagatcgatcagaacaagctgaaacctgagatggacgagaagggcaacctgaccaccgccggctttgcctgctctcagtgtggccagcccctgttcgtgtacaagctggagcaggtgtctgagaagggcaaggcttacaccaactacttcggacggtgcaatgtggccgagcacgaaaagctgatcctgctggcccagctgaagcccgagaaggatagcgacgaagccgtgacatatagcctgggaaagtttgggcagagggccctggatttctacagcattcatgtgaccaaggagtccacccaccccgtgaagcccctggcccagatcgccggaaacagatacgcctccggacctgtgggaaaggccctgagcgacgcatgtatgggcacaatcgcctccttcctgtctaagtaccaggacatcatcatcgaacaccagaaggtggtgaagggcaaccagaagagactggagagcctgcgggagctggccggcaaggaaaacctggaataccctagcgtgaccctgccacctcagcctcacaccaaggagggcgttgatgcctacaacgaagtgatcgcccgggtgcgaatgtgggtgaacctgaacctgtggcagaagctgaagctaagcagagatgatgccaagcctctgctgagactgaagggattcccttcctttcctctggtcgagagacaggccaacgaagtggactggtgggacatggtgtgtaacgtgaagaagctgatcaacgagaaaaaggaggatggcaaggtgttttggcagaatctggctggctacaagagacaggaagccctgagaccatacctgagcagcgaggaagatcggaagaagggaaagaaattcgctcggtaccagctgggcgacctgctgctgcacctggaaaagaagcacggcgaggactggggaaaggtgtacgacgaggcctgggagcggattgacaagaaagtggaaggcctgagcaagcacatcaagctggaagaggaacggagaagcgaggacgcccagagcaaggccgccctgaccgactggctgcgggctaaggccagcttcgtgatcgagggcctgaaggaggccgacaaggacgagttctgcagatgcgagctgaagctgcagaagtggtacggggacctgcggggaaagcccttcgccatcgaagccgagaacagcatcctggacatcagcggcttcagcaagcagtacaactgtgccttcatctggcagaaggacggcgtgaagaagctgaacctgtacctgatcatcaactacttcaagggcggcaagctgcggttcaagaagatcaaacctgaagccttcgaagccaacagattctacaccgtgatcaacaaaaagagcggcgagatcgtgcccatggaggtgaacttcaacttcgacgaccccaacctgatcatcctgcctctggcctttggcaagagacagggcagagaattcatctggaacgacctgctgtccctggaaaccggcagcctgaagctggccaacggaagagtgatcgagaagacactgtacaacagaagaacccggcaggatgagcctgccctgttcgtggccctgaccttcgagcggcgggaggtcctggactcctccaatatcaaaccaatgaacctgatcggcgtggcaagaggcgaaaacatccccgccgtgatcgccctgaccgaccccgagggctgcccactgagccggtttaaggatagcctgggaaacccaacccacatcctgagaatcggcgagagctataaggagaagcagcggaccatccaggccaagaaggaggtggagcagcggagagccggcggctacagccggaagtacgccagcaaagccaagaatctggcagacgatatggtgagaaacaccgctagagatctgctgtactacgccgtgacccaggatgccatgctgatcttcgccaacctgagccggggcttcggccggcagggcaagcggaccttcatggccgagagacagtacacacggatggaggactggctgaccgccaagctggcctacgagggcctgagcaagacctacctgtccaagacactggcccagtacacctccaagacatgcagcaactgtgggtttaccatcaccagcgccgactacgacagggtgctggagaagctgaagaagacagcaacaggctggatgaccacaattaacggcaaggagctgaaggtggagggccagattacctactacaacagatacaagagacagaacgtagtcaaggacctgtccgtcgagctggatagactgagcgaagaatctgtgaacaacgacatctcctcctggacaaagggcagaagcggagaagctctgagcctcctgaagaaaagattctcccatagacccgtgcaggagaagttcgtgtgcctgaactgcggcttcgagacacacgcagccgagcaagccgccctgaacatcgccagatcctggctgttcctgcggagccaggagtacaagaaataccagacaaacaagacaaccggcaacaccgataagagagccttcgtcgagacctggcagtccttttaccggaagaagcttaaggaggtgtggaaacctgccgtgcggtctggcggatctggcggaggctccaccagccccaagaaaaagagaaaagtctaagctgccttctgcggggcttgccttctggccatgcccttcttctctcccttgcacctgtacctcttggtctttgaataaagcctgagtaggaaggctagcaaaaaaaaaaaaaaaaaaaaaaaaaaaaaaaaaaaaaaaaaaaaaaaaaaaaaaaaaaaaaaaaaaaaaaaaaaaaaaaa

SEQ ID NO: 12780 - RNA, 5785 nt, synthetic construct
  source 1..5785: mol_type = other RNA
aggaaataagagagaaaagaagagtaagaagaaatataagagccaccatggcccctaagaagaagcgtaaagtgagccggatggaacgcctcgtctacgaggtgcggcagaagtgcagaaacatcgaggacatctgcatctcctgcggatctctgaacgtgaccctggagcacccactgttcatcggcggcatgtgccagaactgtaaaaactgttttctggagtgtgcctatcaatacgacgatgacggctaccagagctactgcaccatctgttgcggcggaagagaggtgctgatgtgtggaaataacaactgctgccggtgcttctgcgtggaatgcgtggacctgctggtgggccccggcgccgcccaggccgctattaaggaagatccttggaactgctacatgtgcggccacaagggcacatacggcctgctgagacggagagaggactggcctagcagactgcagatgttcttcgccaataaccacgaccaggagttcgacccccctaaggtgtaccctcccgtccccgccgagaagagaaagcccatccgggtcctgagcctgttcgatggcatcgccaccggtctgctggtgctgaaggacctgggcatccaggtggataggtacattgcctccgaggtgtgcgaggactccatcaccgtgggaatggtgcgtcatcagggcaagatcatgtacgtgggcgacgtgcggagcgtgacacagaagcatatccaggagtggggccctttcgacctggtgatcggcggcagcccttgcaatgacctgagcatcgtgaacccagcccggaagggcctgtacgagggaaccggcagactgttcttcgagttttacagactgctgcacgacgcccggcctaaggaaggcgacgaccggcccttcttttggctgttcgagaatgtggtggccatgggagtcagcgacaagcgggatattagccggttcctggagagcaaccccgtgatgatcgatgccaaggaagtgagcgccgcccaccgggccagatacttctggggcaatctgcctggcatgaacagacccctggccagcaccgtgaacgacaagctggagctgcaggagtgcctggagcacggccggatcgccaagttcagcaaggtgagaaccatcaccacccgaagcaacagcatcaaacaaggcaaggaccagcactttcctgtgttcatgaacgagaaggaggacatcctgtggtgtaccgagatggagagagtgttcgggttcccagtccactacacagatgtcagcaacatgtctagactggccagacagagactgctgggaagaagctggtccgtccctgtgatcagacacctgttcgcccctctgaaggagtacttcgcctgcgtgagcagcggcaacagcaacgccaacagccggggccccagcttctctagcggcctggtgccactgtccctgagagggagccacatgggccccatggagatctacaaaaccgtgagcgcctggaagcggcagcctgtgcgcgtgctgagcctgtttcggaatatcgataaagtcctgaaaagcctgggattcctggagagcggctctggctccggcggtggcaccctgaagtacgtggaggatgtgacaaacgtggtcagacgggatgtggagaagtggggccccttcgatctggtgtacggcagcacccaacccctgggcagctcttgtgaccggtgccctggctggtacatgtttcagttccaccggatcctgcagtacgccctgccgagacaggagtcccagcggccattcttttggattttcatggacaacttgctgctgaccgaggatgaccaggaaactaccactcggttcctgcagaccgaagccgtgaccctgcaggacgtgagaggccgggactaccagaacgccatgcgggtgtggtccaacatccctggactgaaaagcaagcacgcacctctgacccctaaagaagaggagtacctgcaggcccaggtgcggagcagaagcaagctggacgcccctaaggtggatctgctggtgaagaattgcctcctgcccctgagagagtacttcaagtatttcagccagaatagtctgcccctgggaggcagcggcggcggcgcccacgtgagcctgagcttcagggacgtggccatcgacctgagccaggaggagtgggagtgcctggaccccgtgcagagggccctgtacagggacgtgatgctggagaactacagcaacctggtgagcctgggctgcagcagccccaagcccgacgtgatcaccctgctggagcaggagaaggagccctggaccgtgatgagggagggcaccaggagctggtacaccgacctggagagcaagggcggcccaagcagcggcgcccctcctcccagcggcggcagcccagccggctccccaacctctaccgaggagggcacctctgagtccgccacccccgagagcggccctggcacctccaccgagcccagcgagggcagcgcacccggcagccctgccggcagccccacctccacagaggagggaaccagcaccgagcccagcgaaggcagcgccccaggcaccagcaccgagcctagtgagcaggagattaaacggatcaacaagatcagaagaagacttgtgaaagacagcaacaccaagaaggccggcaagacaggccccatgaaaaccctgctggttagagtgatgacacccgatctgagagagcggctggaaaacctgagaaagaagcctgaaaatatcccccagcccatcagcaatacatctagagccaacctgaataagctgctgaccgattacaccgaaatgaagaaggcgatcctgcatgtgtactgggaagagttccagaaggaccctgtgggcctgatgagccgggtggcccagcctgccagcaagaagatcgatcagaacaagctgaaacctgagatggacgagaagggcaacctgaccaccgccggctttgcctgctctcagtgtggccagcccctgttcgtgtacaagctggagcaggtgtctgagaagggcaaggcttacaccaactacttcggacggtgcaatgtggccgagcacgaaaagctgatcctgctggcccagctgaagcccgagaaggatagcgacgaagccgtgacatatagcctgggaaagtttgggcagagggccctggatttctacagcattcatgtgaccaaggagtccacccaccccgtgaagcccctggcccagatcgccggaaacagatacgcctccggacctgtgggaaaggccctgagcgacgcatgtatgggcacaatcgcctccttcctgtctaagtaccaggacatcatcatcgaacaccagaaggtggtgaagggcaaccagaagagactggagagcctgcgggagctggccggcaaggaaaacctggaataccctagcgtgaccctgccacctcagcctcacaccaaggagggcgttgatgcctacaacgaagtgatcgcccgggtgcgaatgtgggtgaacctgaacctgtggcagaagctgaagctaagcagagatgatgccaagcctctgctgagactgaagggattcccttcctttcctctggtcgagagacaggccaacgaagtggactggtgggacatggtgtgtaacgtgaagaagctgatcaacgagaaaaaggaggatggcaaggtgttttggcagaatctggctggctacaagagacaggaagccctgagaccatacctgagcagcgaggaagatcggaagaagggaaagaaattcgctcggtaccagctgggcgacctgctgctgcacctggaaaagaagcacggcgaggactggggaaaggtgtacgacgaggcctgggagcggattgacaagaaagtggaaggcctgagcaagcacatcaagctggaagaggaacggagaagcgaggacgcccagagcaaggccgccctgaccgactggctgcgggctaaggccagcttcgtgatcgagggcctgaaggaggccgacaaggacgagttctgcagatgcgagctgaagctgcagaagtggtacggggacctgcggggaaagcccttcgccatcgaagccgagaacagcatcctggacatcagcggcttcagcaagcagtacaactgtgccttcatctggcagaaggacggcgtgaagaagctgaacctgtacctgatcatcaactacttcaagggcggcaagctgcggttcaagaagatcaaacctgaagccttcgaagccaacagattctacaccgtgatcaacaaaaagagcggcgagatcgtgcccatggaggtgaacttcaacttcgacgaccccaacctgatcatcctgcctctggcctttggcaagagacagggcagagaattcatctggaacgacctgctgtccctggaaaccggcagcctgaagctggccaacggaagagtgatcgagaagacactgtacaacagaagaacccggcaggatgagcctgccctgttcgtggccctgaccttcgagcggcgggaggtcctggactcctccaatatcaaaccaatgaacctgatcggcgtggcaagaggcgaaaacatccccgccgtgatcgccctgaccgaccccgagggctgcccactgagccggtttaaggatagcctgggaaacccaacccacatcctgagaatcggcgagagctataaggagaagcagcggaccatccaggccaagaaggaggtggagcagcggagagccggcggctacagccggaagtacgccagcaaagccaagaatctggcagacgatatggtgagaaacaccgctagagatctgctgtactacgccgtgacccaggatgccatgctgatcttcgccaacctgagccggggcttcggccggcagggcaagcggaccttcatggccgagagacagtacacacggatggaggactggctgaccgccaagctggcctacgagggcctgagcaagacctacctgtccaagacactggcccagtacacctccaagacatgcagcaactgtgggtttaccatcaccagcgccgactacgacagggtgctggagaagctgaagaagacagcaacaggctggatgaccacaattaacggcaaggagctgaaggtggagggccagattacctactacaacagatacaagagacagaacgtagtcaaggacctgtccgtcgagctggatagactgagcgaagaatctgtgaacaacgacatctcctcctggacaaagggcagaagcggagaagctctgagcctcctgaagaaaagattctcccatagacccgtgcaggagaagttcgtgtgcctgaactgcggcttcgagacacacgcagccgagcaagccgccctgaacatcgccagatcctggctgttcctgcggagccaggagtacaagaaataccagacaaacaagacaaccggcaacaccgataagagagccttcgtcgagacctggcagtccttttaccggaagaagcttaaggaggtgtggaaacctgccgtgcggtctggcggatctggcggaggctccaccagccccaagaaaaagagaaaagtctaagctgccttctgcggggcttgccttctggccatgcccttcttctctcccttgcacctgtacctcttggtctttgaataaagcctgagtaggaaggctagcaaaaaaaaaaaaaaaaaaaaaaaaaaaaaaaaaaaaaaaaaaaaaaaaaaaaaaaaaaaaaaaaaaaaaaaaaaaaaaaa

SEQ ID NO: 12781 - RNA, 5785 nt, synthetic construct
  source 1..5785: mol_type = other RNA
aggaaataagagagaaaagaagagtaagaagaaatataagagccaccatggcccctaagaagaagcgtaaagtgagccggatggaacgcctcgtctacgaggtgcggcagaagtgcagaaacatcgaggacatctgcatctcctgcggatctctgaacgtgaccctggagcacccactgttcatcggcggcatgtgccagaactgtaaaaactgttttctggagtgtgcctatcaatacgacgatgacggctaccagagctactgcaccatctgttgcggcggaagagaggtgctgatgtgtggaaataacaactgctgccggtgcttctgcgtggaatgcgtggacctgctggtgggccccggcgccgcccaggccgctattaaggaagatccttggaactgctacatgtgcggccacaagggcacatacggcctgctgagacggagagaggactggcctagcagactgcagatgttcttcgccaataaccacgaccaggagttcgacccccctaaggtgtaccctcccgtccccgccgagaagagaaagcccatccgggtcctgagcctgttcgatggcatcgccaccggtctgctggtgctgaaggacctgggcatccaggtggataggtacattgcctccgaggtgtgcgaggactccatcaccgtgggaatggtgcgtcatcagggcaagatcatgtacgtgggcgacgtgcggagcgtgacacagaagcatatccaggagtggggccctttcgacctggtgatcggcggcagcccttgcaatgacctgagcatcgtgaacccagcccggaagggcctgtacgagggaaccggcagactgttcttcgagttttacagactgctgcacgacgcccggcctaaggaaggcgacgaccggcccttcttttggctgttcgagaatgtggtggccatgggagtcagcgacaagcgggatattagccggttcctggagagcaaccccgtgatgatcgatgccaaggaagtgagcgccgcccaccgggccagatacttctggggcaatctgcctggcatgaacagacccctggccagcaccgtgaacgacaagctggagctgcaggagtgcctggagcacggccggatcgccaagttcagcaaggtgagaaccatcaccacccgaagcaacagcatcaaacaaggcaaggaccagcactttcctgtgttcatgaacgagaaggaggacatcctgtggtgtaccgagatggagagagtgttcgggttcccagtccactacacagatgtcagcaacatgtctagactggccagacagagactgctgggaagaagctggtccgtccctgtgatcagacacctgttcgcccctctgaaggagtacttcgcctgcgtgagcagcggcaacagcaacgccaacagccggggccccagcttctctagcggcctggtgccactgtccctgagagggagccacatgggccccatggagatctacaaaaccgtgagcgcctggaagcggcagcctgtgcgcgtgctgagcctgtttcggaatatcgataaagtcctgaaaagcctgggattcctggagagcggctctggctccggcggtggcaccctgaagtacgtggaggatgtgacaaacgtggtcagacgggatgtggagaagtggggccccttcgatctggtgtacggcagcacccaacccctgggcagctcttgtgaccggtgccctggctggtacatgtttcagttccaccggatcctgcagtacgccctgccgagacaggagtcccagcggccattcttttggattttcatggacaacttgctgctgaccgaggatgaccaggaaactaccactcggttcctgcagaccgaagccgtgaccctgcaggacgtgagaggccgggactaccagaacgccatgcgggtgtggtccaacatccctggactgaaaagcaagcacgcacctctgacccctaaagaagaggagtacctgcaggcccaggtgcggagcagaagcaagctggacgcccctaaggtggatctgctggtgaagaattgcctcctgcccctgagagagtacttcaagtatttcagccagaatagtctgcccctgggaggcagcggcggcggccaccagggcctgctgaccttcagggacgtggccgtggagttcagcctggaggagtggggcaggctgacccacacccagaggcagctgtacagggacgtgatgctggagaactacggccacctgctgttcctgggcctgatcgtgagcaagcccgacctggtgagcttcctggagcagaagaaggagccctggaacctgaagaggaagaagaccgtggccttccaccccgccatcagcagccacggcggcccaagcagcggcgcccctcctcccagcggcggcagcccagccggctccccaacctctaccgaggagggcacctctgagtccgccacccccgagagcggccctggcacctccaccgagcccagcgagggcagcgcacccggcagccctgccggcagccccacctccacagaggagggaaccagcaccgagcccagcgaaggcagcgccccaggcaccagcaccgagcctagtgagcaggagattaaacggatcaacaagatcagaagaagacttgtgaaagacagcaacaccaagaaggccggcaagacaggccccatgaaaaccctgctggttagagtgatgacacccgatctgagagagcggctggaaaacctgagaaagaagcctgaaaatatcccccagcccatcagcaatacatctagagccaacctgaataagctgctgaccgattacaccgaaatgaagaaggcgatcctgcatgtgtactgggaagagttccagaaggaccctgtgggcctgatgagccgggtggcccagcctgccagcaagaagatcgatcagaacaagctgaaacctgagatggacgagaagggcaacctgaccaccgccggctttgcctgctctcagtgtggccagcccctgttcgtgtacaagctggagcaggtgtctgagaagggcaaggcttacaccaactacttcggacggtgcaatgtggccgagcacgaaaagctgatcctgctggcccagctgaagcccgagaaggatagcgacgaagccgtgacatatagcctgggaaagtttgggcagagggccctggatttctacagcattcatgtgaccaaggagtccacccaccccgtgaagcccctggcccagatcgccggaaacagatacgcctccggacctgtgggaaaggccctgagcgacgcatgtatgggcacaatcgcctccttcctgtctaagtaccaggacatcatcatcgaacaccagaaggtggtgaagggcaaccagaagagactggagagcctgcgggagctggccggcaaggaaaacctggaataccctagcgtgaccctgccacctcagcctcacaccaaggagggcgttgatgcctacaacgaagtgatcgcccgggtgcgaatgtgggtgaacctgaacctgtggcagaagctgaagctaagcagagatgatgccaagcctctgctgagactgaagggattcccttcctttcctctggtcgagagacaggccaacgaagtggactggtgggacatggtgtgtaacgtgaagaagctgatcaacgagaaaaaggaggatggcaaggtgttttggcagaatctggctggctacaagagacaggaagccctgagaccatacctgagcagcgaggaagatcggaagaagggaaagaaattcgctcggtaccagctgggcgacctgctgctgcacctggaaaagaagcacggcgaggactggggaaaggtgtacgacgaggcctgggagcggattgacaagaaagtggaaggcctgagcaagcacatcaagctggaagaggaacggagaagcgaggacgcccagagcaaggccgccctgaccgactggctgcgggctaaggccagcttcgtgatcgagggcctgaaggaggccgacaaggacgagttctgcagatgcgagctgaagctgcagaagtggtacggggacctgcggggaaagcccttcgccatcgaagccgagaacagcatcctggacatcagcggcttcagcaagcagtacaactgtgccttcatctggcagaaggacggcgtgaagaagctgaacctgtacctgatcatcaactacttcaagggcggcaagctgcggttcaagaagatcaaacctgaagccttcgaagccaacagattctacaccgtgatcaacaaaaagagcggcgagatcgtgcccatggaggtgaacttcaacttcgacgaccccaacctgatcatcctgcctctggcctttggcaagagacagggcagagaattcatctggaacgacctgctgtccctggaaaccggcagcctgaagctggccaacggaagagtgatcgagaagacactgtacaacagaagaacccggcaggatgagcctgccctgttcgtggccctgaccttcgagcggcgggaggtcctggactcctccaatatcaaaccaatgaacctgatcggcgtggcaagaggcgaaaacatccccgccgtgatcgccctgaccgaccccgagggctgcccactgagccggtttaaggatagcctgggaaacccaacccacatcctgagaatcggcgagagctataaggagaagcagcggaccatccaggccaagaaggaggtggagcagcggagagccggcggctacagccggaagtacgccagcaaagccaagaatctggcagacgatatggtgagaaacaccgctagagatctgctgtactacgccgtgacccaggatgccatgctgatcttcgccaacctgagccggggcttcggccggcagggcaagcggaccttcatggccgagagacagtacacacggatggaggactggctgaccgccaagctggcctacgagggcctgagcaagacctacctgtccaagacactggcccagtacacctccaagacatgcagcaactgtgggtttaccatcaccagcgccgactacgacagggtgctggagaagctgaagaagacagcaacaggctggatgaccacaattaacggcaaggagctgaaggtggagggccagattacctactacaacagatacaagagacagaacgtagtcaaggacctgtccgtcgagctggatagactgagcgaagaatctgtgaacaacgacatctcctcctggacaaagggcagaagcggagaagctctgagcctcctgaagaaaagattctcccatagacccgtgcaggagaagttcgtgtgcctgaactgcggcttcgagacacacgcagccgagcaagccgccctgaacatcgccagatcctggctgttcctgcggagccaggagtacaagaaataccagacaaacaagacaaccggcaacaccgataagagagccttcgtcgagacctggcagtccttttaccggaagaagcttaaggaggtgtggaaacctgccgtgcggtctggcggatctggcggaggctccaccagccccaagaaaaagagaaaagtctaagctgccttctgcggggcttgccttctggccatgcccttcttctctcccttgcacctgtacctcttggtctttgaataaagcctgagtaggaaggctagcaaaaaaaaaaaaaaaaaaaaaaaaaaaaaaaaaaaaaaaaaaaaaaaaaaaaaaaaaaaaaaaaaaaaaaaaaaaaaaaa

SEQ ID NO: 12782 - RNA, 5785 nt, synthetic construct
  source 1..5785: mol_type = other RNA
aggaaataagagagaaaagaagagtaagaagaaatataagagccaccatggcccctaagaagaagcgtaaagtgagccggatggaacgcctcgtctacgaggtgcggcagaagtgcagaaacatcgaggacatctgcatctcctgcggatctctgaacgtgaccctggagcacccactgttcatcggcggcatgtgccagaactgtaaaaactgttttctggagtgtgcctatcaatacgacgatgacggctaccagagctactgcaccatctgttgcggcggaagagaggtgctgatgtgtggaaataacaactgctgccggtgcttctgcgtggaatgcgtggacctgctggtgggccccggcgccgcccaggccgctattaaggaagatccttggaactgctacatgtgcggccacaagggcacatacggcctgctgagacggagagaggactggcctagcagactgcagatgttcttcgccaataaccacgaccaggagttcgacccccctaaggtgtaccctcccgtccccgccgagaagagaaagcccatccgggtcctgagcctgttcgatggcatcgccaccggtctgctggtgctgaaggacctgggcatccaggtggataggtacattgcctccgaggtgtgcgaggactccatcaccgtgggaatggtgcgtcatcagggcaagatcatgtacgtgggcgacgtgcggagcgtgacacagaagcatatccaggagtggggccctttcgacctggtgatcggcggcagcccttgcaatgacctgagcatcgtgaacccagcccggaagggcctgtacgagggaaccggcagactgttcttcgagttttacagactgctgcacgacgcccggcctaaggaaggcgacgaccggcccttcttttggctgttcgagaatgtggtggccatgggagtcagcgacaagcgggatattagccggttcctggagagcaaccccgtgatgatcgatgccaaggaagtgagcgccgcccaccgggccagatacttctggggcaatctgcctggcatgaacagacccctggccagcaccgtgaacgacaagctggagctgcaggagtgcctggagcacggccggatcgccaagttcagcaaggtgagaaccatcaccacccgaagcaacagcatcaaacaaggcaaggaccagcactttcctgtgttcatgaacgagaaggaggacatcctgtggtgtaccgagatggagagagtgttcgggttcccagtccactacacagatgtcagcaacatgtctagactggccagacagagactgctgggaagaagctggtccgtccctgtgatcagacacctgttcgcccctctgaaggagtacttcgcctgcgtgagcagcggcaacagcaacgccaacagccggggccccagcttctctagcggcctggtgccactgtccctgagagggagccacatgggccccatggagatctacaaaaccgtgagcgcctggaagcggcagcctgtgcgcgtgctgagcctgtttcggaatatcgataaagtcctgaaaagcctgggattcctggagagcggctctggctccggcggtggcaccctgaagtacgtggaggatgtgacaaacgtggtcagacgggatgtggagaagtggggccccttcgatctggtgtacggcagcacccaacccctgggcagctcttgtgaccggtgccctggctggtacatgtttcagttccaccggatcctgcagtacgccctgccgagacaggagtcccagcggccattcttttggattttcatggacaacttgctgctgaccgaggatgaccaggaaactaccactcggttcctgcagaccgaagccgtgaccctgcaggacgtgagaggccgggactaccagaacgccatgcgggtgtggtccaacatccctggactgaaaagcaagcacgcacctctgacccctaaagaagaggagtacctgcaggcccaggtgcggagcagaagcaagctggacgcccctaaggtggatctgctggtgaagaattgcctcctgcccctgagagagtacttcaagtatttcagccagaatagtctgcccctgggaggcagcggcggcggcagcgtggagatgctgagcttcagggacgtggccatcgacttcagcgccggcgagctggagtgcctggagcccgcccagtgggacctgtacagggacgtgatgctggagaacttcagccacctggtgttcctgggcttcagcttcagcaagcccctgctggtgaggttcctggagaagaaccaggagctgaggaacgtgaagaggaaggccgccaccgtgcccaggggcaagaagccctacaagggcggcccaagcagcggcgcccctcctcccagcggcggcagcccagccggctccccaacctctaccgaggagggcacctctgagtccgccacccccgagagcggccctggcacctccaccgagcccagcgagggcagcgcacccggcagccctgccggcagccccacctccacagaggagggaaccagcaccgagcccagcgaaggcagcgccccaggcaccagcaccgagcctagtgagcaggagattaaacggatcaacaagatcagaagaagacttgtgaaagacagcaacaccaagaaggccggcaagacaggccccatgaaaaccctgctggttagagtgatgacacccgatctgagagagcggctggaaaacctgagaaagaagcctgaaaatatcccccagcccatcagcaatacatctagagccaacctgaataagctgctgaccgattacaccgaaatgaagaaggcgatcctgcatgtgtactgggaagagttccagaaggaccctgtgggcctgatgagccgggtggcccagcctgccagcaagaagatcgatcagaacaagctgaaacctgagatggacgagaagggcaacctgaccaccgccggctttgcctgctctcagtgtggccagcccctgttcgtgtacaagctggagcaggtgtctgagaagggcaaggcttacaccaactacttcggacggtgcaatgtggccgagcacgaaaagctgatcctgctggcccagctgaagcccgagaaggatagcgacgaagccgtgacatatagcctgggaaagtttgggcagagggccctggatttctacagcattcatgtgaccaaggagtccacccaccccgtgaagcccctggcccagatcgccggaaacagatacgcctccggacctgtgggaaaggccctgagcgacgcatgtatgggcacaatcgcctccttcctgtctaagtaccaggacatcatcatcgaacaccagaaggtggtgaagggcaaccagaagagactggagagcctgcgggagctggccggcaaggaaaacctggaataccctagcgtgaccctgccacctcagcctcacaccaaggagggcgttgatgcctacaacgaagtgatcgcccgggtgcgaatgtgggtgaacctgaacctgtggcagaagctgaagctaagcagagatgatgccaagcctctgctgagactgaagggattcccttcctttcctctggtcgagagacaggccaacgaagtggactggtgggacatggtgtgtaacgtgaagaagctgatcaacgagaaaaaggaggatggcaaggtgttttggcagaatctggctggctacaagagacaggaagccctgagaccatacctgagcagcgaggaagatcggaagaagggaaagaaattcgctcggtaccagctgggcgacctgctgctgcacctggaaaagaagcacggcgaggactggggaaaggtgtacgacgaggcctgggagcggattgacaagaaagtggaaggcctgagcaagcacatcaagctggaagaggaacggagaagcgaggacgcccagagcaaggccgccctgaccgactggctgcgggctaaggccagcttcgtgatcgagggcctgaaggaggccgacaaggacgagttctgcagatgcgagctgaagctgcagaagtggtacggggacctgcggggaaagcccttcgccatcgaagccgagaacagcatcctggacatcagcggcttcagcaagcagtacaactgtgccttcatctggcagaaggacggcgtgaagaagctgaacctgtacctgatcatcaactacttcaagggcggcaagctgcggttcaagaagatcaaacctgaagccttcgaagccaacagattctacaccgtgatcaacaaaaagagcggcgagatcgtgcccatggaggtgaacttcaacttcgacgaccccaacctgatcatcctgcctctggcctttggcaagagacagggcagagaattcatctggaacgacctgctgtccctggaaaccggcagcctgaagctggccaacggaagagtgatcgagaagacactgtacaacagaagaacccggcaggatgagcctgccctgttcgtggccctgaccttcgagcggcgggaggtcctggactcctccaatatcaaaccaatgaacctgatcggcgtggcaagaggcgaaaacatccccgccgtgatcgccctgaccgaccccgagggctgcccactgagccggtttaaggatagcctgggaaacccaacccacatcctgagaatcggcgagagctataaggagaagcagcggaccatccaggccaagaaggaggtggagcagcggagagccggcggctacagccggaagtacgccagcaaagccaagaatctggcagacgatatggtgagaaacaccgctagagatctgctgtactacgccgtgacccaggatgccatgctgatcttcgccaacctgagccggggcttcggccggcagggcaagcggaccttcatggccgagagacagtacacacggatggaggactggctgaccgccaagctggcctacgagggcctgagcaagacctacctgtccaagacactggcccagtacacctccaagacatgcagcaactgtgggtttaccatcaccagcgccgactacgacagggtgctggagaagctgaagaagacagcaacaggctggatgaccacaattaacggcaaggagctgaaggtggagggccagattacctactacaacagatacaagagacagaacgtagtcaaggacctgtccgtcgagctggatagactgagcgaagaatctgtgaacaacgacatctcctcctggacaaagggcagaagcggagaagctctgagcctcctgaagaaaagattctcccatagacccgtgcaggagaagttcgtgtgcctgaactgcggcttcgagacacacgcagccgagcaagccgccctgaacatcgccagatcctggctgttcctgcggagccaggagtacaagaaataccagacaaacaagacaaccggcaacaccgataagagagccttcgtcgagacctggcagtccttttaccggaagaagcttaaggaggtgtggaaacctgccgtgcggtctggcggatctggcggaggctccaccagccccaagaaaaagagaaaagtctaagctgccttctgcggggcttgccttctggccatgcccttcttctctcccttgcacctgtacctcttggtctttgaataaagcctgagtaggaaggctagcaaaaaaaaaaaaaaaaaaaaaaaaaaaaaaaaaaaaaaaaaaaaaaaaaaaaaaaaaaaaaaaaaaaaaaaaaaaaaaaa

SEQ ID NO: 12783 - RNA, 5785 nt, synthetic construct
  source 1..5785: mol_type = other RNA
aggaaataagagagaaaagaagagtaagaagaaatataagagccaccatggcccctaagaagaagcgtaaagtgagccggatggaacgcctcgtctacgaggtgcggcagaagtgcagaaacatcgaggacatctgcatctcctgcggatctctgaacgtgaccctggagcacccactgttcatcggcggcatgtgccagaactgtaaaaactgttttctggagtgtgcctatcaatacgacgatgacggctaccagagctactgcaccatctgttgcggcggaagagaggtgctgatgtgtggaaataacaactgctgccggtgcttctgcgtggaatgcgtggacctgctggtgggccccggcgccgcccaggccgctattaaggaagatccttggaactgctacatgtgcggccacaagggcacatacggcctgctgagacggagagaggactggcctagcagactgcagatgttcttcgccaataaccacgaccaggagttcgacccccctaaggtgtaccctcccgtccccgccgagaagagaaagcccatccgggtcctgagcctgttcgatggcatcgccaccggtctgctggtgctgaaggacctgggcatccaggtggataggtacattgcctccgaggtgtgcgaggactccatcaccgtgggaatggtgcgtcatcagggcaagatcatgtacgtgggcgacgtgcggagcgtgacacagaagcatatccaggagtggggccctttcgacctggtgatcggcggcagcccttgcaatgacctgagcatcgtgaacccagcccggaagggcctgtacgagggaaccggcagactgttcttcgagttttacagactgctgcacgacgcccggcctaaggaaggcgacgaccggcccttcttttggctgttcgagaatgtggtggccatgggagtcagcgacaagcgggatattagccggttcctggagagcaaccccgtgatgatcgatgccaaggaagtgagcgccgcccaccgggccagatacttctggggcaatctgcctggcatgaacagacccctggccagcaccgtgaacgacaagctggagctgcaggagtgcctggagcacggccggatcgccaagttcagcaaggtgagaaccatcaccacccgaagcaacagcatcaaacaaggcaaggaccagcactttcctgtgttcatgaacgagaaggaggacatcctgtggtgtaccgagatggagagagtgttcgggttcccagtccactacacagatgtcagcaacatgtctagactggccagacagagactgctgggaagaagctggtccgtccctgtgatcagacacctgttcgcccctctgaaggagtacttcgcctgcgtgagcagcggcaacagcaacgccaacagccggggccccagcttctctagcggcctggtgccactgtccctgagagggagccacatgggccccatggagatctacaaaaccgtgagcgcctggaagcggcagcctgtgcgcgtgctgagcctgtttcggaatatcgataaagtcctgaaaagcctgggattcctggagagcggctctggctccggcggtggcaccctgaagtacgtggaggatgtgacaaacgtggtcagacgggatgtggagaagtggggccccttcgatctggtgtacggcagcacccaacccctgggcagctcttgtgaccggtgccctggctggtacatgtttcagttccaccggatcctgcagtacgccctgccgagacaggagtcccagcggccattcttttggattttcatggacaacttgctgctgaccgaggatgaccaggaaactaccactcggttcctgcagaccgaagccgtgaccctgcaggacgtgagaggccgggactaccagaacgccatgcgggtgtggtccaacatccctggactgaaaagcaagcacgcacctctgacccctaaagaagaggagtacctgcaggcccaggtgcggagcagaagcaagctggacgcccctaaggtggatctgctggtgaagaattgcctcctgcccctgagagagtacttcaagtatttcagccagaatagtctgcccctgggaggcagcggcggcggcagccaggagagcgtgagcttcgaggacgtggccgtgtacttcacccagaaccagtgggccagcctggacagcgcccagaggaccctgtacagggaggtgatgctggagaactacgccaacgtgaccagcctggccgccttccccttccccaagcccgacctgatcttccagctggagaggggcaaggcccccggcggcctggacccctggacccccatcaggaggaaggtgaggggcgtgtgcggcggcccaagcagcggcgcccctcctcccagcggcggcagcccagccggctccccaacctctaccgaggagggcacctctgagtccgccacccccgagagcggccctggcacctccaccgagcccagcgagggcagcgcacccggcagccctgccggcagccccacctccacagaggagggaaccagcaccgagcccagcgaaggcagcgccccaggcaccagcaccgagcctagtgagcaggagattaaacggatcaacaagatcagaagaagacttgtgaaagacagcaacaccaagaaggccggcaagacaggccccatgaaaaccctgctggttagagtgatgacacccgatctgagagagcggctggaaaacctgagaaagaagcctgaaaatatcccccagcccatcagcaatacatctagagccaacctgaataagctgctgaccgattacaccgaaatgaagaaggcgatcctgcatgtgtactgggaagagttccagaaggaccctgtgggcctgatgagccgggtggcccagcctgccagcaagaagatcgatcagaacaagctgaaacctgagatggacgagaagggcaacctgaccaccgccggctttgcctgctctcagtgtggccagcccctgttcgtgtacaagctggagcaggtgtctgagaagggcaaggcttacaccaactacttcggacggtgcaatgtggccgagcacgaaaagctgatcctgctggcccagctgaagcccgagaaggatagcgacgaagccgtgacatatagcctgggaaagtttgggcagagggccctggatttctacagcattcatgtgaccaaggagtccacccaccccgtgaagcccctggcccagatcgccggaaacagatacgcctccggacctgtgggaaaggccctgagcgacgcatgtatgggcacaatcgcctccttcctgtctaagtaccaggacatcatcatcgaacaccagaaggtggtgaagggcaaccagaagagactggagagcctgcgggagctggccggcaaggaaaacctggaataccctagcgtgaccctgccacctcagcctcacaccaaggagggcgttgatgcctacaacgaagtgatcgcccgggtgcgaatgtgggtgaacctgaacctgtggcagaagctgaagctaagcagagatgatgccaagcctctgctgagactgaagggattcccttcctttcctctggtcgagagacaggccaacgaagtggactggtgggacatggtgtgtaacgtgaagaagctgatcaacgagaaaaaggaggatggcaaggtgttttggcagaatctggctggctacaagagacaggaagccctgagaccatacctgagcagcgaggaagatcggaagaagggaaagaaattcgctcggtaccagctgggcgacctgctgctgcacctggaaaagaagcacggcgaggactggggaaaggtgtacgacgaggcctgggagcggattgacaagaaagtggaaggcctgagcaagcacatcaagctggaagaggaacggagaagcgaggacgcccagagcaaggccgccctgaccgactggctgcgggctaaggccagcttcgtgatcgagggcctgaaggaggccgacaaggacgagttctgcagatgcgagctgaagctgcagaagtggtacggggacctgcggggaaagcccttcgccatcgaagccgagaacagcatcctggacatcagcggcttcagcaagcagtacaactgtgccttcatctggcagaaggacggcgtgaagaagctgaacctgtacctgatcatcaactacttcaagggcggcaagctgcggttcaagaagatcaaacctgaagccttcgaagccaacagattctacaccgtgatcaacaaaaagagcggcgagatcgtgcccatggaggtgaacttcaacttcgacgaccccaacctgatcatcctgcctctggcctttggcaagagacagggcagagaattcatctggaacgacctgctgtccctggaaaccggcagcctgaagctggccaacggaagagtgatcgagaagacactgtacaacagaagaacccggcaggatgagcctgccctgttcgtggccctgaccttcgagcggcgggaggtcctggactcctccaatatcaaaccaatgaacctgatcggcgtggcaagaggcgaaaacatccccgccgtgatcgccctgaccgaccccgagggctgcccactgagccggtttaaggatagcctgggaaacccaacccacatcctgagaatcggcgagagctataaggagaagcagcggaccatccaggccaagaaggaggtggagcagcggagagccggcggctacagccggaagtacgccagcaaagccaagaatctggcagacgatatggtgagaaacaccgctagagatctgctgtactacgccgtgacccaggatgccatgctgatcttcgccaacctgagccggggcttcggccggcagggcaagcggaccttcatggccgagagacagtacacacggatggaggactggctgaccgccaagctggcctacgagggcctgagcaagacctacctgtccaagacactggcccagtacacctccaagacatgcagcaactgtgggtttaccatcaccagcgccgactacgacagggtgctggagaagctgaagaagacagcaacaggctggatgaccacaattaacggcaaggagctgaaggtggagggccagattacctactacaacagatacaagagacagaacgtagtcaaggacctgtccgtcgagctggatagactgagcgaagaatctgtgaacaacgacatctcctcctggacaaagggcagaagcggagaagctctgagcctcctgaagaaaagattctcccatagacccgtgcaggagaagttcgtgtgcctgaactgcggcttcgagacacacgcagccgagcaagccgccctgaacatcgccagatcctggctgttcctgcggagccaggagtacaagaaataccagacaaacaagacaaccggcaacaccgataagagagccttcgtcgagacctggcagtccttttaccggaagaagcttaaggaggtgtggaaacctgccgtgcggtctggcggatctggcggaggctccaccagccccaagaaaaagagaaaagtctaagctgccttctgcggggcttgccttctggccatgcccttcttctctcccttgcacctgtacctcttggtctttgaataaagcctgagtaggaaggctagcaaaaaaaaaaaaaaaaaaaaaaaaaaaaaaaaaaaaaaaaaaaaaaaaaaaaaaaaaaaaaaaaaaaaaaaaaaaaaaaa

SEQ ID NO: 12784 - RNA, 5785 nt, synthetic construct
  source 1..5785: mol_type = other RNA
aggaaataagagagaaaagaagagtaagaagaaatataagagccaccatggcccctaagaagaagcgtaaagtgagccggatggaacgcctcgtctacgaggtgcggcagaagtgcagaaacatcgaggacatctgcatctcctgcggatctctgaacgtgaccctggagcacccactgttcatcggcggcatgtgccagaactgtaaaaactgttttctggagtgtgcctatcaatacgacgatgacggctaccagagctactgcaccatctgttgcggcggaagagaggtgctgatgtgtggaaataacaactgctgccggtgcttctgcgtggaatgcgtggacctgctggtgggccccggcgccgcccaggccgctattaaggaagatccttggaactgctacatgtgcggccacaagggcacatacggcctgctgagacggagagaggactggcctagcagactgcagatgttcttcgccaataaccacgaccaggagttcgacccccctaaggtgtaccctcccgtccccgccgagaagagaaagcccatccgggtcctgagcctgttcgatggcatcgccaccggtctgctggtgctgaaggacctgggcatccaggtggataggtacattgcctccgaggtgtgcgaggactccatcaccgtgggaatggtgcgtcatcagggcaagatcatgtacgtgggcgacgtgcggagcgtgacacagaagcatatccaggagtggggccctttcgacctggtgatcggcggcagcccttgcaatgacctgagcatcgtgaacccagcccggaagggcctgtacgagggaaccggcagactgttcttcgagttttacagactgctgcacgacgcccggcctaaggaaggcgacgaccggcccttcttttggctgttcgagaatgtggtggccatgggagtcagcgacaagcgggatattagccggttcctggagagcaaccccgtgatgatcgatgccaaggaagtgagcgccgcccaccgggccagatacttctggggcaatctgcctggcatgaacagacccctggccagcaccgtgaacgacaagctggagctgcaggagtgcctggagcacggccggatcgccaagttcagcaaggtgagaaccatcaccacccgaagcaacagcatcaaacaaggcaaggaccagcactttcctgtgttcatgaacgagaaggaggacatcctgtggtgtaccgagatggagagagtgttcgggttcccagtccactacacagatgtcagcaacatgtctagactggccagacagagactgctgggaagaagctggtccgtccctgtgatcagacacctgttcgcccctctgaaggagtacttcgcctgcgtgagcagcggcaacagcaacgccaacagccggggccccagcttctctagcggcctggtgccactgtccctgagagggagccacatgggccccatggagatctacaaaaccgtgagcgcctggaagcggcagcctgtgcgcgtgctgagcctgtttcggaatatcgataaagtcctgaaaagcctgggattcctggagagcggctctggctccggcggtggcaccctgaagtacgtggaggatgtgacaaacgtggtcagacgggatgtggagaagtggggccccttcgatctggtgtacggcagcacccaacccctgggcagctcttgtgaccggtgccctggctggtacatgtttcagttccaccggatcctgcagtacgccctgccgagacaggagtcccagcggccattcttttggattttcatggacaacttgctgctgaccgaggatgaccaggaaactaccactcggttcctgcagaccgaagccgtgaccctgcaggacgtgagaggccgggactaccagaacgccatgcgggtgtggtccaacatccctggactgaaaagcaagcacgcacctctgacccctaaagaagaggagtacctgcaggcccaggtgcggagcagaagcaagctggacgcccctaaggtggatctgctggtgaagaattgcctcctgcccctgagagagtacttcaagtatttcagccagaatagtctgcccctgggaggcagcggcggcggcgcccaggagagcgtgatgttcagcgacgtgagcatcgacttcagccaggaggagtgggagtacctgaacgacgaccagagggacctgtacagggaggtgatgctggagaactacagcaacctggtgagcatggccggccacagcatcagcaagcccgacgtgatcagcttcctggagcagggcaaggagccctggctggtggacagggagctgaccagggaccagtggcccgtgctggagagcggcggcccaagcagcggcgcccctcctcccagcggcggcagcccagccggctccccaacctctaccgaggagggcacctctgagtccgccacccccgagagcggccctggcacctccaccgagcccagcgagggcagcgcacccggcagccctgccggcagccccacctccacagaggagggaaccagcaccgagcccagcgaaggcagcgccccaggcaccagcaccgagcctagtgagcaggagattaaacggatcaacaagatcagaagaagacttgtgaaagacagcaacaccaagaaggccggcaagacaggccccatgaaaaccctgctggttagagtgatgacacccgatctgagagagcggctggaaaacctgagaaagaagcctgaaaatatcccccagcccatcagcaatacatctagagccaacctgaataagctgctgaccgattacaccgaaatgaagaaggcgatcctgcatgtgtactgggaagagttccagaaggaccctgtgggcctgatgagccgggtggcccagcctgccagcaagaagatcgatcagaacaagctgaaacctgagatggacgagaagggcaacctgaccaccgccggctttgcctgctctcagtgtggccagcccctgttcgtgtacaagctggagcaggtgtctgagaagggcaaggcttacaccaactacttcggacggtgcaatgtggccgagcacgaaaagctgatcctgctggcccagctgaagcccgagaaggatagcgacgaagccgtgacatatagcctgggaaagtttgggcagagggccctggatttctacagcattcatgtgaccaaggagtccacccaccccgtgaagcccctggcccagatcgccggaaacagatacgcctccggacctgtgggaaaggccctgagcgacgcatgtatgggcacaatcgcctccttcctgtctaagtaccaggacatcatcatcgaacaccagaaggtggtgaagggcaaccagaagagactggagagcctgcgggagctggccggcaaggaaaacctggaataccctagcgtgaccctgccacctcagcctcacaccaaggagggcgttgatgcctacaacgaagtgatcgcccgggtgcgaatgtgggtgaacctgaacctgtggcagaagctgaagctaagcagagatgatgccaagcctctgctgagactgaagggattcccttcctttcctctggtcgagagacaggccaacgaagtggactggtgggacatggtgtgtaacgtgaagaagctgatcaacgagaaaaaggaggatggcaaggtgttttggcagaatctggctggctacaagagacaggaagccctgagaccatacctgagcagcgaggaagatcggaagaagggaaagaaattcgctcggtaccagctgggcgacctgctgctgcacctggaaaagaagcacggcgaggactggggaaaggtgtacgacgaggcctgggagcggattgacaagaaagtggaaggcctgagcaagcacatcaagctggaagaggaacggagaagcgaggacgcccagagcaaggccgccctgaccgactggctgcgggctaaggccagcttcgtgatcgagggcctgaaggaggccgacaaggacgagttctgcagatgcgagctgaagctgcagaagtggtacggggacctgcggggaaagcccttcgccatcgaagccgagaacagcatcctggacatcagcggcttcagcaagcagtacaactgtgccttcatctggcagaaggacggcgtgaagaagctgaacctgtacctgatcatcaactacttcaagggcggcaagctgcggttcaagaagatcaaacctgaagccttcgaagccaacagattctacaccgtgatcaacaaaaagagcggcgagatcgtgcccatggaggtgaacttcaacttcgacgaccccaacctgatcatcctgcctctggcctttggcaagagacagggcagagaattcatctggaacgacctgctgtccctggaaaccggcagcctgaagctggccaacggaagagtgatcgagaagacactgtacaacagaagaacccggcaggatgagcctgccctgttcgtggccctgaccttcgagcggcgggaggtcctggactcctccaatatcaaaccaatgaacctgatcggcgtggcaagaggcgaaaacatccccgccgtgatcgccctgaccgaccccgagggctgcccactgagccggtttaaggatagcctgggaaacccaacccacatcctgagaatcggcgagagctataaggagaagcagcggaccatccaggccaagaaggaggtggagcagcggagagccggcggctacagccggaagtacgccagcaaagccaagaatctggcagacgatatggtgagaaacaccgctagagatctgctgtactacgccgtgacccaggatgccatgctgatcttcgccaacctgagccggggcttcggccggcagggcaagcggaccttcatggccgagagacagtacacacggatggaggactggctgaccgccaagctggcctacgagggcctgagcaagacctacctgtccaagacactggcccagtacacctccaagacatgcagcaactgtgggtttaccatcaccagcgccgactacgacagggtgctggagaagctgaagaagacagcaacaggctggatgaccacaattaacggcaaggagctgaaggtggagggccagattacctactacaacagatacaagagacagaacgtagtcaaggacctgtccgtcgagctggatagactgagcgaagaatctgtgaacaacgacatctcctcctggacaaagggcagaagcggagaagctctgagcctcctgaagaaaagattctcccatagacccgtgcaggagaagttcgtgtgcctgaactgcggcttcgagacacacgcagccgagcaagccgccctgaacatcgccagatcctggctgttcctgcggagccaggagtacaagaaataccagacaaacaagacaaccggcaacaccgataagagagccttcgtcgagacctggcagtccttttaccggaagaagcttaaggaggtgtggaaacctgccgtgcggtctggcggatctggcggaggctccaccagccccaagaaaaagagaaaagtctaagctgccttctgcggggcttgccttctggccatgcccttcttctctcccttgcacctgtacctcttggtctttgaataaagcctgagtaggaaggctagcaaaaaaaaaaaaaaaaaaaaaaaaaaaaaaaaaaaaaaaaaaaaaaaaaaaaaaaaaaaaaaaaaaaaaaaaaaaaaaaa

SEQ ID NO: 12785 - RNA, 5785 nt, synthetic construct
  source 1..5785: mol_type = other RNA
aggaaataagagagaaaagaagagtaagaagaaatataagagccaccatggcccctaagaagaagcgtaaagtgagccggatggaacgcctcgtctacgaggtgcggcagaagtgcagaaacatcgaggacatctgcatctcctgcggatctctgaacgtgaccctggagcacccactgttcatcggcggcatgtgccagaactgtaaaaactgttttctggagtgtgcctatcaatacgacgatgacggctaccagagctactgcaccatctgttgcggcggaagagaggtgctgatgtgtggaaataacaactgctgccggtgcttctgcgtggaatgcgtggacctgctggtgggccccggcgccgcccaggccgctattaaggaagatccttggaactgctacatgtgcggccacaagggcacatacggcctgctgagacggagagaggactggcctagcagactgcagatgttcttcgccaataaccacgaccaggagttcgacccccctaaggtgtaccctcccgtccccgccgagaagagaaagcccatccgggtcctgagcctgttcgatggcatcgccaccggtctgctggtgctgaaggacctgggcatccaggtggataggtacattgcctccgaggtgtgcgaggactccatcaccgtgggaatggtgcgtcatcagggcaagatcatgtacgtgggcgacgtgcggagcgtgacacagaagcatatccaggagtggggccctttcgacctggtgatcggcggcagcccttgcaatgacctgagcatcgtgaacccagcccggaagggcctgtacgagggaaccggcagactgttcttcgagttttacagactgctgcacgacgcccggcctaaggaaggcgacgaccggcccttcttttggctgttcgagaatgtggtggccatgggagtcagcgacaagcgggatattagccggttcctggagagcaaccccgtgatgatcgatgccaaggaagtgagcgccgcccaccgggccagatacttctggggcaatctgcctggcatgaacagacccctggccagcaccgtgaacgacaagctggagctgcaggagtgcctggagcacggccggatcgccaagttcagcaaggtgagaaccatcaccacccgaagcaacagcatcaaacaaggcaaggaccagcactttcctgtgttcatgaacgagaaggaggacatcctgtggtgtaccgagatggagagagtgttcgggttcccagtccactacacagatgtcagcaacatgtctagactggccagacagagactgctgggaagaagctggtccgtccctgtgatcagacacctgttcgcccctctgaaggagtacttcgcctgcgtgagcagcggcaacagcaacgccaacagccggggccccagcttctctagcggcctggtgccactgtccctgagagggagccacatgggccccatggagatctacaaaaccgtgagcgcctggaagcggcagcctgtgcgcgtgctgagcctgtttcggaatatcgataaagtcctgaaaagcctgggattcctggagagcggctctggctccggcggtggcaccctgaagtacgtggaggatgtgacaaacgtggtcagacgggatgtggagaagtggggccccttcgatctggtgtacggcagcacccaacccctgggcagctcttgtgaccggtgccctggctggtacatgtttcagttccaccggatcctgcagtacgccctgccgagacaggagtcccagcggccattcttttggattttcatggacaacttgctgctgaccgaggatgaccaggaaactaccactcggttcctgcagaccgaagccgtgaccctgcaggacgtgagaggccgggactaccagaacgccatgcgggtgtggtccaacatccctggactgaaaagcaagcacgcacctctgacccctaaagaagaggagtacctgcaggcccaggtgcggagcagaagcaagctggacgcccctaaggtggatctgctggtgaagaattgcctcctgcccctgagagagtacttcaagtatttcagccagaatagtctgcccctgggaggcagcggcggcggcagcaaggtgcccgtgaccttcggcgacctggccatctacttcagccaggaggagtgggagtggctgagccccatccagaaggacctgtacgaggacgtgatgctggagaactaccagaacctggtgagcctgggcctgagcttcaggaggcccaacgtgatcaccctgctggagaagggcaaggccccctgggtggtggagcccgtgaggaagaggaggggcctggacagcggcttcaagtgcggcggcccaagcagcggcgcccctcctcccagcggcggcagcccagccggctccccaacctctaccgaggagggcacctctgagtccgccacccccgagagcggccctggcacctccaccgagcccagcgagggcagcgcacccggcagccctgccggcagccccacctccacagaggagggaaccagcaccgagcccagcgaaggcagcgccccaggcaccagcaccgagcctagtgagcaggagattaaacggatcaacaagatcagaagaagacttgtgaaagacagcaacaccaagaaggccggcaagacaggccccatgaaaaccctgctggttagagtgatgacacccgatctgagagagcggctggaaaacctgagaaagaagcctgaaaatatcccccagcccatcagcaatacatctagagccaacctgaataagctgctgaccgattacaccgaaatgaagaaggcgatcctgcatgtgtactgggaagagttccagaaggaccctgtgggcctgatgagccgggtggcccagcctgccagcaagaagatcgatcagaacaagctgaaacctgagatggacgagaagggcaacctgaccaccgccggctttgcctgctctcagtgtggccagcccctgttcgtgtacaagctggagcaggtgtctgagaagggcaaggcttacaccaactacttcggacggtgcaatgtggccgagcacgaaaagctgatcctgctggcccagctgaagcccgagaaggatagcgacgaagccgtgacatatagcctgggaaagtttgggcagagggccctggatttctacagcattcatgtgaccaaggagtccacccaccccgtgaagcccctggcccagatcgccggaaacagatacgcctccggacctgtgggaaaggccctgagcgacgcatgtatgggcacaatcgcctccttcctgtctaagtaccaggacatcatcatcgaacaccagaaggtggtgaagggcaaccagaagagactggagagcctgcgggagctggccggcaaggaaaacctggaataccctagcgtgaccctgccacctcagcctcacaccaaggagggcgttgatgcctacaacgaagtgatcgcccgggtgcgaatgtgggtgaacctgaacctgtggcagaagctgaagctaagcagagatgatgccaagcctctgctgagactgaagggattcccttcctttcctctggtcgagagacaggccaacgaagtggactggtgggacatggtgtgtaacgtgaagaagctgatcaacgagaaaaaggaggatggcaaggtgttttggcagaatctggctggctacaagagacaggaagccctgagaccatacctgagcagcgaggaagatcggaagaagggaaagaaattcgctcggtaccagctgggcgacctgctgctgcacctggaaaagaagcacggcgaggactggggaaaggtgtacgacgaggcctgggagcggattgacaagaaagtggaaggcctgagcaagcacatcaagctggaagaggaacggagaagcgaggacgcccagagcaaggccgccctgaccgactggctgcgggctaaggccagcttcgtgatcgagggcctgaaggaggccgacaaggacgagttctgcagatgcgagctgaagctgcagaagtggtacggggacctgcggggaaagcccttcgccatcgaagccgagaacagcatcctggacatcagcggcttcagcaagcagtacaactgtgccttcatctggcagaaggacggcgtgaagaagctgaacctgtacctgatcatcaactacttcaagggcggcaagctgcggttcaagaagatcaaacctgaagccttcgaagccaacagattctacaccgtgatcaacaaaaagagcggcgagatcgtgcccatggaggtgaacttcaacttcgacgaccccaacctgatcatcctgcctctggcctttggcaagagacagggcagagaattcatctggaacgacctgctgtccctggaaaccggcagcctgaagctggccaacggaagagtgatcgagaagacactgtacaacagaagaacccggcaggatgagcctgccctgttcgtggccctgaccttcgagcggcgggaggtcctggactcctccaatatcaaaccaatgaacctgatcggcgtggcaagaggcgaaaacatccccgccgtgatcgccctgaccgaccccgagggctgcccactgagccggtttaaggatagcctgggaaacccaacccacatcctgagaatcggcgagagctataaggagaagcagcggaccatccaggccaagaaggaggtggagcagcggagagccggcggctacagccggaagtacgccagcaaagccaagaatctggcagacgatatggtgagaaacaccgctagagatctgctgtactacgccgtgacccaggatgccatgctgatcttcgccaacctgagccggggcttcggccggcagggcaagcggaccttcatggccgagagacagtacacacggatggaggactggctgaccgccaagctggcctacgagggcctgagcaagacctacctgtccaagacactggcccagtacacctccaagacatgcagcaactgtgggtttaccatcaccagcgccgactacgacagggtgctggagaagctgaagaagacagcaacaggctggatgaccacaattaacggcaaggagctgaaggtggagggccagattacctactacaacagatacaagagacagaacgtagtcaaggacctgtccgtcgagctggatagactgagcgaagaatctgtgaacaacgacatctcctcctggacaaagggcagaagcggagaagctctgagcctcctgaagaaaagattctcccatagacccgtgcaggagaagttcgtgtgcctgaactgcggcttcgagacacacgcagccgagcaagccgccctgaacatcgccagatcctggctgttcctgcggagccaggagtacaagaaataccagacaaacaagacaaccggcaacaccgataagagagccttcgtcgagacctggcagtccttttaccggaagaagcttaaggaggtgtggaaacctgccgtgcggtctggcggatctggcggaggctccaccagccccaagaaaaagagaaaagtctaagctgccttctgcggggcttgccttctggccatgcccttcttctctcccttgcacctgtacctcttggtctttgaataaagcctgagtaggaaggctagcaaaaaaaaaaaaaaaaaaaaaaaaaaaaaaaaaaaaaaaaaaaaaaaaaaaaaaaaaaaaaaaaaaaaaaaaaaaaaaaa

SEQ ID NO: 12786 - RNA, 5785 nt, synthetic construct
  source 1..5785: mol_type = other RNA
aggaaataagagagaaaagaagagtaagaagaaatataagagccaccatggcccctaagaagaagcgtaaagtgagccggatggaacgcctcgtctacgaggtgcggcagaagtgcagaaacatcgaggacatctgcatctcctgcggatctctgaacgtgaccctggagcacccactgttcatcggcggcatgtgccagaactgtaaaaactgttttctggagtgtgcctatcaatacgacgatgacggctaccagagctactgcaccatctgttgcggcggaagagaggtgctgatgtgtggaaataacaactgctgccggtgcttctgcgtggaatgcgtggacctgctggtgggccccggcgccgcccaggccgctattaaggaagatccttggaactgctacatgtgcggccacaagggcacatacggcctgctgagacggagagaggactggcctagcagactgcagatgttcttcgccaataaccacgaccaggagttcgacccccctaaggtgtaccctcccgtccccgccgagaagagaaagcccatccgggtcctgagcctgttcgatggcatcgccaccggtctgctggtgctgaaggacctgggcatccaggtggataggtacattgcctccgaggtgtgcgaggactccatcaccgtgggaatggtgcgtcatcagggcaagatcatgtacgtgggcgacgtgcggagcgtgacacagaagcatatccaggagtggggccctttcgacctggtgatcggcggcagcccttgcaatgacctgagcatcgtgaacccagcccggaagggcctgtacgagggaaccggcagactgttcttcgagttttacagactgctgcacgacgcccggcctaaggaaggcgacgaccggcccttcttttggctgttcgagaatgtggtggccatgggagtcagcgacaagcgggatattagccggttcctggagagcaaccccgtgatgatcgatgccaaggaagtgagcgccgcccaccgggccagatacttctggggcaatctgcctggcatgaacagacccctggccagcaccgtgaacgacaagctggagctgcaggagtgcctggagcacggccggatcgccaagttcagcaaggtgagaaccatcaccacccgaagcaacagcatcaaacaaggcaaggaccagcactttcctgtgttcatgaacgagaaggaggacatcctgtggtgtaccgagatggagagagtgttcgggttcccagtccactacacagatgtcagcaacatgtctagactggccagacagagactgctgggaagaagctggtccgtccctgtgatcagacacctgttcgcccctctgaaggagtacttcgcctgcgtgagcagcggcaacagcaacgccaacagccggggccccagcttctctagcggcctggtgccactgtccctgagagggagccacatgggccccatggagatctacaaaaccgtgagcgcctggaagcggcagcctgtgcgcgtgctgagcctgtttcggaatatcgataaagtcctgaaaagcctgggattcctggagagcggctctggctccggcggtggcaccctgaagtacgtggaggatgtgacaaacgtggtcagacgggatgtggagaagtggggccccttcgatctggtgtacggcagcacccaacccctgggcagctcttgtgaccggtgccctggctggtacatgtttcagttccaccggatcctgcagtacgccctgccgagacaggagtcccagcggccattcttttggattttcatggacaacttgctgctgaccgaggatgaccaggaaactaccactcggttcctgcagaccgaagccgtgaccctgcaggacgtgagaggccgggactaccagaacgccatgcgggtgtggtccaacatccctggactgaaaagcaagcacgcacctctgacccctaaagaagaggagtacctgcaggcccaggtgcggagcagaagcaagctggacgcccctaaggtggatctgctggtgaagaattgcctcctgcccctgagagagtacttcaagtatttcagccagaatagtctgcccctgggaggcagcggcggcggctaccagaggcccgtgagcttcaaggacgtggtggtgggcttcacccaggaggagtggcacaggctgaaccccgcccagagggccctgtacagggacgtgatgctggagacctacagcaacctggtgagcgtgggctacgagggcaccaagccctacgtgatcctgaggctggagcaggaggaggccccctggatctgcgaggccgcctgccccggctgccactgcagggagaacatctggcagggcggcccaagcagcggcgcccctcctcccagcggcggcagcccagccggctccccaacctctaccgaggagggcacctctgagtccgccacccccgagagcggccctggcacctccaccgagcccagcgagggcagcgcacccggcagccctgccggcagccccacctccacagaggagggaaccagcaccgagcccagcgaaggcagcgccccaggcaccagcaccgagcctagtgagcaggagattaaacggatcaacaagatcagaagaagacttgtgaaagacagcaacaccaagaaggccggcaagacaggccccatgaaaaccctgctggttagagtgatgacacccgatctgagagagcggctggaaaacctgagaaagaagcctgaaaatatcccccagcccatcagcaatacatctagagccaacctgaataagctgctgaccgattacaccgaaatgaagaaggcgatcctgcatgtgtactgggaagagttccagaaggaccctgtgggcctgatgagccgggtggcccagcctgccagcaagaagatcgatcagaacaagctgaaacctgagatggacgagaagggcaacctgaccaccgccggctttgcctgctctcagtgtggccagcccctgttcgtgtacaagctggagcaggtgtctgagaagggcaaggcttacaccaactacttcggacggtgcaatgtggccgagcacgaaaagctgatcctgctggcccagctgaagcccgagaaggatagcgacgaagccgtgacatatagcctgggaaagtttgggcagagggccctggatttctacagcattcatgtgaccaaggagtccacccaccccgtgaagcccctggcccagatcgccggaaacagatacgcctccggacctgtgggaaaggccctgagcgacgcatgtatgggcacaatcgcctccttcctgtctaagtaccaggacatcatcatcgaacaccagaaggtggtgaagggcaaccagaagagactggagagcctgcgggagctggccggcaaggaaaacctggaataccctagcgtgaccctgccacctcagcctcacaccaaggagggcgttgatgcctacaacgaagtgatcgcccgggtgcgaatgtgggtgaacctgaacctgtggcagaagctgaagctaagcagagatgatgccaagcctctgctgagactgaagggattcccttcctttcctctggtcgagagacaggccaacgaagtggactggtgggacatggtgtgtaacgtgaagaagctgatcaacgagaaaaaggaggatggcaaggtgttttggcagaatctggctggctacaagagacaggaagccctgagaccatacctgagcagcgaggaagatcggaagaagggaaagaaattcgctcggtaccagctgggcgacctgctgctgcacctggaaaagaagcacggcgaggactggggaaaggtgtacgacgaggcctgggagcggattgacaagaaagtggaaggcctgagcaagcacatcaagctggaagaggaacggagaagcgaggacgcccagagcaaggccgccctgaccgactggctgcgggctaaggccagcttcgtgatcgagggcctgaaggaggccgacaaggacgagttctgcagatgcgagctgaagctgcagaagtggtacggggacctgcggggaaagcccttcgccatcgaagccgagaacagcatcctggacatcagcggcttcagcaagcagtacaactgtgccttcatctggcagaaggacggcgtgaagaagctgaacctgtacctgatcatcaactacttcaagggcggcaagctgcggttcaagaagatcaaacctgaagccttcgaagccaacagattctacaccgtgatcaacaaaaagagcggcgagatcgtgcccatggaggtgaacttcaacttcgacgaccccaacctgatcatcctgcctctggcctttggcaagagacagggcagagaattcatctggaacgacctgctgtccctggaaaccggcagcctgaagctggccaacggaagagtgatcgagaagacactgtacaacagaagaacccggcaggatgagcctgccctgttcgtggccctgaccttcgagcggcgggaggtcctggactcctccaatatcaaaccaatgaacctgatcggcgtggcaagaggcgaaaacatccccgccgtgatcgccctgaccgaccccgagggctgcccactgagccggtttaaggatagcctgggaaacccaacccacatcctgagaatcggcgagagctataaggagaagcagcggaccatccaggccaagaaggaggtggagcagcggagagccggcggctacagccggaagtacgccagcaaagccaagaatctggcagacgatatggtgagaaacaccgctagagatctgctgtactacgccgtgacccaggatgccatgctgatcttcgccaacctgagccggggcttcggccggcagggcaagcggaccttcatggccgagagacagtacacacggatggaggactggctgaccgccaagctggcctacgagggcctgagcaagacctacctgtccaagacactggcccagtacacctccaagacatgcagcaactgtgggtttaccatcaccagcgccgactacgacagggtgctggagaagctgaagaagacagcaacaggctggatgaccacaattaacggcaaggagctgaaggtggagggccagattacctactacaacagatacaagagacagaacgtagtcaaggacctgtccgtcgagctggatagactgagcgaagaatctgtgaacaacgacatctcctcctggacaaagggcagaagcggagaagctctgagcctcctgaagaaaagattctcccatagacccgtgcaggagaagttcgtgtgcctgaactgcggcttcgagacacacgcagccgagcaagccgccctgaacatcgccagatcctggctgttcctgcggagccaggagtacaagaaataccagacaaacaagacaaccggcaacaccgataagagagccttcgtcgagacctggcagtccttttaccggaagaagcttaaggaggtgtggaaacctgccgtgcggtctggcggatctggcggaggctccaccagccccaagaaaaagagaaaagtctaagctgccttctgcggggcttgccttctggccatgcccttcttctctcccttgcacctgtacctcttggtctttgaataaagcctgagtaggaaggctagcaaaaaaaaaaaaaaaaaaaaaaaaaaaaaaaaaaaaaaaaaaaaaaaaaaaaaaaaaaaaaaaaaaaaaaaaaaaaaaaa

SEQ ID NO: 12787 - RNA, 5785 nt, synthetic construct
  source 1..5785: mol_type = other RNA
aggaaataagagagaaaagaagagtaagaagaaatataagagccaccatggcccctaagaagaagcgtaaagtgagccggatggaacgcctcgtctacgaggtgcggcagaagtgcagaaacatcgaggacatctgcatctcctgcggatctctgaacgtgaccctggagcacccactgttcatcggcggcatgtgccagaactgtaaaaactgttttctggagtgtgcctatcaatacgacgatgacggctaccagagctactgcaccatctgttgcggcggaagagaggtgctgatgtgtggaaataacaactgctgccggtgcttctgcgtggaatgcgtggacctgctggtgggccccggcgccgcccaggccgctattaaggaagatccttggaactgctacatgtgcggccacaagggcacatacggcctgctgagacggagagaggactggcctagcagactgcagatgttcttcgccaataaccacgaccaggagttcgacccccctaaggtgtaccctcccgtccccgccgagaagagaaagcccatccgggtcctgagcctgttcgatggcatcgccaccggtctgctggtgctgaaggacctgggcatccaggtggataggtacattgcctccgaggtgtgcgaggactccatcaccgtgggaatggtgcgtcatcagggcaagatcatgtacgtgggcgacgtgcggagcgtgacacagaagcatatccaggagtggggccctttcgacctggtgatcggcggcagcccttgcaatgacctgagcatcgtgaacccagcccggaagggcctgtacgagggaaccggcagactgttcttcgagttttacagactgctgcacgacgcccggcctaaggaaggcgacgaccggcccttcttttggctgttcgagaatgtggtggccatgggagtcagcgacaagcgggatattagccggttcctggagagcaaccccgtgatgatcgatgccaaggaagtgagcgccgcccaccgggccagatacttctggggcaatctgcctggcatgaacagacccctggccagcaccgtgaacgacaagctggagctgcaggagtgcctggagcacggccggatcgccaagttcagcaaggtgagaaccatcaccacccgaagcaacagcatcaaacaaggcaaggaccagcactttcctgtgttcatgaacgagaaggaggacatcctgtggtgtaccgagatggagagagtgttcgggttcccagtccactacacagatgtcagcaacatgtctagactggccagacagagactgctgggaagaagctggtccgtccctgtgatcagacacctgttcgcccctctgaaggagtacttcgcctgcgtgagcagcggcaacagcaacgccaacagccggggccccagcttctctagcggcctggtgccactgtccctgagagggagccacatgggccccatggagatctacaaaaccgtgagcgcctggaagcggcagcctgtgcgcgtgctgagcctgtttcggaatatcgataaagtcctgaaaagcctgggattcctggagagcggctctggctccggcggtggcaccctgaagtacgtggaggatgtgacaaacgtggtcagacgggatgtggagaagtggggccccttcgatctggtgtacggcagcacccaacccctgggcagctcttgtgaccggtgccctggctggtacatgtttcagttccaccggatcctgcagtacgccctgccgagacaggagtcccagcggccattcttttggattttcatggacaacttgctgctgaccgaggatgaccaggaaactaccactcggttcctgcagaccgaagccgtgaccctgcaggacgtgagaggccgggactaccagaacgccatgcgggtgtggtccaacatccctggactgaaaagcaagcacgcacctctgacccctaaagaagaggagtacctgcaggcccaggtgcggagcagaagcaagctggacgcccctaaggtggatctgctggtgaagaattgcctcctgcccctgagagagtacttcaagtatttcagccagaatagtctgcccctgggaggcagcggcggcggcatgaccttcgaggacgtggccgtggagttcaccaggtgggagtggggccagctggaccccacccagaaggacgtgtacagggaggtgatgctggagaacttcaagaacctggccagcctgggcttccccatgagcaagccctacgtgatctgcaggctggaggagggcgaggagccctgcatcctggagagggagatcagcaccggcgcccccgccgactgggagaggaggaggcaggccaagggcggcccaagcagcggcgcccctcctcccagcggcggcagcccagccggctccccaacctctaccgaggagggcacctctgagtccgccacccccgagagcggccctggcacctccaccgagcccagcgagggcagcgcacccggcagccctgccggcagccccacctccacagaggagggaaccagcaccgagcccagcgaaggcagcgccccaggcaccagcaccgagcctagtgagcaggagattaaacggatcaacaagatcagaagaagacttgtgaaagacagcaacaccaagaaggccggcaagacaggccccatgaaaaccctgctggttagagtgatgacacccgatctgagagagcggctggaaaacctgagaaagaagcctgaaaatatcccccagcccatcagcaatacatctagagccaacctgaataagctgctgaccgattacaccgaaatgaagaaggcgatcctgcatgtgtactgggaagagttccagaaggaccctgtgggcctgatgagccgggtggcccagcctgccagcaagaagatcgatcagaacaagctgaaacctgagatggacgagaagggcaacctgaccaccgccggctttgcctgctctcagtgtggccagcccctgttcgtgtacaagctggagcaggtgtctgagaagggcaaggcttacaccaactacttcggacggtgcaatgtggccgagcacgaaaagctgatcctgctggcccagctgaagcccgagaaggatagcgacgaagccgtgacatatagcctgggaaagtttgggcagagggccctggatttctacagcattcatgtgaccaaggagtccacccaccccgtgaagcccctggcccagatcgccggaaacagatacgcctccggacctgtgggaaaggccctgagcgacgcatgtatgggcacaatcgcctccttcctgtctaagtaccaggacatcatcatcgaacaccagaaggtggtgaagggcaaccagaagagactggagagcctgcgggagctggccggcaaggaaaacctggaataccctagcgtgaccctgccacctcagcctcacaccaaggagggcgttgatgcctacaacgaagtgatcgcccgggtgcgaatgtgggtgaacctgaacctgtggcagaagctgaagctaagcagagatgatgccaagcctctgctgagactgaagggattcccttcctttcctctggtcgagagacaggccaacgaagtggactggtgggacatggtgtgtaacgtgaagaagctgatcaacgagaaaaaggaggatggcaaggtgttttggcagaatctggctggctacaagagacaggaagccctgagaccatacctgagcagcgaggaagatcggaagaagggaaagaaattcgctcggtaccagctgggcgacctgctgctgcacctggaaaagaagcacggcgaggactggggaaaggtgtacgacgaggcctgggagcggattgacaagaaagtggaaggcctgagcaagcacatcaagctggaagaggaacggagaagcgaggacgcccagagcaaggccgccctgaccgactggctgcgggctaaggccagcttcgtgatcgagggcctgaaggaggccgacaaggacgagttctgcagatgcgagctgaagctgcagaagtggtacggggacctgcggggaaagcccttcgccatcgaagccgagaacagcatcctggacatcagcggcttcagcaagcagtacaactgtgccttcatctggcagaaggacggcgtgaagaagctgaacctgtacctgatcatcaactacttcaagggcggcaagctgcggttcaagaagatcaaacctgaagccttcgaagccaacagattctacaccgtgatcaacaaaaagagcggcgagatcgtgcccatggaggtgaacttcaacttcgacgaccccaacctgatcatcctgcctctggcctttggcaagagacagggcagagaattcatctggaacgacctgctgtccctggaaaccggcagcctgaagctggccaacggaagagtgatcgagaagacactgtacaacagaagaacccggcaggatgagcctgccctgttcgtggccctgaccttcgagcggcgggaggtcctggactcctccaatatcaaaccaatgaacctgatcggcgtggcaagaggcgaaaacatccccgccgtgatcgccctgaccgaccccgagggctgcccactgagccggtttaaggatagcctgggaaacccaacccacatcctgagaatcggcgagagctataaggagaagcagcggaccatccaggccaagaaggaggtggagcagcggagagccggcggctacagccggaagtacgccagcaaagccaagaatctggcagacgatatggtgagaaacaccgctagagatctgctgtactacgccgtgacccaggatgccatgctgatcttcgccaacctgagccggggcttcggccggcagggcaagcggaccttcatggccgagagacagtacacacggatggaggactggctgaccgccaagctggcctacgagggcctgagcaagacctacctgtccaagacactggcccagtacacctccaagacatgcagcaactgtgggtttaccatcaccagcgccgactacgacagggtgctggagaagctgaagaagacagcaacaggctggatgaccacaattaacggcaaggagctgaaggtggagggccagattacctactacaacagatacaagagacagaacgtagtcaaggacctgtccgtcgagctggatagactgagcgaagaatctgtgaacaacgacatctcctcctggacaaagggcagaagcggagaagctctgagcctcctgaagaaaagattctcccatagacccgtgcaggagaagttcgtgtgcctgaactgcggcttcgagacacacgcagccgagcaagccgccctgaacatcgccagatcctggctgttcctgcggagccaggagtacaagaaataccagacaaacaagacaaccggcaacaccgataagagagccttcgtcgagacctggcagtccttttaccggaagaagcttaaggaggtgtggaaacctgccgtgcggtctggcggatctggcggaggctccaccagccccaagaaaaagagaaaagtctaagctgccttctgcggggcttgccttctggccatgcccttcttctctcccttgcacctgtacctcttggtctttgaataaagcctgagtaggaaggctagcaaaaaaaaaaaaaaaaaaaaaaaaaaaaaaaaaaaaaaaaaaaaaaaaaaaaaaaaaaaaaaaaaaaaaaaaaaaaaaaa

SEQ ID NO: 12788 - RNA, 5785 nt, synthetic construct
  source 1..5785: mol_type = other RNA
aggaaataagagagaaaagaagagtaagaagaaatataagagccaccatggcccctaagaagaagcgtaaagtgagccggatggaacgcctcgtctacgaggtgcggcagaagtgcagaaacatcgaggacatctgcatctcctgcggatctctgaacgtgaccctggagcacccactgttcatcggcggcatgtgccagaactgtaaaaactgttttctggagtgtgcctatcaatacgacgatgacggctaccagagctactgcaccatctgttgcggcggaagagaggtgctgatgtgtggaaataacaactgctgccggtgcttctgcgtggaatgcgtggacctgctggtgggccccggcgccgcccaggccgctattaaggaagatccttggaactgctacatgtgcggccacaagggcacatacggcctgctgagacggagagaggactggcctagcagactgcagatgttcttcgccaataaccacgaccaggagttcgacccccctaaggtgtaccctcccgtccccgccgagaagagaaagcccatccgggtcctgagcctgttcgatggcatcgccaccggtctgctggtgctgaaggacctgggcatccaggtggataggtacattgcctccgaggtgtgcgaggactccatcaccgtgggaatggtgcgtcatcagggcaagatcatgtacgtgggcgacgtgcggagcgtgacacagaagcatatccaggagtggggccctttcgacctggtgatcggcggcagcccttgcaatgacctgagcatcgtgaacccagcccggaagggcctgtacgagggaaccggcagactgttcttcgagttttacagactgctgcacgacgcccggcctaaggaaggcgacgaccggcccttcttttggctgttcgagaatgtggtggccatgggagtcagcgacaagcgggatattagccggttcctggagagcaaccccgtgatgatcgatgccaaggaagtgagcgccgcccaccgggccagatacttctggggcaatctgcctggcatgaacagacccctggccagcaccgtgaacgacaagctggagctgcaggagtgcctggagcacggccggatcgccaagttcagcaaggtgagaaccatcaccacccgaagcaacagcatcaaacaaggcaaggaccagcactttcctgtgttcatgaacgagaaggaggacatcctgtggtgtaccgagatggagagagtgttcgggttcccagtccactacacagatgtcagcaacatgtctagactggccagacagagactgctgggaagaagctggtccgtccctgtgatcagacacctgttcgcccctctgaaggagtacttcgcctgcgtgagcagcggcaacagcaacgccaacagccggggccccagcttctctagcggcctggtgccactgtccctgagagggagccacatgggccccatggagatctacaaaaccgtgagcgcctggaagcggcagcctgtgcgcgtgctgagcctgtttcggaatatcgataaagtcctgaaaagcctgggattcctggagagcggctctggctccggcggtggcaccctgaagtacgtggaggatgtgacaaacgtggtcagacgggatgtggagaagtggggccccttcgatctggtgtacggcagcacccaacccctgggcagctcttgtgaccggtgccctggctggtacatgtttcagttccaccggatcctgcagtacgccctgccgagacaggagtcccagcggccattcttttggattttcatggacaacttgctgctgaccgaggatgaccaggaaactaccactcggttcctgcagaccgaagccgtgaccctgcaggacgtgagaggccgggactaccagaacgccatgcgggtgtggtccaacatccctggactgaaaagcaagcacgcacctctgacccctaaagaagaggagtacctgcaggcccaggtgcggagcagaagcaagctggacgcccctaaggtggatctgctggtgaagaattgcctcctgcccctgagagagtacttcaagtatttcagccagaatagtctgcccctgggaggcagcggcggcggcagctacgagggcagcgtgagcttcagggacgtggccatcgacttcagcagggaggagtggaggcacctggacctgagccagaggaacctgtacagggacgtgatgctggagacctacagccacctgctgagcgtgggctaccaggtgcccgaggccgaggtggtgatgctggagcagggcaaggagccctgggccctgcagggcgagaggcccaggcacagctgccccggcgagaagctgtggggcggcccaagcagcggcgcccctcctcccagcggcggcagcccagccggctccccaacctctaccgaggagggcacctctgagtccgccacccccgagagcggccctggcacctccaccgagcccagcgagggcagcgcacccggcagccctgccggcagccccacctccacagaggagggaaccagcaccgagcccagcgaaggcagcgccccaggcaccagcaccgagcctagtgagcaggagattaaacggatcaacaagatcagaagaagacttgtgaaagacagcaacaccaagaaggccggcaagacaggccccatgaaaaccctgctggttagagtgatgacacccgatctgagagagcggctggaaaacctgagaaagaagcctgaaaatatcccccagcccatcagcaatacatctagagccaacctgaataagctgctgaccgattacaccgaaatgaagaaggcgatcctgcatgtgtactgggaagagttccagaaggaccctgtgggcctgatgagccgggtggcccagcctgccagcaagaagatcgatcagaacaagctgaaacctgagatggacgagaagggcaacctgaccaccgccggctttgcctgctctcagtgtggccagcccctgttcgtgtacaagctggagcaggtgtctgagaagggcaaggcttacaccaactacttcggacggtgcaatgtggccgagcacgaaaagctgatcctgctggcccagctgaagcccgagaaggatagcgacgaagccgtgacatatagcctgggaaagtttgggcagagggccctggatttctacagcattcatgtgaccaaggagtccacccaccccgtgaagcccctggcccagatcgccggaaacagatacgcctccggacctgtgggaaaggccctgagcgacgcatgtatgggcacaatcgcctccttcctgtctaagtaccaggacatcatcatcgaacaccagaaggtggtgaagggcaaccagaagagactggagagcctgcgggagctggccggcaaggaaaacctggaataccctagcgtgaccctgccacctcagcctcacaccaaggagggcgttgatgcctacaacgaagtgatcgcccgggtgcgaatgtgggtgaacctgaacctgtggcagaagctgaagctaagcagagatgatgccaagcctctgctgagactgaagggattcccttcctttcctctggtcgagagacaggccaacgaagtggactggtgggacatggtgtgtaacgtgaagaagctgatcaacgagaaaaaggaggatggcaaggtgttttggcagaatctggctggctacaagagacaggaagccctgagaccatacctgagcagcgaggaagatcggaagaagggaaagaaattcgctcggtaccagctgggcgacctgctgctgcacctggaaaagaagcacggcgaggactggggaaaggtgtacgacgaggcctgggagcggattgacaagaaagtggaaggcctgagcaagcacatcaagctggaagaggaacggagaagcgaggacgcccagagcaaggccgccctgaccgactggctgcgggctaaggccagcttcgtgatcgagggcctgaaggaggccgacaaggacgagttctgcagatgcgagctgaagctgcagaagtggtacggggacctgcggggaaagcccttcgccatcgaagccgagaacagcatcctggacatcagcggcttcagcaagcagtacaactgtgccttcatctggcagaaggacggcgtgaagaagctgaacctgtacctgatcatcaactacttcaagggcggcaagctgcggttcaagaagatcaaacctgaagccttcgaagccaacagattctacaccgtgatcaacaaaaagagcggcgagatcgtgcccatggaggtgaacttcaacttcgacgaccccaacctgatcatcctgcctctggcctttggcaagagacagggcagagaattcatctggaacgacctgctgtccctggaaaccggcagcctgaagctggccaacggaagagtgatcgagaagacactgtacaacagaagaacccggcaggatgagcctgccctgttcgtggccctgaccttcgagcggcgggaggtcctggactcctccaatatcaaaccaatgaacctgatcggcgtggcaagaggcgaaaacatccccgccgtgatcgccctgaccgaccccgagggctgcccactgagccggtttaaggatagcctgggaaacccaacccacatcctgagaatcggcgagagctataaggagaagcagcggaccatccaggccaagaaggaggtggagcagcggagagccggcggctacagccggaagtacgccagcaaagccaagaatctggcagacgatatggtgagaaacaccgctagagatctgctgtactacgccgtgacccaggatgccatgctgatcttcgccaacctgagccggggcttcggccggcagggcaagcggaccttcatggccgagagacagtacacacggatggaggactggctgaccgccaagctggcctacgagggcctgagcaagacctacctgtccaagacactggcccagtacacctccaagacatgcagcaactgtgggtttaccatcaccagcgccgactacgacagggtgctggagaagctgaagaagacagcaacaggctggatgaccacaattaacggcaaggagctgaaggtggagggccagattacctactacaacagatacaagagacagaacgtagtcaaggacctgtccgtcgagctggatagactgagcgaagaatctgtgaacaacgacatctcctcctggacaaagggcagaagcggagaagctctgagcctcctgaagaaaagattctcccatagacccgtgcaggagaagttcgtgtgcctgaactgcggcttcgagacacacgcagccgagcaagccgccctgaacatcgccagatcctggctgttcctgcggagccaggagtacaagaaataccagacaaacaagacaaccggcaacaccgataagagagccttcgtcgagacctggcagtccttttaccggaagaagcttaaggaggtgtggaaacctgccgtgcggtctggcggatctggcggaggctccaccagccccaagaaaaagagaaaagtctaagctgccttctgcggggcttgccttctggccatgcccttcttctctcccttgcacctgtacctcttggtctttgaataaagcctgagtaggaaggctagcaaaaaaaaaaaaaaaaaaaaaaaaaaaaaaaaaaaaaaaaaaaaaaaaaaaaaaaaaaaaaaaaaaaaaaaaaaaaaaaa

SEQ ID NO: 12789 - RNA, 5785 nt, synthetic construct
  source 1..5785: mol_type = other RNA
aggaaataagagagaaaagaagagtaagaagaaatataagagccaccatggcccctaagaagaagcgtaaagtgagccggatggaacgcctcgtctacgaggtgcggcagaagtgcagaaacatcgaggacatctgcatctcctgcggatctctgaacgtgaccctggagcacccactgttcatcggcggcatgtgccagaactgtaaaaactgttttctggagtgtgcctatcaatacgacgatgacggctaccagagctactgcaccatctgttgcggcggaagagaggtgctgatgtgtggaaataacaactgctgccggtgcttctgcgtggaatgcgtggacctgctggtgggccccggcgccgcccaggccgctattaaggaagatccttggaactgctacatgtgcggccacaagggcacatacggcctgctgagacggagagaggactggcctagcagactgcagatgttcttcgccaataaccacgaccaggagttcgacccccctaaggtgtaccctcccgtccccgccgagaagagaaagcccatccgggtcctgagcctgttcgatggcatcgccaccggtctgctggtgctgaaggacctgggcatccaggtggataggtacattgcctccgaggtgtgcgaggactccatcaccgtgggaatggtgcgtcatcagggcaagatcatgtacgtgggcgacgtgcggagcgtgacacagaagcatatccaggagtggggccctttcgacctggtgatcggcggcagcccttgcaatgacctgagcatcgtgaacccagcccggaagggcctgtacgagggaaccggcagactgttcttcgagttttacagactgctgcacgacgcccggcctaaggaaggcgacgaccggcccttcttttggctgttcgagaatgtggtggccatgggagtcagcgacaagcgggatattagccggttcctggagagcaaccccgtgatgatcgatgccaaggaagtgagcgccgcccaccgggccagatacttctggggcaatctgcctggcatgaacagacccctggccagcaccgtgaacgacaagctggagctgcaggagtgcctggagcacggccggatcgccaagttcagcaaggtgagaaccatcaccacccgaagcaacagcatcaaacaaggcaaggaccagcactttcctgtgttcatgaacgagaaggaggacatcctgtggtgtaccgagatggagagagtgttcgggttcccagtccactacacagatgtcagcaacatgtctagactggccagacagagactgctgggaagaagctggtccgtccctgtgatcagacacctgttcgcccctctgaaggagtacttcgcctgcgtgagcagcggcaacagcaacgccaacagccggggccccagcttctctagcggcctggtgccactgtccctgagagggagccacatgggccccatggagatctacaaaaccgtgagcgcctggaagcggcagcctgtgcgcgtgctgagcctgtttcggaatatcgataaagtcctgaaaagcctgggattcctggagagcggctctggctccggcggtggcaccctgaagtacgtggaggatgtgacaaacgtggtcagacgggatgtggagaagtggggccccttcgatctggtgtacggcagcacccaacccctgggcagctcttgtgaccggtgccctggctggtacatgtttcagttccaccggatcctgcagtacgccctgccgagacaggagtcccagcggccattcttttggattttcatggacaacttgctgctgaccgaggatgaccaggaaactaccactcggttcctgcagaccgaagccgtgaccctgcaggacgtgagaggccgggactaccagaacgccatgcgggtgtggtccaacatccctggactgaaaagcaagcacgcacctctgacccctaaagaagaggagtacctgcaggcccaggtgcggagcagaagcaagctggacgcccctaaggtggatctgctggtgaagaattgcctcctgcccctgagagagtacttcaagtatttcagccagaatagtctgcccctgggaggcagcggcggcggcttccagaccctgctggccttcgaggacgtggccgtgttcttcagcgaggaggagtgggagctgctggacgagctgcagaaggaggtgtacaagaacaccatgagggagaactacgagaccctgctgagcctgggcctgaccaacatgaagcccgagatcatcgccaagatcgacgccggcgaggcccccagcgtgcagaacgccagctacctggagaagaggggcaagaagagcgccgccggcggcggcccaagcagcggcgcccctcctcccagcggcggcagcccagccggctccccaacctctaccgaggagggcacctctgagtccgccacccccgagagcggccctggcacctccaccgagcccagcgagggcagcgcacccggcagccctgccggcagccccacctccacagaggagggaaccagcaccgagcccagcgaaggcagcgccccaggcaccagcaccgagcctagtgagcaggagattaaacggatcaacaagatcagaagaagacttgtgaaagacagcaacaccaagaaggccggcaagacaggccccatgaaaaccctgctggttagagtgatgacacccgatctgagagagcggctggaaaacctgagaaagaagcctgaaaatatcccccagcccatcagcaatacatctagagccaacctgaataagctgctgaccgattacaccgaaatgaagaaggcgatcctgcatgtgtactgggaagagttccagaaggaccctgtgggcctgatgagccgggtggcccagcctgccagcaagaagatcgatcagaacaagctgaaacctgagatggacgagaagggcaacctgaccaccgccggctttgcctgctctcagtgtggccagcccctgttcgtgtacaagctggagcaggtgtctgagaagggcaaggcttacaccaactacttcggacggtgcaatgtggccgagcacgaaaagctgatcctgctggcccagctgaagcccgagaaggatagcgacgaagccgtgacatatagcctgggaaagtttgggcagagggccctggatttctacagcattcatgtgaccaaggagtccacccaccccgtgaagcccctggcccagatcgccggaaacagatacgcctccggacctgtgggaaaggccctgagcgacgcatgtatgggcacaatcgcctccttcctgtctaagtaccaggacatcatcatcgaacaccagaaggtggtgaagggcaaccagaagagactggagagcctgcgggagctggccggcaaggaaaacctggaataccctagcgtgaccctgccacctcagcctcacaccaaggagggcgttgatgcctacaacgaagtgatcgcccgggtgcgaatgtgggtgaacctgaacctgtggcagaagctgaagctaagcagagatgatgccaagcctctgctgagactgaagggattcccttcctttcctctggtcgagagacaggccaacgaagtggactggtgggacatggtgtgtaacgtgaagaagctgatcaacgagaaaaaggaggatggcaaggtgttttggcagaatctggctggctacaagagacaggaagccctgagaccatacctgagcagcgaggaagatcggaagaagggaaagaaattcgctcggtaccagctgggcgacctgctgctgcacctggaaaagaagcacggcgaggactggggaaaggtgtacgacgaggcctgggagcggattgacaagaaagtggaaggcctgagcaagcacatcaagctggaagaggaacggagaagcgaggacgcccagagcaaggccgccctgaccgactggctgcgggctaaggccagcttcgtgatcgagggcctgaaggaggccgacaaggacgagttctgcagatgcgagctgaagctgcagaagtggtacggggacctgcggggaaagcccttcgccatcgaagccgagaacagcatcctggacatcagcggcttcagcaagcagtacaactgtgccttcatctggcagaaggacggcgtgaagaagctgaacctgtacctgatcatcaactacttcaagggcggcaagctgcggttcaagaagatcaaacctgaagccttcgaagccaacagattctacaccgtgatcaacaaaaagagcggcgagatcgtgcccatggaggtgaacttcaacttcgacgaccccaacctgatcatcctgcctctggcctttggcaagagacagggcagagaattcatctggaacgacctgctgtccctggaaaccggcagcctgaagctggccaacggaagagtgatcgagaagacactgtacaacagaagaacccggcaggatgagcctgccctgttcgtggccctgaccttcgagcggcgggaggtcctggactcctccaatatcaaaccaatgaacctgatcggcgtggcaagaggcgaaaacatccccgccgtgatcgccctgaccgaccccgagggctgcccactgagccggtttaaggatagcctgggaaacccaacccacatcctgagaatcggcgagagctataaggagaagcagcggaccatccaggccaagaaggaggtggagcagcggagagccggcggctacagccggaagtacgccagcaaagccaagaatctggcagacgatatggtgagaaacaccgctagagatctgctgtactacgccgtgacccaggatgccatgctgatcttcgccaacctgagccggggcttcggccggcagggcaagcggaccttcatggccgagagacagtacacacggatggaggactggctgaccgccaagctggcctacgagggcctgagcaagacctacctgtccaagacactggcccagtacacctccaagacatgcagcaactgtgggtttaccatcaccagcgccgactacgacagggtgctggagaagctgaagaagacagcaacaggctggatgaccacaattaacggcaaggagctgaaggtggagggccagattacctactacaacagatacaagagacagaacgtagtcaaggacctgtccgtcgagctggatagactgagcgaagaatctgtgaacaacgacatctcctcctggacaaagggcagaagcggagaagctctgagcctcctgaagaaaagattctcccatagacccgtgcaggagaagttcgtgtgcctgaactgcggcttcgagacacacgcagccgagcaagccgccctgaacatcgccagatcctggctgttcctgcggagccaggagtacaagaaataccagacaaacaagacaaccggcaacaccgataagagagccttcgtcgagacctggcagtccttttaccggaagaagcttaaggaggtgtggaaacctgccgtgcggtctggcggatctggcggaggctccaccagccccaagaaaaagagaaaagtctaagctgccttctgcggggcttgccttctggccatgcccttcttctctcccttgcacctgtacctcttggtctttgaataaagcctgagtaggaaggctagcaaaaaaaaaaaaaaaaaaaaaaaaaaaaaaaaaaaaaaaaaaaaaaaaaaaaaaaaaaaaaaaaaaaaaaaaaaaaaaaa

SEQ ID NO: 12790 - RNA, 5785 nt, synthetic construct
  source 1..5785: mol_type = other RNA
aggaaataagagagaaaagaagagtaagaagaaatataagagccaccatggcccctaagaagaagcgtaaagtgagccggatggaacgcctcgtctacgaggtgcggcagaagtgcagaaacatcgaggacatctgcatctcctgcggatctctgaacgtgaccctggagcacccactgttcatcggcggcatgtgccagaactgtaaaaactgttttctggagtgtgcctatcaatacgacgatgacggctaccagagctactgcaccatctgttgcggcggaagagaggtgctgatgtgtggaaataacaactgctgccggtgcttctgcgtggaatgcgtggacctgctggtgggccccggcgccgcccaggccgctattaaggaagatccttggaactgctacatgtgcggccacaagggcacatacggcctgctgagacggagagaggactggcctagcagactgcagatgttcttcgccaataaccacgaccaggagttcgacccccctaaggtgtaccctcccgtccccgccgagaagagaaagcccatccgggtcctgagcctgttcgatggcatcgccaccggtctgctggtgctgaaggacctgggcatccaggtggataggtacattgcctccgaggtgtgcgaggactccatcaccgtgggaatggtgcgtcatcagggcaagatcatgtacgtgggcgacgtgcggagcgtgacacagaagcatatccaggagtggggccctttcgacctggtgatcggcggcagcccttgcaatgacctgagcatcgtgaacccagcccggaagggcctgtacgagggaaccggcagactgttcttcgagttttacagactgctgcacgacgcccggcctaaggaaggcgacgaccggcccttcttttggctgttcgagaatgtggtggccatgggagtcagcgacaagcgggatattagccggttcctggagagcaaccccgtgatgatcgatgccaaggaagtgagcgccgcccaccgggccagatacttctggggcaatctgcctggcatgaacagacccctggccagcaccgtgaacgacaagctggagctgcaggagtgcctggagcacggccggatcgccaagttcagcaaggtgagaaccatcaccacccgaagcaacagcatcaaacaaggcaaggaccagcactttcctgtgttcatgaacgagaaggaggacatcctgtggtgtaccgagatggagagagtgttcgggttcccagtccactacacagatgtcagcaacatgtctagactggccagacagagactgctgggaagaagctggtccgtccctgtgatcagacacctgttcgcccctctgaaggagtacttcgcctgcgtgagcagcggcaacagcaacgccaacagccggggccccagcttctctagcggcctggtgccactgtccctgagagggagccacatgggccccatggagatctacaaaaccgtgagcgcctggaagcggcagcctgtgcgcgtgctgagcctgtttcggaatatcgataaagtcctgaaaagcctgggattcctggagagcggctctggctccggcggtggcaccctgaagtacgtggaggatgtgacaaacgtggtcagacgggatgtggagaagtggggccccttcgatctggtgtacggcagcacccaacccctgggcagctcttgtgaccggtgccctggctggtacatgtttcagttccaccggatcctgcagtacgccctgccgagacaggagtcccagcggccattcttttggattttcatggacaacttgctgctgaccgaggatgaccaggaaactaccactcggttcctgcagaccgaagccgtgaccctgcaggacgtgagaggccgggactaccagaacgccatgcgggtgtggtccaacatccctggactgaaaagcaagcacgcacctctgacccctaaagaagaggagtacctgcaggcccaggtgcggagcagaagcaagctggacgcccctaaggtggatctgctggtgaagaattgcctcctgcccctgagagagtacttcaagtatttcagccagaatagtctgcccctgggaggcagcggcggcggccaccaggagagcctgaccttcaaggacgtggccgtgaacttcacccaggaggagtggcaccacgtggacgccgcccagaggaggctgtacaaggacgtgatgctggagaactacagccacctggtgagcctgggctaccaggtgagcaagcccgaggtgatcttcaagctggagcagggcgaggagccctggatcgccgagggcgagatccagaggcccgtgtgccccgactggaagaccaggggcggcccaagcagcggcgcccctcctcccagcggcggcagcccagccggctccccaacctctaccgaggagggcacctctgagtccgccacccccgagagcggccctggcacctccaccgagcccagcgagggcagcgcacccggcagccctgccggcagccccacctccacagaggagggaaccagcaccgagcccagcgaaggcagcgccccaggcaccagcaccgagcctagtgagcaggagattaaacggatcaacaagatcagaagaagacttgtgaaagacagcaacaccaagaaggccggcaagacaggccccatgaaaaccctgctggttagagtgatgacacccgatctgagagagcggctggaaaacctgagaaagaagcctgaaaatatcccccagcccatcagcaatacatctagagccaacctgaataagctgctgaccgattacaccgaaatgaagaaggcgatcctgcatgtgtactgggaagagttccagaaggaccctgtgggcctgatgagccgggtggcccagcctgccagcaagaagatcgatcagaacaagctgaaacctgagatggacgagaagggcaacctgaccaccgccggctttgcctgctctcagtgtggccagcccctgttcgtgtacaagctggagcaggtgtctgagaagggcaaggcttacaccaactacttcggacggtgcaatgtggccgagcacgaaaagctgatcctgctggcccagctgaagcccgagaaggatagcgacgaagccgtgacatatagcctgggaaagtttgggcagagggccctggatttctacagcattcatgtgaccaaggagtccacccaccccgtgaagcccctggcccagatcgccggaaacagatacgcctccggacctgtgggaaaggccctgagcgacgcatgtatgggcacaatcgcctccttcctgtctaagtaccaggacatcatcatcgaacaccagaaggtggtgaagggcaaccagaagagactggagagcctgcgggagctggccggcaaggaaaacctggaataccctagcgtgaccctgccacctcagcctcacaccaaggagggcgttgatgcctacaacgaagtgatcgcccgggtgcgaatgtgggtgaacctgaacctgtggcagaagctgaagctaagcagagatgatgccaagcctctgctgagactgaagggattcccttcctttcctctggtcgagagacaggccaacgaagtggactggtgggacatggtgtgtaacgtgaagaagctgatcaacgagaaaaaggaggatggcaaggtgttttggcagaatctggctggctacaagagacaggaagccctgagaccatacctgagcagcgaggaagatcggaagaagggaaagaaattcgctcggtaccagctgggcgacctgctgctgcacctggaaaagaagcacggcgaggactggggaaaggtgtacgacgaggcctgggagcggattgacaagaaagtggaaggcctgagcaagcacatcaagctggaagaggaacggagaagcgaggacgcccagagcaaggccgccctgaccgactggctgcgggctaaggccagcttcgtgatcgagggcctgaaggaggccgacaaggacgagttctgcagatgcgagctgaagctgcagaagtggtacggggacctgcggggaaagcccttcgccatcgaagccgagaacagcatcctggacatcagcggcttcagcaagcagtacaactgtgccttcatctggcagaaggacggcgtgaagaagctgaacctgtacctgatcatcaactacttcaagggcggcaagctgcggttcaagaagatcaaacctgaagccttcgaagccaacagattctacaccgtgatcaacaaaaagagcggcgagatcgtgcccatggaggtgaacttcaacttcgacgaccccaacctgatcatcctgcctctggcctttggcaagagacagggcagagaattcatctggaacgacctgctgtccctggaaaccggcagcctgaagctggccaacggaagagtgatcgagaagacactgtacaacagaagaacccggcaggatgagcctgccctgttcgtggccctgaccttcgagcggcgggaggtcctggactcctccaatatcaaaccaatgaacctgatcggcgtggcaagaggcgaaaacatccccgccgtgatcgccctgaccgaccccgagggctgcccactgagccggtttaaggatagcctgggaaacccaacccacatcctgagaatcggcgagagctataaggagaagcagcggaccatccaggccaagaaggaggtggagcagcggagagccggcggctacagccggaagtacgccagcaaagccaagaatctggcagacgatatggtgagaaacaccgctagagatctgctgtactacgccgtgacccaggatgccatgctgatcttcgccaacctgagccggggcttcggccggcagggcaagcggaccttcatggccgagagacagtacacacggatggaggactggctgaccgccaagctggcctacgagggcctgagcaagacctacctgtccaagacactggcccagtacacctccaagacatgcagcaactgtgggtttaccatcaccagcgccgactacgacagggtgctggagaagctgaagaagacagcaacaggctggatgaccacaattaacggcaaggagctgaaggtggagggccagattacctactacaacagatacaagagacagaacgtagtcaaggacctgtccgtcgagctggatagactgagcgaagaatctgtgaacaacgacatctcctcctggacaaagggcagaagcggagaagctctgagcctcctgaagaaaagattctcccatagacccgtgcaggagaagttcgtgtgcctgaactgcggcttcgagacacacgcagccgagcaagccgccctgaacatcgccagatcctggctgttcctgcggagccaggagtacaagaaataccagacaaacaagacaaccggcaacaccgataagagagccttcgtcgagacctggcagtccttttaccggaagaagcttaaggaggtgtggaaacctgccgtgcggtctggcggatctggcggaggctccaccagccccaagaaaaagagaaaagtctaagctgccttctgcggggcttgccttctggccatgcccttcttctctcccttgcacctgtacctcttggtctttgaataaagcctgagtaggaaggctagcaaaaaaaaaaaaaaaaaaaaaaaaaaaaaaaaaaaaaaaaaaaaaaaaaaaaaaaaaaaaaaaaaaaaaaaaaaaaaaaa

SEQ ID NO: 12791 - RNA, 5785 nt, synthetic construct
  source 1..5785: mol_type = other RNA
aggaaataagagagaaaagaagagtaagaagaaatataagagccaccatggcccctaagaagaagcgtaaagtgagccggatggaacgcctcgtctacgaggtgcggcagaagtgcagaaacatcgaggacatctgcatctcctgcggatctctgaacgtgaccctggagcacccactgttcatcggcggcatgtgccagaactgtaaaaactgttttctggagtgtgcctatcaatacgacgatgacggctaccagagctactgcaccatctgttgcggcggaagagaggtgctgatgtgtggaaataacaactgctgccggtgcttctgcgtggaatgcgtggacctgctggtgggccccggcgccgcccaggccgctattaaggaagatccttggaactgctacatgtgcggccacaagggcacatacggcctgctgagacggagagaggactggcctagcagactgcagatgttcttcgccaataaccacgaccaggagttcgacccccctaaggtgtaccctcccgtccccgccgagaagagaaagcccatccgggtcctgagcctgttcgatggcatcgccaccggtctgctggtgctgaaggacctgggcatccaggtggataggtacattgcctccgaggtgtgcgaggactccatcaccgtgggaatggtgcgtcatcagggcaagatcatgtacgtgggcgacgtgcggagcgtgacacagaagcatatccaggagtggggccctttcgacctggtgatcggcggcagcccttgcaatgacctgagcatcgtgaacccagcccggaagggcctgtacgagggaaccggcagactgttcttcgagttttacagactgctgcacgacgcccggcctaaggaaggcgacgaccggcccttcttttggctgttcgagaatgtggtggccatgggagtcagcgacaagcgggatattagccggttcctggagagcaaccccgtgatgatcgatgccaaggaagtgagcgccgcccaccgggccagatacttctggggcaatctgcctggcatgaacagacccctggccagcaccgtgaacgacaagctggagctgcaggagtgcctggagcacggccggatcgccaagttcagcaaggtgagaaccatcaccacccgaagcaacagcatcaaacaaggcaaggaccagcactttcctgtgttcatgaacgagaaggaggacatcctgtggtgtaccgagatggagagagtgttcgggttcccagtccactacacagatgtcagcaacatgtctagactggccagacagagactgctgggaagaagctggtccgtccctgtgatcagacacctgttcgcccctctgaaggagtacttcgcctgcgtgagcagcggcaacagcaacgccaacagccggggccccagcttctctagcggcctggtgccactgtccctgagagggagccacatgggccccatggagatctacaaaaccgtgagcgcctggaagcggcagcctgtgcgcgtgctgagcctgtttcggaatatcgataaagtcctgaaaagcctgggattcctggagagcggctctggctccggcggtggcaccctgaagtacgtggaggatgtgacaaacgtggtcagacgggatgtggagaagtggggccccttcgatctggtgtacggcagcacccaacccctgggcagctcttgtgaccggtgccctggctggtacatgtttcagttccaccggatcctgcagtacgccctgccgagacaggagtcccagcggccattcttttggattttcatggacaacttgctgctgaccgaggatgaccaggaaactaccactcggttcctgcagaccgaagccgtgaccctgcaggacgtgagaggccgggactaccagaacgccatgcgggtgtggtccaacatccctggactgaaaagcaagcacgcacctctgacccctaaagaagaggagtacctgcaggcccaggtgcggagcagaagcaagctggacgcccctaaggtggatctgctggtgaagaattgcctcctgcccctgagagagtacttcaagtatttcagccagaatagtctgcccctgggaggcagcggcggcggcaagcccggcgccgtgagcttcgccgacgtggccgtgtacttcagcagggaggagtggggctgcctgaggcccgcccagagggccctgtacagggacgtgatgagggagacctacggccacctgggcgccctgggcgtgggcggcagcaagcccgccctgatcagctgggtggaggagaaggccgagctgtgggaccccgccgcccaggaccccgaggtggccaagtgccccaccgaggccgacggcggcccaagcagcggcgcccctcctcccagcggcggcagcccagccggctccccaacctctaccgaggagggcacctctgagtccgccacccccgagagcggccctggcacctccaccgagcccagcgagggcagcgcacccggcagccctgccggcagccccacctccacagaggagggaaccagcaccgagcccagcgaaggcagcgccccaggcaccagcaccgagcctagtgagcaggagattaaacggatcaacaagatcagaagaagacttgtgaaagacagcaacaccaagaaggccggcaagacaggccccatgaaaaccctgctggttagagtgatgacacccgatctgagagagcggctggaaaacctgagaaagaagcctgaaaatatcccccagcccatcagcaatacatctagagccaacctgaataagctgctgaccgattacaccgaaatgaagaaggcgatcctgcatgtgtactgggaagagttccagaaggaccctgtgggcctgatgagccgggtggcccagcctgccagcaagaagatcgatcagaacaagctgaaacctgagatggacgagaagggcaacctgaccaccgccggctttgcctgctctcagtgtggccagcccctgttcgtgtacaagctggagcaggtgtctgagaagggcaaggcttacaccaactacttcggacggtgcaatgtggccgagcacgaaaagctgatcctgctggcccagctgaagcccgagaaggatagcgacgaagccgtgacatatagcctgggaaagtttgggcagagggccctggatttctacagcattcatgtgaccaaggagtccacccaccccgtgaagcccctggcccagatcgccggaaacagatacgcctccggacctgtgggaaaggccctgagcgacgcatgtatgggcacaatcgcctccttcctgtctaagtaccaggacatcatcatcgaacaccagaaggtggtgaagggcaaccagaagagactggagagcctgcgggagctggccggcaaggaaaacctggaataccctagcgtgaccctgccacctcagcctcacaccaaggagggcgttgatgcctacaacgaagtgatcgcccgggtgcgaatgtgggtgaacctgaacctgtggcagaagctgaagctaagcagagatgatgccaagcctctgctgagactgaagggattcccttcctttcctctggtcgagagacaggccaacgaagtggactggtgggacatggtgtgtaacgtgaagaagctgatcaacgagaaaaaggaggatggcaaggtgttttggcagaatctggctggctacaagagacaggaagccctgagaccatacctgagcagcgaggaagatcggaagaagggaaagaaattcgctcggtaccagctgggcgacctgctgctgcacctggaaaagaagcacggcgaggactggggaaaggtgtacgacgaggcctgggagcggattgacaagaaagtggaaggcctgagcaagcacatcaagctggaagaggaacggagaagcgaggacgcccagagcaaggccgccctgaccgactggctgcgggctaaggccagcttcgtgatcgagggcctgaaggaggccgacaaggacgagttctgcagatgcgagctgaagctgcagaagtggtacggggacctgcggggaaagcccttcgccatcgaagccgagaacagcatcctggacatcagcggcttcagcaagcagtacaactgtgccttcatctggcagaaggacggcgtgaagaagctgaacctgtacctgatcatcaactacttcaagggcggcaagctgcggttcaagaagatcaaacctgaagccttcgaagccaacagattctacaccgtgatcaacaaaaagagcggcgagatcgtgcccatggaggtgaacttcaacttcgacgaccccaacctgatcatcctgcctctggcctttggcaagagacagggcagagaattcatctggaacgacctgctgtccctggaaaccggcagcctgaagctggccaacggaagagtgatcgagaagacactgtacaacagaagaacccggcaggatgagcctgccctgttcgtggccctgaccttcgagcggcgggaggtcctggactcctccaatatcaaaccaatgaacctgatcggcgtggcaagaggcgaaaacatccccgccgtgatcgccctgaccgaccccgagggctgcccactgagccggtttaaggatagcctgggaaacccaacccacatcctgagaatcggcgagagctataaggagaagcagcggaccatccaggccaagaaggaggtggagcagcggagagccggcggctacagccggaagtacgccagcaaagccaagaatctggcagacgatatggtgagaaacaccgctagagatctgctgtactacgccgtgacccaggatgccatgctgatcttcgccaacctgagccggggcttcggccggcagggcaagcggaccttcatggccgagagacagtacacacggatggaggactggctgaccgccaagctggcctacgagggcctgagcaagacctacctgtccaagacactggcccagtacacctccaagacatgcagcaactgtgggtttaccatcaccagcgccgactacgacagggtgctggagaagctgaagaagacagcaacaggctggatgaccacaattaacggcaaggagctgaaggtggagggccagattacctactacaacagatacaagagacagaacgtagtcaaggacctgtccgtcgagctggatagactgagcgaagaatctgtgaacaacgacatctcctcctggacaaagggcagaagcggagaagctctgagcctcctgaagaaaagattctcccatagacccgtgcaggagaagttcgtgtgcctgaactgcggcttcgagacacacgcagccgagcaagccgccctgaacatcgccagatcctggctgttcctgcggagccaggagtacaagaaataccagacaaacaagacaaccggcaacaccgataagagagccttcgtcgagacctggcagtccttttaccggaagaagcttaaggaggtgtggaaacctgccgtgcggtctggcggatctggcggaggctccaccagccccaagaaaaagagaaaagtctaagctgccttctgcggggcttgccttctggccatgcccttcttctctcccttgcacctgtacctcttggtctttgaataaagcctgagtaggaaggctagcaaaaaaaaaaaaaaaaaaaaaaaaaaaaaaaaaaaaaaaaaaaaaaaaaaaaaaaaaaaaaaaaaaaaaaaaaaaaaaaa

SEQ ID NO: 12792 - RNA, 5785 nt, synthetic construct
  source 1..5785: mol_type = other RNA
aggaaataagagagaaaagaagagtaagaagaaatataagagccaccatggcccctaagaagaagcgtaaagtgagccggatggaacgcctcgtctacgaggtgcggcagaagtgcagaaacatcgaggacatctgcatctcctgcggatctctgaacgtgaccctggagcacccactgttcatcggcggcatgtgccagaactgtaaaaactgttttctggagtgtgcctatcaatacgacgatgacggctaccagagctactgcaccatctgttgcggcggaagagaggtgctgatgtgtggaaataacaactgctgccggtgcttctgcgtggaatgcgtggacctgctggtgggccccggcgccgcccaggccgctattaaggaagatccttggaactgctacatgtgcggccacaagggcacatacggcctgctgagacggagagaggactggcctagcagactgcagatgttcttcgccaataaccacgaccaggagttcgacccccctaaggtgtaccctcccgtccccgccgagaagagaaagcccatccgggtcctgagcctgttcgatggcatcgccaccggtctgctggtgctgaaggacctgggcatccaggtggataggtacattgcctccgaggtgtgcgaggactccatcaccgtgggaatggtgcgtcatcagggcaagatcatgtacgtgggcgacgtgcggagcgtgacacagaagcatatccaggagtggggccctttcgacctggtgatcggcggcagcccttgcaatgacctgagcatcgtgaacccagcccggaagggcctgtacgagggaaccggcagactgttcttcgagttttacagactgctgcacgacgcccggcctaaggaaggcgacgaccggcccttcttttggctgttcgagaatgtggtggccatgggagtcagcgacaagcgggatattagccggttcctggagagcaaccccgtgatgatcgatgccaaggaagtgagcgccgcccaccgggccagatacttctggggcaatctgcctggcatgaacagacccctggccagcaccgtgaacgacaagctggagctgcaggagtgcctggagcacggccggatcgccaagttcagcaaggtgagaaccatcaccacccgaagcaacagcatcaaacaaggcaaggaccagcactttcctgtgttcatgaacgagaaggaggacatcctgtggtgtaccgagatggagagagtgttcgggttcccagtccactacacagatgtcagcaacatgtctagactggccagacagagactgctgggaagaagctggtccgtccctgtgatcagacacctgttcgcccctctgaaggagtacttcgcctgcgtgagcagcggcaacagcaacgccaacagccggggccccagcttctctagcggcctggtgccactgtccctgagagggagccacatgggccccatggagatctacaaaaccgtgagcgcctggaagcggcagcctgtgcgcgtgctgagcctgtttcggaatatcgataaagtcctgaaaagcctgggattcctggagagcggctctggctccggcggtggcaccctgaagtacgtggaggatgtgacaaacgtggtcagacgggatgtggagaagtggggccccttcgatctggtgtacggcagcacccaacccctgggcagctcttgtgaccggtgccctggctggtacatgtttcagttccaccggatcctgcagtacgccctgccgagacaggagtcccagcggccattcttttggattttcatggacaacttgctgctgaccgaggatgaccaggaaactaccactcggttcctgcagaccgaagccgtgaccctgcaggacgtgagaggccgggactaccagaacgccatgcgggtgtggtccaacatccctggactgaaaagcaagcacgcacctctgacccctaaagaagaggagtacctgcaggcccaggtgcggagcagaagcaagctggacgcccctaaggtggatctgctggtgaagaattgcctcctgcccctgagagagtacttcaagtatttcagccagaatagtctgcccctgggaggcagcggcggcggcgcccacatgagcctgagcttcagggacgtggccatcgacctgagccaggaggagtgggagtgcctggaccccgtgcagagggccctgtacagggacgtgatgctggagaactacagcaacctggtgagcctgggctgcagcacccccaagcccgacatgatcaccctgctggagcaggagaaggagccctggatgatcatgagggagggcaccggcagctggttcaccggcctggagagcaagggcggcccaagcagcggcgcccctcctcccagcggcggcagcccagccggctccccaacctctaccgaggagggcacctctgagtccgccacccccgagagcggccctggcacctccaccgagcccagcgagggcagcgcacccggcagccctgccggcagccccacctccacagaggagggaaccagcaccgagcccagcgaaggcagcgccccaggcaccagcaccgagcctagtgagcaggagattaaacggatcaacaagatcagaagaagacttgtgaaagacagcaacaccaagaaggccggcaagacaggccccatgaaaaccctgctggttagagtgatgacacccgatctgagagagcggctggaaaacctgagaaagaagcctgaaaatatcccccagcccatcagcaatacatctagagccaacctgaataagctgctgaccgattacaccgaaatgaagaaggcgatcctgcatgtgtactgggaagagttccagaaggaccctgtgggcctgatgagccgggtggcccagcctgccagcaagaagatcgatcagaacaagctgaaacctgagatggacgagaagggcaacctgaccaccgccggctttgcctgctctcagtgtggccagcccctgttcgtgtacaagctggagcaggtgtctgagaagggcaaggcttacaccaactacttcggacggtgcaatgtggccgagcacgaaaagctgatcctgctggcccagctgaagcccgagaaggatagcgacgaagccgtgacatatagcctgggaaagtttgggcagagggccctggatttctacagcattcatgtgaccaaggagtccacccaccccgtgaagcccctggcccagatcgccggaaacagatacgcctccggacctgtgggaaaggccctgagcgacgcatgtatgggcacaatcgcctccttcctgtctaagtaccaggacatcatcatcgaacaccagaaggtggtgaagggcaaccagaagagactggagagcctgcgggagctggccggcaaggaaaacctggaataccctagcgtgaccctgccacctcagcctcacaccaaggagggcgttgatgcctacaacgaagtgatcgcccgggtgcgaatgtgggtgaacctgaacctgtggcagaagctgaagctaagcagagatgatgccaagcctctgctgagactgaagggattcccttcctttcctctggtcgagagacaggccaacgaagtggactggtgggacatggtgtgtaacgtgaagaagctgatcaacgagaaaaaggaggatggcaaggtgttttggcagaatctggctggctacaagagacaggaagccctgagaccatacctgagcagcgaggaagatcggaagaagggaaagaaattcgctcggtaccagctgggcgacctgctgctgcacctggaaaagaagcacggcgaggactggggaaaggtgtacgacgaggcctgggagcggattgacaagaaagtggaaggcctgagcaagcacatcaagctggaagaggaacggagaagcgaggacgcccagagcaaggccgccctgaccgactggctgcgggctaaggccagcttcgtgatcgagggcctgaaggaggccgacaaggacgagttctgcagatgcgagctgaagctgcagaagtggtacggggacctgcggggaaagcccttcgccatcgaagccgagaacagcatcctggacatcagcggcttcagcaagcagtacaactgtgccttcatctggcagaaggacggcgtgaagaagctgaacctgtacctgatcatcaactacttcaagggcggcaagctgcggttcaagaagatcaaacctgaagccttcgaagccaacagattctacaccgtgatcaacaaaaagagcggcgagatcgtgcccatggaggtgaacttcaacttcgacgaccccaacctgatcatcctgcctctggcctttggcaagagacagggcagagaattcatctggaacgacctgctgtccctggaaaccggcagcctgaagctggccaacggaagagtgatcgagaagacactgtacaacagaagaacccggcaggatgagcctgccctgttcgtggccctgaccttcgagcggcgggaggtcctggactcctccaatatcaaaccaatgaacctgatcggcgtggcaagaggcgaaaacatccccgccgtgatcgccctgaccgaccccgagggctgcccactgagccggtttaaggatagcctgggaaacccaacccacatcctgagaatcggcgagagctataaggagaagcagcggaccatccaggccaagaaggaggtggagcagcggagagccggcggctacagccggaagtacgccagcaaagccaagaatctggcagacgatatggtgagaaacaccgctagagatctgctgtactacgccgtgacccaggatgccatgctgatcttcgccaacctgagccggggcttcggccggcagggcaagcggaccttcatggccgagagacagtacacacggatggaggactggctgaccgccaagctggcctacgagggcctgagcaagacctacctgtccaagacactggcccagtacacctccaagacatgcagcaactgtgggtttaccatcaccagcgccgactacgacagggtgctggagaagctgaagaagacagcaacaggctggatgaccacaattaacggcaaggagctgaaggtggagggccagattacctactacaacagatacaagagacagaacgtagtcaaggacctgtccgtcgagctggatagactgagcgaagaatctgtgaacaacgacatctcctcctggacaaagggcagaagcggagaagctctgagcctcctgaagaaaagattctcccatagacccgtgcaggagaagttcgtgtgcctgaactgcggcttcgagacacacgcagccgagcaagccgccctgaacatcgccagatcctggctgttcctgcggagccaggagtacaagaaataccagacaaacaagacaaccggcaacaccgataagagagccttcgtcgagacctggcagtccttttaccggaagaagcttaaggaggtgtggaaacctgccgtgcggtctggcggatctggcggaggctccaccagccccaagaaaaagagaaaagtctaagctgccttctgcggggcttgccttctggccatgcccttcttctctcccttgcacctgtacctcttggtctttgaataaagcctgagtaggaaggctagcaaaaaaaaaaaaaaaaaaaaaaaaaaaaaaaaaaaaaaaaaaaaaaaaaaaaaaaaaaaaaaaaaaaaaaaaaaaaaaaa

SEQ ID NO: 12793 - RNA, 5785 nt, synthetic construct
  source 1..5785: mol_type = other RNA
aggaaataagagagaaaagaagagtaagaagaaatataagagccaccatggcccctaagaagaagcgtaaagtgagccggatggaacgcctcgtctacgaggtgcggcagaagtgcagaaacatcgaggacatctgcatctcctgcggatctctgaacgtgaccctggagcacccactgttcatcggcggcatgtgccagaactgtaaaaactgttttctggagtgtgcctatcaatacgacgatgacggctaccagagctactgcaccatctgttgcggcggaagagaggtgctgatgtgtggaaataacaactgctgccggtgcttctgcgtggaatgcgtggacctgctggtgggccccggcgccgcccaggccgctattaaggaagatccttggaactgctacatgtgcggccacaagggcacatacggcctgctgagacggagagaggactggcctagcagactgcagatgttcttcgccaataaccacgaccaggagttcgacccccctaaggtgtaccctcccgtccccgccgagaagagaaagcccatccgggtcctgagcctgttcgatggcatcgccaccggtctgctggtgctgaaggacctgggcatccaggtggataggtacattgcctccgaggtgtgcgaggactccatcaccgtgggaatggtgcgtcatcagggcaagatcatgtacgtgggcgacgtgcggagcgtgacacagaagcatatccaggagtggggccctttcgacctggtgatcggcggcagcccttgcaatgacctgagcatcgtgaacccagcccggaagggcctgtacgagggaaccggcagactgttcttcgagttttacagactgctgcacgacgcccggcctaaggaaggcgacgaccggcccttcttttggctgttcgagaatgtggtggccatgggagtcagcgacaagcgggatattagccggttcctggagagcaaccccgtgatgatcgatgccaaggaagtgagcgccgcccaccgggccagatacttctggggcaatctgcctggcatgaacagacccctggccagcaccgtgaacgacaagctggagctgcaggagtgcctggagcacggccggatcgccaagttcagcaaggtgagaaccatcaccacccgaagcaacagcatcaaacaaggcaaggaccagcactttcctgtgttcatgaacgagaaggaggacatcctgtggtgtaccgagatggagagagtgttcgggttcccagtccactacacagatgtcagcaacatgtctagactggccagacagagactgctgggaagaagctggtccgtccctgtgatcagacacctgttcgcccctctgaaggagtacttcgcctgcgtgagcagcggcaacagcaacgccaacagccggggccccagcttctctagcggcctggtgccactgtccctgagagggagccacatgggccccatggagatctacaaaaccgtgagcgcctggaagcggcagcctgtgcgcgtgctgagcctgtttcggaatatcgataaagtcctgaaaagcctgggattcctggagagcggctctggctccggcggtggcaccctgaagtacgtggaggatgtgacaaacgtggtcagacgggatgtggagaagtggggccccttcgatctggtgtacggcagcacccaacccctgggcagctcttgtgaccggtgccctggctggtacatgtttcagttccaccggatcctgcagtacgccctgccgagacaggagtcccagcggccattcttttggattttcatggacaacttgctgctgaccgaggatgaccaggaaactaccactcggttcctgcagaccgaagccgtgaccctgcaggacgtgagaggccgggactaccagaacgccatgcgggtgtggtccaacatccctggactgaaaagcaagcacgcacctctgacccctaaagaagaggagtacctgcaggcccaggtgcggagcagaagcaagctggacgcccctaaggtggatctgctggtgaagaattgcctcctgcccctgagagagtacttcaagtatttcagccagaatagtctgcccctgggaggcagcggcggcggcccccaggagcccgtgaccttcgaggacgtggccgtgctgttcacccccgaggagtggatgttcctggacagcgcccagaggagcctgtacagggacgtgatgctggagaactacaggaacctggccagcgtgggcgaccagctgggcaagttcagcagcttcagccacctggagcagggcgaggagtggtggcccaccgagaggagggtgttccccggcagctgccccgagcccagcctgcccggcggcccaagcagcggcgcccctcctcccagcggcggcagcccagccggctccccaacctctaccgaggagggcacctctgagtccgccacccccgagagcggccctggcacctccaccgagcccagcgagggcagcgcacccggcagccctgccggcagccccacctccacagaggagggaaccagcaccgagcccagcgaaggcagcgccccaggcaccagcaccgagcctagtgagcaggagattaaacggatcaacaagatcagaagaagacttgtgaaagacagcaacaccaagaaggccggcaagacaggccccatgaaaaccctgctggttagagtgatgacacccgatctgagagagcggctggaaaacctgagaaagaagcctgaaaatatcccccagcccatcagcaatacatctagagccaacctgaataagctgctgaccgattacaccgaaatgaagaaggcgatcctgcatgtgtactgggaagagttccagaaggaccctgtgggcctgatgagccgggtggcccagcctgccagcaagaagatcgatcagaacaagctgaaacctgagatggacgagaagggcaacctgaccaccgccggctttgcctgctctcagtgtggccagcccctgttcgtgtacaagctggagcaggtgtctgagaagggcaaggcttacaccaactacttcggacggtgcaatgtggccgagcacgaaaagctgatcctgctggcccagctgaagcccgagaaggatagcgacgaagccgtgacatatagcctgggaaagtttgggcagagggccctggatttctacagcattcatgtgaccaaggagtccacccaccccgtgaagcccctggcccagatcgccggaaacagatacgcctccggacctgtgggaaaggccctgagcgacgcatgtatgggcacaatcgcctccttcctgtctaagtaccaggacatcatcatcgaacaccagaaggtggtgaagggcaaccagaagagactggagagcctgcgggagctggccggcaaggaaaacctggaataccctagcgtgaccctgccacctcagcctcacaccaaggagggcgttgatgcctacaacgaagtgatcgcccgggtgcgaatgtgggtgaacctgaacctgtggcagaagctgaagctaagcagagatgatgccaagcctctgctgagactgaagggattcccttcctttcctctggtcgagagacaggccaacgaagtggactggtgggacatggtgtgtaacgtgaagaagctgatcaacgagaaaaaggaggatggcaaggtgttttggcagaatctggctggctacaagagacaggaagccctgagaccatacctgagcagcgaggaagatcggaagaagggaaagaaattcgctcggtaccagctgggcgacctgctgctgcacctggaaaagaagcacggcgaggactggggaaaggtgtacgacgaggcctgggagcggattgacaagaaagtggaaggcctgagcaagcacatcaagctggaagaggaacggagaagcgaggacgcccagagcaaggccgccctgaccgactggctgcgggctaaggccagcttcgtgatcgagggcctgaaggaggccgacaaggacgagttctgcagatgcgagctgaagctgcagaagtggtacggggacctgcggggaaagcccttcgccatcgaagccgagaacagcatcctggacatcagcggcttcagcaagcagtacaactgtgccttcatctggcagaaggacggcgtgaagaagctgaacctgtacctgatcatcaactacttcaagggcggcaagctgcggttcaagaagatcaaacctgaagccttcgaagccaacagattctacaccgtgatcaacaaaaagagcggcgagatcgtgcccatggaggtgaacttcaacttcgacgaccccaacctgatcatcctgcctctggcctttggcaagagacagggcagagaattcatctggaacgacctgctgtccctggaaaccggcagcctgaagctggccaacggaagagtgatcgagaagacactgtacaacagaagaacccggcaggatgagcctgccctgttcgtggccctgaccttcgagcggcgggaggtcctggactcctccaatatcaaaccaatgaacctgatcggcgtggcaagaggcgaaaacatccccgccgtgatcgccctgaccgaccccgagggctgcccactgagccggtttaaggatagcctgggaaacccaacccacatcctgagaatcggcgagagctataaggagaagcagcggaccatccaggccaagaaggaggtggagcagcggagagccggcggctacagccggaagtacgccagcaaagccaagaatctggcagacgatatggtgagaaacaccgctagagatctgctgtactacgccgtgacccaggatgccatgctgatcttcgccaacctgagccggggcttcggccggcagggcaagcggaccttcatggccgagagacagtacacacggatggaggactggctgaccgccaagctggcctacgagggcctgagcaagacctacctgtccaagacactggcccagtacacctccaagacatgcagcaactgtgggtttaccatcaccagcgccgactacgacagggtgctggagaagctgaagaagacagcaacaggctggatgaccacaattaacggcaaggagctgaaggtggagggccagattacctactacaacagatacaagagacagaacgtagtcaaggacctgtccgtcgagctggatagactgagcgaagaatctgtgaacaacgacatctcctcctggacaaagggcagaagcggagaagctctgagcctcctgaagaaaagattctcccatagacccgtgcaggagaagttcgtgtgcctgaactgcggcttcgagacacacgcagccgagcaagccgccctgaacatcgccagatcctggctgttcctgcggagccaggagtacaagaaataccagacaaacaagacaaccggcaacaccgataagagagccttcgtcgagacctggcagtccttttaccggaagaagcttaaggaggtgtggaaacctgccgtgcggtctggcggatctggcggaggctccaccagccccaagaaaaagagaaaagtctaagctgccttctgcggggcttgccttctggccatgcccttcttctctcccttgcacctgtacctcttggtctttgaataaagcctgagtaggaaggctagcaaaaaaaaaaaaaaaaaaaaaaaaaaaaaaaaaaaaaaaaaaaaaaaaaaaaaaaaaaaaaaaaaaaaaaaaaaaaaaaa

SEQ ID NO: 12794 - RNA, 5785 nt, synthetic construct
  source 1..5785: mol_type = other RNA
aggaaataagagagaaaagaagagtaagaagaaatataagagccaccatggcccctaagaagaagcgtaaagtgagccggatggaacgcctcgtctacgaggtgcggcagaagtgcagaaacatcgaggacatctgcatctcctgcggatctctgaacgtgaccctggagcacccactgttcatcggcggcatgtgccagaactgtaaaaactgttttctggagtgtgcctatcaatacgacgatgacggctaccagagctactgcaccatctgttgcggcggaagagaggtgctgatgtgtggaaataacaactgctgccggtgcttctgcgtggaatgcgtggacctgctggtgggccccggcgccgcccaggccgctattaaggaagatccttggaactgctacatgtgcggccacaagggcacatacggcctgctgagacggagagaggactggcctagcagactgcagatgttcttcgccaataaccacgaccaggagttcgacccccctaaggtgtaccctcccgtccccgccgagaagagaaagcccatccgggtcctgagcctgttcgatggcatcgccaccggtctgctggtgctgaaggacctgggcatccaggtggataggtacattgcctccgaggtgtgcgaggactccatcaccgtgggaatggtgcgtcatcagggcaagatcatgtacgtgggcgacgtgcggagcgtgacacagaagcatatccaggagtggggccctttcgacctggtgatcggcggcagcccttgcaatgacctgagcatcgtgaacccagcccggaagggcctgtacgagggaaccggcagactgttcttcgagttttacagactgctgcacgacgcccggcctaaggaaggcgacgaccggcccttcttttggctgttcgagaatgtggtggccatgggagtcagcgacaagcgggatattagccggttcctggagagcaaccccgtgatgatcgatgccaaggaagtgagcgccgcccaccgggccagatacttctggggcaatctgcctggcatgaacagacccctggccagcaccgtgaacgacaagctggagctgcaggagtgcctggagcacggccggatcgccaagttcagcaaggtgagaaccatcaccacccgaagcaacagcatcaaacaaggcaaggaccagcactttcctgtgttcatgaacgagaaggaggacatcctgtggtgtaccgagatggagagagtgttcgggttcccagtccactacacagatgtcagcaacatgtctagactggccagacagagactgctgggaagaagctggtccgtccctgtgatcagacacctgttcgcccctctgaaggagtacttcgcctgcgtgagcagcggcaacagcaacgccaacagccggggccccagcttctctagcggcctggtgccactgtccctgagagggagccacatgggccccatggagatctacaaaaccgtgagcgcctggaagcggcagcctgtgcgcgtgctgagcctgtttcggaatatcgataaagtcctgaaaagcctgggattcctggagagcggctctggctccggcggtggcaccctgaagtacgtggaggatgtgacaaacgtggtcagacgggatgtggagaagtggggccccttcgatctggtgtacggcagcacccaacccctgggcagctcttgtgaccggtgccctggctggtacatgtttcagttccaccggatcctgcagtacgccctgccgagacaggagtcccagcggccattcttttggattttcatggacaacttgctgctgaccgaggatgaccaggaaactaccactcggttcctgcagaccgaagccgtgaccctgcaggacgtgagaggccgggactaccagaacgccatgcgggtgtggtccaacatccctggactgaaaagcaagcacgcacctctgacccctaaagaagaggagtacctgcaggcccaggtgcggagcagaagcaagctggacgcccctaaggtggatctgctggtgaagaattgcctcctgcccctgagagagtacttcaagtatttcagccagaatagtctgcccctgggaggcagcggcggcggctggcaggagcccgtgaccttcgaggacgtggccgtgtacctgagccacgccgagtgggacgccatggcccccgagcagagggagctgtactgcagcgtgatgctggacaactaccagctgctggccagcctgggctaccccggccccaagcccgacatcgtgtacaggctggagaggggcgaggagccctggggctgcgccccccagagccccctgagctgggacggccccaggagccccagcggcggcccaagcagcggcgcccctcctcccagcggcggcagcccagccggctccccaacctctaccgaggagggcacctctgagtccgccacccccgagagcggccctggcacctccaccgagcccagcgagggcagcgcacccggcagccctgccggcagccccacctccacagaggagggaaccagcaccgagcccagcgaaggcagcgccccaggcaccagcaccgagcctagtgagcaggagattaaacggatcaacaagatcagaagaagacttgtgaaagacagcaacaccaagaaggccggcaagacaggccccatgaaaaccctgctggttagagtgatgacacccgatctgagagagcggctggaaaacctgagaaagaagcctgaaaatatcccccagcccatcagcaatacatctagagccaacctgaataagctgctgaccgattacaccgaaatgaagaaggcgatcctgcatgtgtactgggaagagttccagaaggaccctgtgggcctgatgagccgggtggcccagcctgccagcaagaagatcgatcagaacaagctgaaacctgagatggacgagaagggcaacctgaccaccgccggctttgcctgctctcagtgtggccagcccctgttcgtgtacaagctggagcaggtgtctgagaagggcaaggcttacaccaactacttcggacggtgcaatgtggccgagcacgaaaagctgatcctgctggcccagctgaagcccgagaaggatagcgacgaagccgtgacatatagcctgggaaagtttgggcagagggccctggatttctacagcattcatgtgaccaaggagtccacccaccccgtgaagcccctggcccagatcgccggaaacagatacgcctccggacctgtgggaaaggccctgagcgacgcatgtatgggcacaatcgcctccttcctgtctaagtaccaggacatcatcatcgaacaccagaaggtggtgaagggcaaccagaagagactggagagcctgcgggagctggccggcaaggaaaacctggaataccctagcgtgaccctgccacctcagcctcacaccaaggagggcgttgatgcctacaacgaagtgatcgcccgggtgcgaatgtgggtgaacctgaacctgtggcagaagctgaagctaagcagagatgatgccaagcctctgctgagactgaagggattcccttcctttcctctggtcgagagacaggccaacgaagtggactggtgggacatggtgtgtaacgtgaagaagctgatcaacgagaaaaaggaggatggcaaggtgttttggcagaatctggctggctacaagagacaggaagccctgagaccatacctgagcagcgaggaagatcggaagaagggaaagaaattcgctcggtaccagctgggcgacctgctgctgcacctggaaaagaagcacggcgaggactggggaaaggtgtacgacgaggcctgggagcggattgacaagaaagtggaaggcctgagcaagcacatcaagctggaagaggaacggagaagcgaggacgcccagagcaaggccgccctgaccgactggctgcgggctaaggccagcttcgtgatcgagggcctgaaggaggccgacaaggacgagttctgcagatgcgagctgaagctgcagaagtggtacggggacctgcggggaaagcccttcgccatcgaagccgagaacagcatcctggacatcagcggcttcagcaagcagtacaactgtgccttcatctggcagaaggacggcgtgaagaagctgaacctgtacctgatcatcaactacttcaagggcggcaagctgcggttcaagaagatcaaacctgaagccttcgaagccaacagattctacaccgtgatcaacaaaaagagcggcgagatcgtgcccatggaggtgaacttcaacttcgacgaccccaacctgatcatcctgcctctggcctttggcaagagacagggcagagaattcatctggaacgacctgctgtccctggaaaccggcagcctgaagctggccaacggaagagtgatcgagaagacactgtacaacagaagaacccggcaggatgagcctgccctgttcgtggccctgaccttcgagcggcgggaggtcctggactcctccaatatcaaaccaatgaacctgatcggcgtggcaagaggcgaaaacatccccgccgtgatcgccctgaccgaccccgagggctgcccactgagccggtttaaggatagcctgggaaacccaacccacatcctgagaatcggcgagagctataaggagaagcagcggaccatccaggccaagaaggaggtggagcagcggagagccggcggctacagccggaagtacgccagcaaagccaagaatctggcagacgatatggtgagaaacaccgctagagatctgctgtactacgccgtgacccaggatgccatgctgatcttcgccaacctgagccggggcttcggccggcagggcaagcggaccttcatggccgagagacagtacacacggatggaggactggctgaccgccaagctggcctacgagggcctgagcaagacctacctgtccaagacactggcccagtacacctccaagacatgcagcaactgtgggtttaccatcaccagcgccgactacgacagggtgctggagaagctgaagaagacagcaacaggctggatgaccacaattaacggcaaggagctgaaggtggagggccagattacctactacaacagatacaagagacagaacgtagtcaaggacctgtccgtcgagctggatagactgagcgaagaatctgtgaacaacgacatctcctcctggacaaagggcagaagcggagaagctctgagcctcctgaagaaaagattctcccatagacccgtgcaggagaagttcgtgtgcctgaactgcggcttcgagacacacgcagccgagcaagccgccctgaacatcgccagatcctggctgttcctgcggagccaggagtacaagaaataccagacaaacaagacaaccggcaacaccgataagagagccttcgtcgagacctggcagtccttttaccggaagaagcttaaggaggtgtggaaacctgccgtgcggtctggcggatctggcggaggctccaccagccccaagaaaaagagaaaagtctaagctgccttctgcggggcttgccttctggccatgcccttcttctctcccttgcacctgtacctcttggtctttgaataaagcctgagtaggaaggctagcaaaaaaaaaaaaaaaaaaaaaaaaaaaaaaaaaaaaaaaaaaaaaaaaaaaaaaaaaaaaaaaaaaaaaaaaaaaaaaaa

SEQ ID NO: 12795 - RNA, 5785 nt, synthetic construct
  source 1..5785: mol_type = other RNA
aggaaataagagagaaaagaagagtaagaagaaatataagagccaccatggcccctaagaagaagcgtaaagtgagccggatggaacgcctcgtctacgaggtgcggcagaagtgcagaaacatcgaggacatctgcatctcctgcggatctctgaacgtgaccctggagcacccactgttcatcggcggcatgtgccagaactgtaaaaactgttttctggagtgtgcctatcaatacgacgatgacggctaccagagctactgcaccatctgttgcggcggaagagaggtgctgatgtgtggaaataacaactgctgccggtgcttctgcgtggaatgcgtggacctgctggtgggccccggcgccgcccaggccgctattaaggaagatccttggaactgctacatgtgcggccacaagggcacatacggcctgctgagacggagagaggactggcctagcagactgcagatgttcttcgccaataaccacgaccaggagttcgacccccctaaggtgtaccctcccgtccccgccgagaagagaaagcccatccgggtcctgagcctgttcgatggcatcgccaccggtctgctggtgctgaaggacctgggcatccaggtggataggtacattgcctccgaggtgtgcgaggactccatcaccgtgggaatggtgcgtcatcagggcaagatcatgtacgtgggcgacgtgcggagcgtgacacagaagcatatccaggagtggggccctttcgacctggtgatcggcggcagcccttgcaatgacctgagcatcgtgaacccagcccggaagggcctgtacgagggaaccggcagactgttcttcgagttttacagactgctgcacgacgcccggcctaaggaaggcgacgaccggcccttcttttggctgttcgagaatgtggtggccatgggagtcagcgacaagcgggatattagccggttcctggagagcaaccccgtgatgatcgatgccaaggaagtgagcgccgcccaccgggccagatacttctggggcaatctgcctggcatgaacagacccctggccagcaccgtgaacgacaagctggagctgcaggagtgcctggagcacggccggatcgccaagttcagcaaggtgagaaccatcaccacccgaagcaacagcatcaaacaaggcaaggaccagcactttcctgtgttcatgaacgagaaggaggacatcctgtggtgtaccgagatggagagagtgttcgggttcccagtccactacacagatgtcagcaacatgtctagactggccagacagagactgctgggaagaagctggtccgtccctgtgatcagacacctgttcgcccctctgaaggagtacttcgcctgcgtgagcagcggcaacagcaacgccaacagccggggccccagcttctctagcggcctggtgccactgtccctgagagggagccacatgggccccatggagatctacaaaaccgtgagcgcctggaagcggcagcctgtgcgcgtgctgagcctgtttcggaatatcgataaagtcctgaaaagcctgggattcctggagagcggctctggctccggcggtggcaccctgaagtacgtggaggatgtgacaaacgtggtcagacgggatgtggagaagtggggccccttcgatctggtgtacggcagcacccaacccctgggcagctcttgtgaccggtgccctggctggtacatgtttcagttccaccggatcctgcagtacgccctgccgagacaggagtcccagcggccattcttttggattttcatggacaacttgctgctgaccgaggatgaccaggaaactaccactcggttcctgcagaccgaagccgtgaccctgcaggacgtgagaggccgggactaccagaacgccatgcgggtgtggtccaacatccctggactgaaaagcaagcacgcacctctgacccctaaagaagaggagtacctgcaggcccaggtgcggagcagaagcaagctggacgcccctaaggtggatctgctggtgaagaattgcctcctgcccctgagagagtacttcaagtatttcagccagaatagtctgcccctgggaggcagcggcggcggcggcaaggccctgctgagcttcgaggacgtggccatgtacttcaccagggaggagtggaaccacctggactgggcccagaaggacctgtacagggacgtgatgctggagaactacatgaacatggtgctgctgggcttccagttccccaagcccgaggtgatctgccagctggagaactgggacgagccctggatcctggacctgcccagggccggcaacaggaaggccagcagcagcgcctgcggcggcccaagcagcggcgcccctcctcccagcggcggcagcccagccggctccccaacctctaccgaggagggcacctctgagtccgccacccccgagagcggccctggcacctccaccgagcccagcgagggcagcgcacccggcagccctgccggcagccccacctccacagaggagggaaccagcaccgagcccagcgaaggcagcgccccaggcaccagcaccgagcctagtgagcaggagattaaacggatcaacaagatcagaagaagacttgtgaaagacagcaacaccaagaaggccggcaagacaggccccatgaaaaccctgctggttagagtgatgacacccgatctgagagagcggctggaaaacctgagaaagaagcctgaaaatatcccccagcccatcagcaatacatctagagccaacctgaataagctgctgaccgattacaccgaaatgaagaaggcgatcctgcatgtgtactgggaagagttccagaaggaccctgtgggcctgatgagccgggtggcccagcctgccagcaagaagatcgatcagaacaagctgaaacctgagatggacgagaagggcaacctgaccaccgccggctttgcctgctctcagtgtggccagcccctgttcgtgtacaagctggagcaggtgtctgagaagggcaaggcttacaccaactacttcggacggtgcaatgtggccgagcacgaaaagctgatcctgctggcccagctgaagcccgagaaggatagcgacgaagccgtgacatatagcctgggaaagtttgggcagagggccctggatttctacagcattcatgtgaccaaggagtccacccaccccgtgaagcccctggcccagatcgccggaaacagatacgcctccggacctgtgggaaaggccctgagcgacgcatgtatgggcacaatcgcctccttcctgtctaagtaccaggacatcatcatcgaacaccagaaggtggtgaagggcaaccagaagagactggagagcctgcgggagctggccggcaaggaaaacctggaataccctagcgtgaccctgccacctcagcctcacaccaaggagggcgttgatgcctacaacgaagtgatcgcccgggtgcgaatgtgggtgaacctgaacctgtggcagaagctgaagctaagcagagatgatgccaagcctctgctgagactgaagggattcccttcctttcctctggtcgagagacaggccaacgaagtggactggtgggacatggtgtgtaacgtgaagaagctgatcaacgagaaaaaggaggatggcaaggtgttttggcagaatctggctggctacaagagacaggaagccctgagaccatacctgagcagcgaggaagatcggaagaagggaaagaaattcgctcggtaccagctgggcgacctgctgctgcacctggaaaagaagcacggcgaggactggggaaaggtgtacgacgaggcctgggagcggattgacaagaaagtggaaggcctgagcaagcacatcaagctggaagaggaacggagaagcgaggacgcccagagcaaggccgccctgaccgactggctgcgggctaaggccagcttcgtgatcgagggcctgaaggaggccgacaaggacgagttctgcagatgcgagctgaagctgcagaagtggtacggggacctgcggggaaagcccttcgccatcgaagccgagaacagcatcctggacatcagcggcttcagcaagcagtacaactgtgccttcatctggcagaaggacggcgtgaagaagctgaacctgtacctgatcatcaactacttcaagggcggcaagctgcggttcaagaagatcaaacctgaagccttcgaagccaacagattctacaccgtgatcaacaaaaagagcggcgagatcgtgcccatggaggtgaacttcaacttcgacgaccccaacctgatcatcctgcctctggcctttggcaagagacagggcagagaattcatctggaacgacctgctgtccctggaaaccggcagcctgaagctggccaacggaagagtgatcgagaagacactgtacaacagaagaacccggcaggatgagcctgccctgttcgtggccctgaccttcgagcggcgggaggtcctggactcctccaatatcaaaccaatgaacctgatcggcgtggcaagaggcgaaaacatccccgccgtgatcgccctgaccgaccccgagggctgcccactgagccggtttaaggatagcctgggaaacccaacccacatcctgagaatcggcgagagctataaggagaagcagcggaccatccaggccaagaaggaggtggagcagcggagagccggcggctacagccggaagtacgccagcaaagccaagaatctggcagacgatatggtgagaaacaccgctagagatctgctgtactacgccgtgacccaggatgccatgctgatcttcgccaacctgagccggggcttcggccggcagggcaagcggaccttcatggccgagagacagtacacacggatggaggactggctgaccgccaagctggcctacgagggcctgagcaagacctacctgtccaagacactggcccagtacacctccaagacatgcagcaactgtgggtttaccatcaccagcgccgactacgacagggtgctggagaagctgaagaagacagcaacaggctggatgaccacaattaacggcaaggagctgaaggtggagggccagattacctactacaacagatacaagagacagaacgtagtcaaggacctgtccgtcgagctggatagactgagcgaagaatctgtgaacaacgacatctcctcctggacaaagggcagaagcggagaagctctgagcctcctgaagaaaagattctcccatagacccgtgcaggagaagttcgtgtgcctgaactgcggcttcgagacacacgcagccgagcaagccgccctgaacatcgccagatcctggctgttcctgcggagccaggagtacaagaaataccagacaaacaagacaaccggcaacaccgataagagagccttcgtcgagacctggcagtccttttaccggaagaagcttaaggaggtgtggaaacctgccgtgcggtctggcggatctggcggaggctccaccagccccaagaaaaagagaaaagtctaagctgccttctgcggggcttgccttctggccatgcccttcttctctcccttgcacctgtacctcttggtctttgaataaagcctgagtaggaaggctagcaaaaaaaaaaaaaaaaaaaaaaaaaaaaaaaaaaaaaaaaaaaaaaaaaaaaaaaaaaaaaaaaaaaaaaaaaaaaaaaa

SEQ ID NO: 12796 - RNA, 5785 nt, synthetic construct
  source 1..5785: mol_type = other RNA
aggaaataagagagaaaagaagagtaagaagaaatataagagccaccatggcccctaagaagaagcgtaaagtgagccggatggaacgcctcgtctacgaggtgcggcagaagtgcagaaacatcgaggacatctgcatctcctgcggatctctgaacgtgaccctggagcacccactgttcatcggcggcatgtgccagaactgtaaaaactgttttctggagtgtgcctatcaatacgacgatgacggctaccagagctactgcaccatctgttgcggcggaagagaggtgctgatgtgtggaaataacaactgctgccggtgcttctgcgtggaatgcgtggacctgctggtgggccccggcgccgcccaggccgctattaaggaagatccttggaactgctacatgtgcggccacaagggcacatacggcctgctgagacggagagaggactggcctagcagactgcagatgttcttcgccaataaccacgaccaggagttcgacccccctaaggtgtaccctcccgtccccgccgagaagagaaagcccatccgggtcctgagcctgttcgatggcatcgccaccggtctgctggtgctgaaggacctgggcatccaggtggataggtacattgcctccgaggtgtgcgaggactccatcaccgtgggaatggtgcgtcatcagggcaagatcatgtacgtgggcgacgtgcggagcgtgacacagaagcatatccaggagtggggccctttcgacctggtgatcggcggcagcccttgcaatgacctgagcatcgtgaacccagcccggaagggcctgtacgagggaaccggcagactgttcttcgagttttacagactgctgcacgacgcccggcctaaggaaggcgacgaccggcccttcttttggctgttcgagaatgtggtggccatgggagtcagcgacaagcgggatattagccggttcctggagagcaaccccgtgatgatcgatgccaaggaagtgagcgccgcccaccgggccagatacttctggggcaatctgcctggcatgaacagacccctggccagcaccgtgaacgacaagctggagctgcaggagtgcctggagcacggccggatcgccaagttcagcaaggtgagaaccatcaccacccgaagcaacagcatcaaacaaggcaaggaccagcactttcctgtgttcatgaacgagaaggaggacatcctgtggtgtaccgagatggagagagtgttcgggttcccagtccactacacagatgtcagcaacatgtctagactggccagacagagactgctgggaagaagctggtccgtccctgtgatcagacacctgttcgcccctctgaaggagtacttcgcctgcgtgagcagcggcaacagcaacgccaacagccggggccccagcttctctagcggcctggtgccactgtccctgagagggagccacatgggccccatggagatctacaaaaccgtgagcgcctggaagcggcagcctgtgcgcgtgctgagcctgtttcggaatatcgataaagtcctgaaaagcctgggattcctggagagcggctctggctccggcggtggcaccctgaagtacgtggaggatgtgacaaacgtggtcagacgggatgtggagaagtggggccccttcgatctggtgtacggcagcacccaacccctgggcagctcttgtgaccggtgccctggctggtacatgtttcagttccaccggatcctgcagtacgccctgccgagacaggagtcccagcggccattcttttggattttcatggacaacttgctgctgaccgaggatgaccaggaaactaccactcggttcctgcagaccgaagccgtgaccctgcaggacgtgagaggccgggactaccagaacgccatgcgggtgtggtccaacatccctggactgaaaagcaagcacgcacctctgacccctaaagaagaggagtacctgcaggcccaggtgcggagcagaagcaagctggacgcccctaaggtggatctgctggtgaagaattgcctcctgcccctgagagagtacttcaagtatttcagccagaatagtctgcccctgggaggcagcggcggcggcacccaggtgagcgtgaccttcgacgacgtggccgtgaccttcacccaggaggagtggggccacctggaccccgcccagaggaccctgtacagggaggtgatgctggagacctgcaggctgctggtgagcctgggctgccccgtgcccaggcccgagctgatctacaggctggagcacggccaggagctgtggaccgtgaagagggacctgagcaggagcacctgcgccgtggacgagggcaagggcggcccaagcagcggcgcccctcctcccagcggcggcagcccagccggctccccaacctctaccgaggagggcacctctgagtccgccacccccgagagcggccctggcacctccaccgagcccagcgagggcagcgcacccggcagccctgccggcagccccacctccacagaggagggaaccagcaccgagcccagcgaaggcagcgccccaggcaccagcaccgagcctagtgagcaggagattaaacggatcaacaagatcagaagaagacttgtgaaagacagcaacaccaagaaggccggcaagacaggccccatgaaaaccctgctggttagagtgatgacacccgatctgagagagcggctggaaaacctgagaaagaagcctgaaaatatcccccagcccatcagcaatacatctagagccaacctgaataagctgctgaccgattacaccgaaatgaagaaggcgatcctgcatgtgtactgggaagagttccagaaggaccctgtgggcctgatgagccgggtggcccagcctgccagcaagaagatcgatcagaacaagctgaaacctgagatggacgagaagggcaacctgaccaccgccggctttgcctgctctcagtgtggccagcccctgttcgtgtacaagctggagcaggtgtctgagaagggcaaggcttacaccaactacttcggacggtgcaatgtggccgagcacgaaaagctgatcctgctggcccagctgaagcccgagaaggatagcgacgaagccgtgacatatagcctgggaaagtttgggcagagggccctggatttctacagcattcatgtgaccaaggagtccacccaccccgtgaagcccctggcccagatcgccggaaacagatacgcctccggacctgtgggaaaggccctgagcgacgcatgtatgggcacaatcgcctccttcctgtctaagtaccaggacatcatcatcgaacaccagaaggtggtgaagggcaaccagaagagactggagagcctgcgggagctggccggcaaggaaaacctggaataccctagcgtgaccctgccacctcagcctcacaccaaggagggcgttgatgcctacaacgaagtgatcgcccgggtgcgaatgtgggtgaacctgaacctgtggcagaagctgaagctaagcagagatgatgccaagcctctgctgagactgaagggattcccttcctttcctctggtcgagagacaggccaacgaagtggactggtgggacatggtgtgtaacgtgaagaagctgatcaacgagaaaaaggaggatggcaaggtgttttggcagaatctggctggctacaagagacaggaagccctgagaccatacctgagcagcgaggaagatcggaagaagggaaagaaattcgctcggtaccagctgggcgacctgctgctgcacctggaaaagaagcacggcgaggactggggaaaggtgtacgacgaggcctgggagcggattgacaagaaagtggaaggcctgagcaagcacatcaagctggaagaggaacggagaagcgaggacgcccagagcaaggccgccctgaccgactggctgcgggctaaggccagcttcgtgatcgagggcctgaaggaggccgacaaggacgagttctgcagatgcgagctgaagctgcagaagtggtacggggacctgcggggaaagcccttcgccatcgaagccgagaacagcatcctggacatcagcggcttcagcaagcagtacaactgtgccttcatctggcagaaggacggcgtgaagaagctgaacctgtacctgatcatcaactacttcaagggcggcaagctgcggttcaagaagatcaaacctgaagccttcgaagccaacagattctacaccgtgatcaacaaaaagagcggcgagatcgtgcccatggaggtgaacttcaacttcgacgaccccaacctgatcatcctgcctctggcctttggcaagagacagggcagagaattcatctggaacgacctgctgtccctggaaaccggcagcctgaagctggccaacggaagagtgatcgagaagacactgtacaacagaagaacccggcaggatgagcctgccctgttcgtggccctgaccttcgagcggcgggaggtcctggactcctccaatatcaaaccaatgaacctgatcggcgtggcaagaggcgaaaacatccccgccgtgatcgccctgaccgaccccgagggctgcccactgagccggtttaaggatagcctgggaaacccaacccacatcctgagaatcggcgagagctataaggagaagcagcggaccatccaggccaagaaggaggtggagcagcggagagccggcggctacagccggaagtacgccagcaaagccaagaatctggcagacgatatggtgagaaacaccgctagagatctgctgtactacgccgtgacccaggatgccatgctgatcttcgccaacctgagccggggcttcggccggcagggcaagcggaccttcatggccgagagacagtacacacggatggaggactggctgaccgccaagctggcctacgagggcctgagcaagacctacctgtccaagacactggcccagtacacctccaagacatgcagcaactgtgggtttaccatcaccagcgccgactacgacagggtgctggagaagctgaagaagacagcaacaggctggatgaccacaattaacggcaaggagctgaaggtggagggccagattacctactacaacagatacaagagacagaacgtagtcaaggacctgtccgtcgagctggatagactgagcgaagaatctgtgaacaacgacatctcctcctggacaaagggcagaagcggagaagctctgagcctcctgaagaaaagattctcccatagacccgtgcaggagaagttcgtgtgcctgaactgcggcttcgagacacacgcagccgagcaagccgccctgaacatcgccagatcctggctgttcctgcggagccaggagtacaagaaataccagacaaacaagacaaccggcaacaccgataagagagccttcgtcgagacctggcagtccttttaccggaagaagcttaaggaggtgtggaaacctgccgtgcggtctggcggatctggcggaggctccaccagccccaagaaaaagagaaaagtctaagctgccttctgcggggcttgccttctggccatgcccttcttctctcccttgcacctgtacctcttggtctttgaataaagcctgagtaggaaggctagcaaaaaaaaaaaaaaaaaaaaaaaaaaaaaaaaaaaaaaaaaaaaaaaaaaaaaaaaaaaaaaaaaaaaaaaaaaaaaaaa

SEQ ID NO: 12797 - RNA, 5785 nt, synthetic construct
  source 1..5785: mol_type = other RNA
aggaaataagagagaaaagaagagtaagaagaaatataagagccaccatggcccctaagaagaagcgtaaagtgagccggatggaacgcctcgtctacgaggtgcggcagaagtgcagaaacatcgaggacatctgcatctcctgcggatctctgaacgtgaccctggagcacccactgttcatcggcggcatgtgccagaactgtaaaaactgttttctggagtgtgcctatcaatacgacgatgacggctaccagagctactgcaccatctgttgcggcggaagagaggtgctgatgtgtggaaataacaactgctgccggtgcttctgcgtggaatgcgtggacctgctggtgggccccggcgccgcccaggccgctattaaggaagatccttggaactgctacatgtgcggccacaagggcacatacggcctgctgagacggagagaggactggcctagcagactgcagatgttcttcgccaataaccacgaccaggagttcgacccccctaaggtgtaccctcccgtccccgccgagaagagaaagcccatccgggtcctgagcctgttcgatggcatcgccaccggtctgctggtgctgaaggacctgggcatccaggtggataggtacattgcctccgaggtgtgcgaggactccatcaccgtgggaatggtgcgtcatcagggcaagatcatgtacgtgggcgacgtgcggagcgtgacacagaagcatatccaggagtggggccctttcgacctggtgatcggcggcagcccttgcaatgacctgagcatcgtgaacccagcccggaagggcctgtacgagggaaccggcagactgttcttcgagttttacagactgctgcacgacgcccggcctaaggaaggcgacgaccggcccttcttttggctgttcgagaatgtggtggccatgggagtcagcgacaagcgggatattagccggttcctggagagcaaccccgtgatgatcgatgccaaggaagtgagcgccgcccaccgggccagatacttctggggcaatctgcctggcatgaacagacccctggccagcaccgtgaacgacaagctggagctgcaggagtgcctggagcacggccggatcgccaagttcagcaaggtgagaaccatcaccacccgaagcaacagcatcaaacaaggcaaggaccagcactttcctgtgttcatgaacgagaaggaggacatcctgtggtgtaccgagatggagagagtgttcgggttcccagtccactacacagatgtcagcaacatgtctagactggccagacagagactgctgggaagaagctggtccgtccctgtgatcagacacctgttcgcccctctgaaggagtacttcgcctgcgtgagcagcggcaacagcaacgccaacagccggggccccagcttctctagcggcctggtgccactgtccctgagagggagccacatgggccccatggagatctacaaaaccgtgagcgcctggaagcggcagcctgtgcgcgtgctgagcctgtttcggaatatcgataaagtcctgaaaagcctgggattcctggagagcggctctggctccggcggtggcaccctgaagtacgtggaggatgtgacaaacgtggtcagacgggatgtggagaagtggggccccttcgatctggtgtacggcagcacccaacccctgggcagctcttgtgaccggtgccctggctggtacatgtttcagttccaccggatcctgcagtacgccctgccgagacaggagtcccagcggccattcttttggattttcatggacaacttgctgctgaccgaggatgaccaggaaactaccactcggttcctgcagaccgaagccgtgaccctgcaggacgtgagaggccgggactaccagaacgccatgcgggtgtggtccaacatccctggactgaaaagcaagcacgcacctctgacccctaaagaagaggagtacctgcaggcccaggtgcggagcagaagcaagctggacgcccctaaggtggatctgctggtgaagaattgcctcctgcccctgagagagtacttcaagtatttcagccagaatagtctgcccctgggaggcagcggcggcggctaccagggcctggtgagcttcgaggacgtggccgtgaacttcacctgggaggagtggcaggacctggacgccgcccagaggaccctgtacagggacgtgatgctggagaactacagcagcctggtgagcctgggccactgcatcaccaagcccgaggtgatcatcaagctggagcagggcgccgccccctggaccgtgaaggagacccccgaccagggcagccccgacgtgcagatcgtggacggcggcccaagcagcggcgcccctcctcccagcggcggcagcccagccggctccccaacctctaccgaggagggcacctctgagtccgccacccccgagagcggccctggcacctccaccgagcccagcgagggcagcgcacccggcagccctgccggcagccccacctccacagaggagggaaccagcaccgagcccagcgaaggcagcgccccaggcaccagcaccgagcctagtgagcaggagattaaacggatcaacaagatcagaagaagacttgtgaaagacagcaacaccaagaaggccggcaagacaggccccatgaaaaccctgctggttagagtgatgacacccgatctgagagagcggctggaaaacctgagaaagaagcctgaaaatatcccccagcccatcagcaatacatctagagccaacctgaataagctgctgaccgattacaccgaaatgaagaaggcgatcctgcatgtgtactgggaagagttccagaaggaccctgtgggcctgatgagccgggtggcccagcctgccagcaagaagatcgatcagaacaagctgaaacctgagatggacgagaagggcaacctgaccaccgccggctttgcctgctctcagtgtggccagcccctgttcgtgtacaagctggagcaggtgtctgagaagggcaaggcttacaccaactacttcggacggtgcaatgtggccgagcacgaaaagctgatcctgctggcccagctgaagcccgagaaggatagcgacgaagccgtgacatatagcctgggaaagtttgggcagagggccctggatttctacagcattcatgtgaccaaggagtccacccaccccgtgaagcccctggcccagatcgccggaaacagatacgcctccggacctgtgggaaaggccctgagcgacgcatgtatgggcacaatcgcctccttcctgtctaagtaccaggacatcatcatcgaacaccagaaggtggtgaagggcaaccagaagagactggagagcctgcgggagctggccggcaaggaaaacctggaataccctagcgtgaccctgccacctcagcctcacaccaaggagggcgttgatgcctacaacgaagtgatcgcccgggtgcgaatgtgggtgaacctgaacctgtggcagaagctgaagctaagcagagatgatgccaagcctctgctgagactgaagggattcccttcctttcctctggtcgagagacaggccaacgaagtggactggtgggacatggtgtgtaacgtgaagaagctgatcaacgagaaaaaggaggatggcaaggtgttttggcagaatctggctggctacaagagacaggaagccctgagaccatacctgagcagcgaggaagatcggaagaagggaaagaaattcgctcggtaccagctgggcgacctgctgctgcacctggaaaagaagcacggcgaggactggggaaaggtgtacgacgaggcctgggagcggattgacaagaaagtggaaggcctgagcaagcacatcaagctggaagaggaacggagaagcgaggacgcccagagcaaggccgccctgaccgactggctgcgggctaaggccagcttcgtgatcgagggcctgaaggaggccgacaaggacgagttctgcagatgcgagctgaagctgcagaagtggtacggggacctgcggggaaagcccttcgccatcgaagccgagaacagcatcctggacatcagcggcttcagcaagcagtacaactgtgccttcatctggcagaaggacggcgtgaagaagctgaacctgtacctgatcatcaactacttcaagggcggcaagctgcggttcaagaagatcaaacctgaagccttcgaagccaacagattctacaccgtgatcaacaaaaagagcggcgagatcgtgcccatggaggtgaacttcaacttcgacgaccccaacctgatcatcctgcctctggcctttggcaagagacagggcagagaattcatctggaacgacctgctgtccctggaaaccggcagcctgaagctggccaacggaagagtgatcgagaagacactgtacaacagaagaacccggcaggatgagcctgccctgttcgtggccctgaccttcgagcggcgggaggtcctggactcctccaatatcaaaccaatgaacctgatcggcgtggcaagaggcgaaaacatccccgccgtgatcgccctgaccgaccccgagggctgcccactgagccggtttaaggatagcctgggaaacccaacccacatcctgagaatcggcgagagctataaggagaagcagcggaccatccaggccaagaaggaggtggagcagcggagagccggcggctacagccggaagtacgccagcaaagccaagaatctggcagacgatatggtgagaaacaccgctagagatctgctgtactacgccgtgacccaggatgccatgctgatcttcgccaacctgagccggggcttcggccggcagggcaagcggaccttcatggccgagagacagtacacacggatggaggactggctgaccgccaagctggcctacgagggcctgagcaagacctacctgtccaagacactggcccagtacacctccaagacatgcagcaactgtgggtttaccatcaccagcgccgactacgacagggtgctggagaagctgaagaagacagcaacaggctggatgaccacaattaacggcaaggagctgaaggtggagggccagattacctactacaacagatacaagagacagaacgtagtcaaggacctgtccgtcgagctggatagactgagcgaagaatctgtgaacaacgacatctcctcctggacaaagggcagaagcggagaagctctgagcctcctgaagaaaagattctcccatagacccgtgcaggagaagttcgtgtgcctgaactgcggcttcgagacacacgcagccgagcaagccgccctgaacatcgccagatcctggctgttcctgcggagccaggagtacaagaaataccagacaaacaagacaaccggcaacaccgataagagagccttcgtcgagacctggcagtccttttaccggaagaagcttaaggaggtgtggaaacctgccgtgcggtctggcggatctggcggaggctccaccagccccaagaaaaagagaaaagtctaagctgccttctgcggggcttgccttctggccatgcccttcttctctcccttgcacctgtacctcttggtctttgaataaagcctgagtaggaaggctagcaaaaaaaaaaaaaaaaaaaaaaaaaaaaaaaaaaaaaaaaaaaaaaaaaaaaaaaaaaaaaaaaaaaaaaaaaaaaaaaa

SEQ ID NO: 12798 - RNA, 5785 nt, synthetic construct
  source 1..5785: mol_type = other RNA
aggaaataagagagaaaagaagagtaagaagaaatataagagccaccatggcccctaagaagaagcgtaaagtgagccggatggaacgcctcgtctacgaggtgcggcagaagtgcagaaacatcgaggacatctgcatctcctgcggatctctgaacgtgaccctggagcacccactgttcatcggcggcatgtgccagaactgtaaaaactgttttctggagtgtgcctatcaatacgacgatgacggctaccagagctactgcaccatctgttgcggcggaagagaggtgctgatgtgtggaaataacaactgctgccggtgcttctgcgtggaatgcgtggacctgctggtgggccccggcgccgcccaggccgctattaaggaagatccttggaactgctacatgtgcggccacaagggcacatacggcctgctgagacggagagaggactggcctagcagactgcagatgttcttcgccaataaccacgaccaggagttcgacccccctaaggtgtaccctcccgtccccgccgagaagagaaagcccatccgggtcctgagcctgttcgatggcatcgccaccggtctgctggtgctgaaggacctgggcatccaggtggataggtacattgcctccgaggtgtgcgaggactccatcaccgtgggaatggtgcgtcatcagggcaagatcatgtacgtgggcgacgtgcggagcgtgacacagaagcatatccaggagtggggccctttcgacctggtgatcggcggcagcccttgcaatgacctgagcatcgtgaacccagcccggaagggcctgtacgagggaaccggcagactgttcttcgagttttacagactgctgcacgacgcccggcctaaggaaggcgacgaccggcccttcttttggctgttcgagaatgtggtggccatgggagtcagcgacaagcgggatattagccggttcctggagagcaaccccgtgatgatcgatgccaaggaagtgagcgccgcccaccgggccagatacttctggggcaatctgcctggcatgaacagacccctggccagcaccgtgaacgacaagctggagctgcaggagtgcctggagcacggccggatcgccaagttcagcaaggtgagaaccatcaccacccgaagcaacagcatcaaacaaggcaaggaccagcactttcctgtgttcatgaacgagaaggaggacatcctgtggtgtaccgagatggagagagtgttcgggttcccagtccactacacagatgtcagcaacatgtctagactggccagacagagactgctgggaagaagctggtccgtccctgtgatcagacacctgttcgcccctctgaaggagtacttcgcctgcgtgagcagcggcaacagcaacgccaacagccggggccccagcttctctagcggcctggtgccactgtccctgagagggagccacatgggccccatggagatctacaaaaccgtgagcgcctggaagcggcagcctgtgcgcgtgctgagcctgtttcggaatatcgataaagtcctgaaaagcctgggattcctggagagcggctctggctccggcggtggcaccctgaagtacgtggaggatgtgacaaacgtggtcagacgggatgtggagaagtggggccccttcgatctggtgtacggcagcacccaacccctgggcagctcttgtgaccggtgccctggctggtacatgtttcagttccaccggatcctgcagtacgccctgccgagacaggagtcccagcggccattcttttggattttcatggacaacttgctgctgaccgaggatgaccaggaaactaccactcggttcctgcagaccgaagccgtgaccctgcaggacgtgagaggccgggactaccagaacgccatgcgggtgtggtccaacatccctggactgaaaagcaagcacgcacctctgacccctaaagaagaggagtacctgcaggcccaggtgcggagcagaagcaagctggacgcccctaaggtggatctgctggtgaagaattgcctcctgcccctgagagagtacttcaagtatttcagccagaatagtctgcccctgggaggcagcggcggcggcccccaggacagcgtgaccttcgaggaggtggccgtgagcttcagcagggaggagtgggccctgctgaccgactggcagaagaacctgtacaaggacgtgatgagggacaactacgagatgctgaacagcctggacctggccgcccacaagcccgacatcatcctgaggatcgagaggggccaggagccctgcgtgggcaggctgcagaggagcaaggccagggagaggcccaaccacgtgttcggcggcccaagcagcggcgcccctcctcccagcggcggcagcccagccggctccccaacctctaccgaggagggcacctctgagtccgccacccccgagagcggccctggcacctccaccgagcccagcgagggcagcgcacccggcagccctgccggcagccccacctccacagaggagggaaccagcaccgagcccagcgaaggcagcgccccaggcaccagcaccgagcctagtgagcaggagattaaacggatcaacaagatcagaagaagacttgtgaaagacagcaacaccaagaaggccggcaagacaggccccatgaaaaccctgctggttagagtgatgacacccgatctgagagagcggctggaaaacctgagaaagaagcctgaaaatatcccccagcccatcagcaatacatctagagccaacctgaataagctgctgaccgattacaccgaaatgaagaaggcgatcctgcatgtgtactgggaagagttccagaaggaccctgtgggcctgatgagccgggtggcccagcctgccagcaagaagatcgatcagaacaagctgaaacctgagatggacgagaagggcaacctgaccaccgccggctttgcctgctctcagtgtggccagcccctgttcgtgtacaagctggagcaggtgtctgagaagggcaaggcttacaccaactacttcggacggtgcaatgtggccgagcacgaaaagctgatcctgctggcccagctgaagcccgagaaggatagcgacgaagccgtgacatatagcctgggaaagtttgggcagagggccctggatttctacagcattcatgtgaccaaggagtccacccaccccgtgaagcccctggcccagatcgccggaaacagatacgcctccggacctgtgggaaaggccctgagcgacgcatgtatgggcacaatcgcctccttcctgtctaagtaccaggacatcatcatcgaacaccagaaggtggtgaagggcaaccagaagagactggagagcctgcgggagctggccggcaaggaaaacctggaataccctagcgtgaccctgccacctcagcctcacaccaaggagggcgttgatgcctacaacgaagtgatcgcccgggtgcgaatgtgggtgaacctgaacctgtggcagaagctgaagctaagcagagatgatgccaagcctctgctgagactgaagggattcccttcctttcctctggtcgagagacaggccaacgaagtggactggtgggacatggtgtgtaacgtgaagaagctgatcaacgagaaaaaggaggatggcaaggtgttttggcagaatctggctggctacaagagacaggaagccctgagaccatacctgagcagcgaggaagatcggaagaagggaaagaaattcgctcggtaccagctgggcgacctgctgctgcacctggaaaagaagcacggcgaggactggggaaaggtgtacgacgaggcctgggagcggattgacaagaaagtggaaggcctgagcaagcacatcaagctggaagaggaacggagaagcgaggacgcccagagcaaggccgccctgaccgactggctgcgggctaaggccagcttcgtgatcgagggcctgaaggaggccgacaaggacgagttctgcagatgcgagctgaagctgcagaagtggtacggggacctgcggggaaagcccttcgccatcgaagccgagaacagcatcctggacatcagcggcttcagcaagcagtacaactgtgccttcatctggcagaaggacggcgtgaagaagctgaacctgtacctgatcatcaactacttcaagggcggcaagctgcggttcaagaagatcaaacctgaagccttcgaagccaacagattctacaccgtgatcaacaaaaagagcggcgagatcgtgcccatggaggtgaacttcaacttcgacgaccccaacctgatcatcctgcctctggcctttggcaagagacagggcagagaattcatctggaacgacctgctgtccctggaaaccggcagcctgaagctggccaacggaagagtgatcgagaagacactgtacaacagaagaacccggcaggatgagcctgccctgttcgtggccctgaccttcgagcggcgggaggtcctggactcctccaatatcaaaccaatgaacctgatcggcgtggcaagaggcgaaaacatccccgccgtgatcgccctgaccgaccccgagggctgcccactgagccggtttaaggatagcctgggaaacccaacccacatcctgagaatcggcgagagctataaggagaagcagcggaccatccaggccaagaaggaggtggagcagcggagagccggcggctacagccggaagtacgccagcaaagccaagaatctggcagacgatatggtgagaaacaccgctagagatctgctgtactacgccgtgacccaggatgccatgctgatcttcgccaacctgagccggggcttcggccggcagggcaagcggaccttcatggccgagagacagtacacacggatggaggactggctgaccgccaagctggcctacgagggcctgagcaagacctacctgtccaagacactggcccagtacacctccaagacatgcagcaactgtgggtttaccatcaccagcgccgactacgacagggtgctggagaagctgaagaagacagcaacaggctggatgaccacaattaacggcaaggagctgaaggtggagggccagattacctactacaacagatacaagagacagaacgtagtcaaggacctgtccgtcgagctggatagactgagcgaagaatctgtgaacaacgacatctcctcctggacaaagggcagaagcggagaagctctgagcctcctgaagaaaagattctcccatagacccgtgcaggagaagttcgtgtgcctgaactgcggcttcgagacacacgcagccgagcaagccgccctgaacatcgccagatcctggctgttcctgcggagccaggagtacaagaaataccagacaaacaagacaaccggcaacaccgataagagagccttcgtcgagacctggcagtccttttaccggaagaagcttaaggaggtgtggaaacctgccgtgcggtctggcggatctggcggaggctccaccagccccaagaaaaagagaaaagtctaagctgccttctgcggggcttgccttctggccatgcccttcttctctcccttgcacctgtacctcttggtctttgaataaagcctgagtaggaaggctagcaaaaaaaaaaaaaaaaaaaaaaaaaaaaaaaaaaaaaaaaaaaaaaaaaaaaaaaaaaaaaaaaaaaaaaaaaaaaaaaa

SEQ ID NO: 12799 - RNA, 5785 nt, synthetic construct
  source 1..5785: mol_type = other RNA
aggaaataagagagaaaagaagagtaagaagaaatataagagccaccatggcccctaagaagaagcgtaaagtgagccggatggaacgcctcgtctacgaggtgcggcagaagtgcagaaacatcgaggacatctgcatctcctgcggatctctgaacgtgaccctggagcacccactgttcatcggcggcatgtgccagaactgtaaaaactgttttctggagtgtgcctatcaatacgacgatgacggctaccagagctactgcaccatctgttgcggcggaagagaggtgctgatgtgtggaaataacaactgctgccggtgcttctgcgtggaatgcgtggacctgctggtgggccccggcgccgcccaggccgctattaaggaagatccttggaactgctacatgtgcggccacaagggcacatacggcctgctgagacggagagaggactggcctagcagactgcagatgttcttcgccaataaccacgaccaggagttcgacccccctaaggtgtaccctcccgtccccgccgagaagagaaagcccatccgggtcctgagcctgttcgatggcatcgccaccggtctgctggtgctgaaggacctgggcatccaggtggataggtacattgcctccgaggtgtgcgaggactccatcaccgtgggaatggtgcgtcatcagggcaagatcatgtacgtgggcgacgtgcggagcgtgacacagaagcatatccaggagtggggccctttcgacctggtgatcggcggcagcccttgcaatgacctgagcatcgtgaacccagcccggaagggcctgtacgagggaaccggcagactgttcttcgagttttacagactgctgcacgacgcccggcctaaggaaggcgacgaccggcccttcttttggctgttcgagaatgtggtggccatgggagtcagcgacaagcgggatattagccggttcctggagagcaaccccgtgatgatcgatgccaaggaagtgagcgccgcccaccgggccagatacttctggggcaatctgcctggcatgaacagacccctggccagcaccgtgaacgacaagctggagctgcaggagtgcctggagcacggccggatcgccaagttcagcaaggtgagaaccatcaccacccgaagcaacagcatcaaacaaggcaaggaccagcactttcctgtgttcatgaacgagaaggaggacatcctgtggtgtaccgagatggagagagtgttcgggttcccagtccactacacagatgtcagcaacatgtctagactggccagacagagactgctgggaagaagctggtccgtccctgtgatcagacacctgttcgcccctctgaaggagtacttcgcctgcgtgagcagcggcaacagcaacgccaacagccggggccccagcttctctagcggcctggtgccactgtccctgagagggagccacatgggccccatggagatctacaaaaccgtgagcgcctggaagcggcagcctgtgcgcgtgctgagcctgtttcggaatatcgataaagtcctgaaaagcctgggattcctggagagcggctctggctccggcggtggcaccctgaagtacgtggaggatgtgacaaacgtggtcagacgggatgtggagaagtggggccccttcgatctggtgtacggcagcacccaacccctgggcagctcttgtgaccggtgccctggctggtacatgtttcagttccaccggatcctgcagtacgccctgccgagacaggagtcccagcggccattcttttggattttcatggacaacttgctgctgaccgaggatgaccaggaaactaccactcggttcctgcagaccgaagccgtgaccctgcaggacgtgagaggccgggactaccagaacgccatgcgggtgtggtccaacatccctggactgaaaagcaagcacgcacctctgacccctaaagaagaggagtacctgcaggcccaggtgcggagcagaagcaagctggacgcccctaaggtggatctgctggtgaagaattgcctcctgcccctgagagagtacttcaagtatttcagccagaatagtctgcccctgggaggcagcggcggcggcaggatgaagagcgtgaccttcgaggacgtggccgtgtacttcacccagaccgagtgggacagcctgagcaccgcccagagggccctgtacagggacgtgatgctggagaactacggcaacgtggccagcctgggcttccccctgctgaagcccgccgtgatcagccagctggagggcggcggcgagctggagggccccagccccctggccagcggcgccggcaccggcccccagggcctgtggggcggcccaagcagcggcgcccctcctcccagcggcggcagcccagccggctccccaacctctaccgaggagggcacctctgagtccgccacccccgagagcggccctggcacctccaccgagcccagcgagggcagcgcacccggcagccctgccggcagccccacctccacagaggagggaaccagcaccgagcccagcgaaggcagcgccccaggcaccagcaccgagcctagtgagcaggagattaaacggatcaacaagatcagaagaagacttgtgaaagacagcaacaccaagaaggccggcaagacaggccccatgaaaaccctgctggttagagtgatgacacccgatctgagagagcggctggaaaacctgagaaagaagcctgaaaatatcccccagcccatcagcaatacatctagagccaacctgaataagctgctgaccgattacaccgaaatgaagaaggcgatcctgcatgtgtactgggaagagttccagaaggaccctgtgggcctgatgagccgggtggcccagcctgccagcaagaagatcgatcagaacaagctgaaacctgagatggacgagaagggcaacctgaccaccgccggctttgcctgctctcagtgtggccagcccctgttcgtgtacaagctggagcaggtgtctgagaagggcaaggcttacaccaactacttcggacggtgcaatgtggccgagcacgaaaagctgatcctgctggcccagctgaagcccgagaaggatagcgacgaagccgtgacatatagcctgggaaagtttgggcagagggccctggatttctacagcattcatgtgaccaaggagtccacccaccccgtgaagcccctggcccagatcgccggaaacagatacgcctccggacctgtgggaaaggccctgagcgacgcatgtatgggcacaatcgcctccttcctgtctaagtaccaggacatcatcatcgaacaccagaaggtggtgaagggcaaccagaagagactggagagcctgcgggagctggccggcaaggaaaacctggaataccctagcgtgaccctgccacctcagcctcacaccaaggagggcgttgatgcctacaacgaagtgatcgcccgggtgcgaatgtgggtgaacctgaacctgtggcagaagctgaagctaagcagagatgatgccaagcctctgctgagactgaagggattcccttcctttcctctggtcgagagacaggccaacgaagtggactggtgggacatggtgtgtaacgtgaagaagctgatcaacgagaaaaaggaggatggcaaggtgttttggcagaatctggctggctacaagagacaggaagccctgagaccatacctgagcagcgaggaagatcggaagaagggaaagaaattcgctcggtaccagctgggcgacctgctgctgcacctggaaaagaagcacggcgaggactggggaaaggtgtacgacgaggcctgggagcggattgacaagaaagtggaaggcctgagcaagcacatcaagctggaagaggaacggagaagcgaggacgcccagagcaaggccgccctgaccgactggctgcgggctaaggccagcttcgtgatcgagggcctgaaggaggccgacaaggacgagttctgcagatgcgagctgaagctgcagaagtggtacggggacctgcggggaaagcccttcgccatcgaagccgagaacagcatcctggacatcagcggcttcagcaagcagtacaactgtgccttcatctggcagaaggacggcgtgaagaagctgaacctgtacctgatcatcaactacttcaagggcggcaagctgcggttcaagaagatcaaacctgaagccttcgaagccaacagattctacaccgtgatcaacaaaaagagcggcgagatcgtgcccatggaggtgaacttcaacttcgacgaccccaacctgatcatcctgcctctggcctttggcaagagacagggcagagaattcatctggaacgacctgctgtccctggaaaccggcagcctgaagctggccaacggaagagtgatcgagaagacactgtacaacagaagaacccggcaggatgagcctgccctgttcgtggccctgaccttcgagcggcgggaggtcctggactcctccaatatcaaaccaatgaacctgatcggcgtggcaagaggcgaaaacatccccgccgtgatcgccctgaccgaccccgagggctgcccactgagccggtttaaggatagcctgggaaacccaacccacatcctgagaatcggcgagagctataaggagaagcagcggaccatccaggccaagaaggaggtggagcagcggagagccggcggctacagccggaagtacgccagcaaagccaagaatctggcagacgatatggtgagaaacaccgctagagatctgctgtactacgccgtgacccaggatgccatgctgatcttcgccaacctgagccggggcttcggccggcagggcaagcggaccttcatggccgagagacagtacacacggatggaggactggctgaccgccaagctggcctacgagggcctgagcaagacctacctgtccaagacactggcccagtacacctccaagacatgcagcaactgtgggtttaccatcaccagcgccgactacgacagggtgctggagaagctgaagaagacagcaacaggctggatgaccacaattaacggcaaggagctgaaggtggagggccagattacctactacaacagatacaagagacagaacgtagtcaaggacctgtccgtcgagctggatagactgagcgaagaatctgtgaacaacgacatctcctcctggacaaagggcagaagcggagaagctctgagcctcctgaagaaaagattctcccatagacccgtgcaggagaagttcgtgtgcctgaactgcggcttcgagacacacgcagccgagcaagccgccctgaacatcgccagatcctggctgttcctgcggagccaggagtacaagaaataccagacaaacaagacaaccggcaacaccgataagagagccttcgtcgagacctggcagtccttttaccggaagaagcttaaggaggtgtggaaacctgccgtgcggtctggcggatctggcggaggctccaccagccccaagaaaaagagaaaagtctaagctgccttctgcggggcttgccttctggccatgcccttcttctctcccttgcacctgtacctcttggtctttgaataaagcctgagtaggaaggctagcaaaaaaaaaaaaaaaaaaaaaaaaaaaaaaaaaaaaaaaaaaaaaaaaaaaaaaaaaaaaaaaaaaaaaaaaaaaaaaaa

SEQ ID NO: 12800 - RNA, 5785 nt, synthetic construct
  source 1..5785: mol_type = other RNA
aggaaataagagagaaaagaagagtaagaagaaatataagagccaccatggcccctaagaagaagcgtaaagtgagccggatggaacgcctcgtctacgaggtgcggcagaagtgcagaaacatcgaggacatctgcatctcctgcggatctctgaacgtgaccctggagcacccactgttcatcggcggcatgtgccagaactgtaaaaactgttttctggagtgtgcctatcaatacgacgatgacggctaccagagctactgcaccatctgttgcggcggaagagaggtgctgatgtgtggaaataacaactgctgccggtgcttctgcgtggaatgcgtggacctgctggtgggccccggcgccgcccaggccgctattaaggaagatccttggaactgctacatgtgcggccacaagggcacatacggcctgctgagacggagagaggactggcctagcagactgcagatgttcttcgccaataaccacgaccaggagttcgacccccctaaggtgtaccctcccgtccccgccgagaagagaaagcccatccgggtcctgagcctgttcgatggcatcgccaccggtctgctggtgctgaaggacctgggcatccaggtggataggtacattgcctccgaggtgtgcgaggactccatcaccgtgggaatggtgcgtcatcagggcaagatcatgtacgtgggcgacgtgcggagcgtgacacagaagcatatccaggagtggggccctttcgacctggtgatcggcggcagcccttgcaatgacctgagcatcgtgaacccagcccggaagggcctgtacgagggaaccggcagactgttcttcgagttttacagactgctgcacgacgcccggcctaaggaaggcgacgaccggcccttcttttggctgttcgagaatgtggtggccatgggagtcagcgacaagcgggatattagccggttcctggagagcaaccccgtgatgatcgatgccaaggaagtgagcgccgcccaccgggccagatacttctggggcaatctgcctggcatgaacagacccctggccagcaccgtgaacgacaagctggagctgcaggagtgcctggagcacggccggatcgccaagttcagcaaggtgagaaccatcaccacccgaagcaacagcatcaaacaaggcaaggaccagcactttcctgtgttcatgaacgagaaggaggacatcctgtggtgtaccgagatggagagagtgttcgggttcccagtccactacacagatgtcagcaacatgtctagactggccagacagagactgctgggaagaagctggtccgtccctgtgatcagacacctgttcgcccctctgaaggagtacttcgcctgcgtgagcagcggcaacagcaacgccaacagccggggccccagcttctctagcggcctggtgccactgtccctgagagggagccacatgggccccatggagatctacaaaaccgtgagcgcctggaagcggcagcctgtgcgcgtgctgagcctgtttcggaatatcgataaagtcctgaaaagcctgggattcctggagagcggctctggctccggcggtggcaccctgaagtacgtggaggatgtgacaaacgtggtcagacgggatgtggagaagtggggccccttcgatctggtgtacggcagcacccaacccctgggcagctcttgtgaccggtgccctggctggtacatgtttcagttccaccggatcctgcagtacgccctgccgagacaggagtcccagcggccattcttttggattttcatggacaacttgctgctgaccgaggatgaccaggaaactaccactcggttcctgcagaccgaagccgtgaccctgcaggacgtgagaggccgggactaccagaacgccatgcgggtgtggtccaacatccctggactgaaaagcaagcacgcacctctgacccctaaagaagaggagtacctgcaggcccaggtgcggagcagaagcaagctggacgcccctaaggtggatctgctggtgaagaattgcctcctgcccctgagagagtacttcaagtatttcagccagaatagtctgcccctgggaggcagcggcggcggcatccagggcagcctgaccttcaaggacgtggccgtggacttcacccaggaggagtggtgcctgctggaccacagccagaaggagctgtacctggaggtgatgctggagaacgtgcagaacctgctgagcgtgggcctgcccgtgcccagggagtactgcaccagctacttccagcaggagaaggccaggtggctgctggagcagaagtgccccaggagcagcagccccgaggccgagaccaacggcggcccaagcagcggcgcccctcctcccagcggcggcagcccagccggctccccaacctctaccgaggagggcacctctgagtccgccacccccgagagcggccctggcacctccaccgagcccagcgagggcagcgcacccggcagccctgccggcagccccacctccacagaggagggaaccagcaccgagcccagcgaaggcagcgccccaggcaccagcaccgagcctagtgagcaggagattaaacggatcaacaagatcagaagaagacttgtgaaagacagcaacaccaagaaggccggcaagacaggccccatgaaaaccctgctggttagagtgatgacacccgatctgagagagcggctggaaaacctgagaaagaagcctgaaaatatcccccagcccatcagcaatacatctagagccaacctgaataagctgctgaccgattacaccgaaatgaagaaggcgatcctgcatgtgtactgggaagagttccagaaggaccctgtgggcctgatgagccgggtggcccagcctgccagcaagaagatcgatcagaacaagctgaaacctgagatggacgagaagggcaacctgaccaccgccggctttgcctgctctcagtgtggccagcccctgttcgtgtacaagctggagcaggtgtctgagaagggcaaggcttacaccaactacttcggacggtgcaatgtggccgagcacgaaaagctgatcctgctggcccagctgaagcccgagaaggatagcgacgaagccgtgacatatagcctgggaaagtttgggcagagggccctggatttctacagcattcatgtgaccaaggagtccacccaccccgtgaagcccctggcccagatcgccggaaacagatacgcctccggacctgtgggaaaggccctgagcgacgcatgtatgggcacaatcgcctccttcctgtctaagtaccaggacatcatcatcgaacaccagaaggtggtgaagggcaaccagaagagactggagagcctgcgggagctggccggcaaggaaaacctggaataccctagcgtgaccctgccacctcagcctcacaccaaggagggcgttgatgcctacaacgaagtgatcgcccgggtgcgaatgtgggtgaacctgaacctgtggcagaagctgaagctaagcagagatgatgccaagcctctgctgagactgaagggattcccttcctttcctctggtcgagagacaggccaacgaagtggactggtgggacatggtgtgtaacgtgaagaagctgatcaacgagaaaaaggaggatggcaaggtgttttggcagaatctggctggctacaagagacaggaagccctgagaccatacctgagcagcgaggaagatcggaagaagggaaagaaattcgctcggtaccagctgggcgacctgctgctgcacctggaaaagaagcacggcgaggactggggaaaggtgtacgacgaggcctgggagcggattgacaagaaagtggaaggcctgagcaagcacatcaagctggaagaggaacggagaagcgaggacgcccagagcaaggccgccctgaccgactggctgcgggctaaggccagcttcgtgatcgagggcctgaaggaggccgacaaggacgagttctgcagatgcgagctgaagctgcagaagtggtacggggacctgcggggaaagcccttcgccatcgaagccgagaacagcatcctggacatcagcggcttcagcaagcagtacaactgtgccttcatctggcagaaggacggcgtgaagaagctgaacctgtacctgatcatcaactacttcaagggcggcaagctgcggttcaagaagatcaaacctgaagccttcgaagccaacagattctacaccgtgatcaacaaaaagagcggcgagatcgtgcccatggaggtgaacttcaacttcgacgaccccaacctgatcatcctgcctctggcctttggcaagagacagggcagagaattcatctggaacgacctgctgtccctggaaaccggcagcctgaagctggccaacggaagagtgatcgagaagacactgtacaacagaagaacccggcaggatgagcctgccctgttcgtggccctgaccttcgagcggcgggaggtcctggactcctccaatatcaaaccaatgaacctgatcggcgtggcaagaggcgaaaacatccccgccgtgatcgccctgaccgaccccgagggctgcccactgagccggtttaaggatagcctgggaaacccaacccacatcctgagaatcggcgagagctataaggagaagcagcggaccatccaggccaagaaggaggtggagcagcggagagccggcggctacagccggaagtacgccagcaaagccaagaatctggcagacgatatggtgagaaacaccgctagagatctgctgtactacgccgtgacccaggatgccatgctgatcttcgccaacctgagccggggcttcggccggcagggcaagcggaccttcatggccgagagacagtacacacggatggaggactggctgaccgccaagctggcctacgagggcctgagcaagacctacctgtccaagacactggcccagtacacctccaagacatgcagcaactgtgggtttaccatcaccagcgccgactacgacagggtgctggagaagctgaagaagacagcaacaggctggatgaccacaattaacggcaaggagctgaaggtggagggccagattacctactacaacagatacaagagacagaacgtagtcaaggacctgtccgtcgagctggatagactgagcgaagaatctgtgaacaacgacatctcctcctggacaaagggcagaagcggagaagctctgagcctcctgaagaaaagattctcccatagacccgtgcaggagaagttcgtgtgcctgaactgcggcttcgagacacacgcagccgagcaagccgccctgaacatcgccagatcctggctgttcctgcggagccaggagtacaagaaataccagacaaacaagacaaccggcaacaccgataagagagccttcgtcgagacctggcagtccttttaccggaagaagcttaaggaggtgtggaaacctgccgtgcggtctggcggatctggcggaggctccaccagccccaagaaaaagagaaaagtctaagctgccttctgcggggcttgccttctggccatgcccttcttctctcccttgcacctgtacctcttggtctttgaataaagcctgagtaggaaggctagcaaaaaaaaaaaaaaaaaaaaaaaaaaaaaaaaaaaaaaaaaaaaaaaaaaaaaaaaaaaaaaaaaaaaaaaaaaaaaaaa

SEQ ID NO: 12801 - RNA, 5785 nt, synthetic construct
  source 1..5785: mol_type = other RNA
aggaaataagagagaaaagaagagtaagaagaaatataagagccaccatggcccctaagaagaagcgtaaagtgagccggatggaacgcctcgtctacgaggtgcggcagaagtgcagaaacatcgaggacatctgcatctcctgcggatctctgaacgtgaccctggagcacccactgttcatcggcggcatgtgccagaactgtaaaaactgttttctggagtgtgcctatcaatacgacgatgacggctaccagagctactgcaccatctgttgcggcggaagagaggtgctgatgtgtggaaataacaactgctgccggtgcttctgcgtggaatgcgtggacctgctggtgggccccggcgccgcccaggccgctattaaggaagatccttggaactgctacatgtgcggccacaagggcacatacggcctgctgagacggagagaggactggcctagcagactgcagatgttcttcgccaataaccacgaccaggagttcgacccccctaaggtgtaccctcccgtccccgccgagaagagaaagcccatccgggtcctgagcctgttcgatggcatcgccaccggtctgctggtgctgaaggacctgggcatccaggtggataggtacattgcctccgaggtgtgcgaggactccatcaccgtgggaatggtgcgtcatcagggcaagatcatgtacgtgggcgacgtgcggagcgtgacacagaagcatatccaggagtggggccctttcgacctggtgatcggcggcagcccttgcaatgacctgagcatcgtgaacccagcccggaagggcctgtacgagggaaccggcagactgttcttcgagttttacagactgctgcacgacgcccggcctaaggaaggcgacgaccggcccttcttttggctgttcgagaatgtggtggccatgggagtcagcgacaagcgggatattagccggttcctggagagcaaccccgtgatgatcgatgccaaggaagtgagcgccgcccaccgggccagatacttctggggcaatctgcctggcatgaacagacccctggccagcaccgtgaacgacaagctggagctgcaggagtgcctggagcacggccggatcgccaagttcagcaaggtgagaaccatcaccacccgaagcaacagcatcaaacaaggcaaggaccagcactttcctgtgttcatgaacgagaaggaggacatcctgtggtgtaccgagatggagagagtgttcgggttcccagtccactacacagatgtcagcaacatgtctagactggccagacagagactgctgggaagaagctggtccgtccctgtgatcagacacctgttcgcccctctgaaggagtacttcgcctgcgtgagcagcggcaacagcaacgccaacagccggggccccagcttctctagcggcctggtgccactgtccctgagagggagccacatgggccccatggagatctacaaaaccgtgagcgcctggaagcggcagcctgtgcgcgtgctgagcctgtttcggaatatcgataaagtcctgaaaagcctgggattcctggagagcggctctggctccggcggtggcaccctgaagtacgtggaggatgtgacaaacgtggtcagacgggatgtggagaagtggggccccttcgatctggtgtacggcagcacccaacccctgggcagctcttgtgaccggtgccctggctggtacatgtttcagttccaccggatcctgcagtacgccctgccgagacaggagtcccagcggccattcttttggattttcatggacaacttgctgctgaccgaggatgaccaggaaactaccactcggttcctgcagaccgaagccgtgaccctgcaggacgtgagaggccgggactaccagaacgccatgcgggtgtggtccaacatccctggactgaaaagcaagcacgcacctctgacccctaaagaagaggagtacctgcaggcccaggtgcggagcagaagcaagctggacgcccctaaggtggatctgctggtgaagaattgcctcctgcccctgagagagtacttcaagtatttcagccagaatagtctgcccctgggaggcagcggcggcggcggcaccgtggtgttcagcgacgtgagcgtggacttcagccaggaggagtgggagtgcctggaccccgtgcagagggacctgtacagggaggtgatgctggagaactacagcaacctggtgagcgtgggcgccggcccctacatccccaagccccaggtgatcagcctgctggagcagggcaaggagccctggatggtgggcagggagctgaccaggggcctgtgcagcgacctggagagcatgggcggcccaagcagcggcgcccctcctcccagcggcggcagcccagccggctccccaacctctaccgaggagggcacctctgagtccgccacccccgagagcggccctggcacctccaccgagcccagcgagggcagcgcacccggcagccctgccggcagccccacctccacagaggagggaaccagcaccgagcccagcgaaggcagcgccccaggcaccagcaccgagcctagtgagcaggagattaaacggatcaacaagatcagaagaagacttgtgaaagacagcaacaccaagaaggccggcaagacaggccccatgaaaaccctgctggttagagtgatgacacccgatctgagagagcggctggaaaacctgagaaagaagcctgaaaatatcccccagcccatcagcaatacatctagagccaacctgaataagctgctgaccgattacaccgaaatgaagaaggcgatcctgcatgtgtactgggaagagttccagaaggaccctgtgggcctgatgagccgggtggcccagcctgccagcaagaagatcgatcagaacaagctgaaacctgagatggacgagaagggcaacctgaccaccgccggctttgcctgctctcagtgtggccagcccctgttcgtgtacaagctggagcaggtgtctgagaagggcaaggcttacaccaactacttcggacggtgcaatgtggccgagcacgaaaagctgatcctgctggcccagctgaagcccgagaaggatagcgacgaagccgtgacatatagcctgggaaagtttgggcagagggccctggatttctacagcattcatgtgaccaaggagtccacccaccccgtgaagcccctggcccagatcgccggaaacagatacgcctccggacctgtgggaaaggccctgagcgacgcatgtatgggcacaatcgcctccttcctgtctaagtaccaggacatcatcatcgaacaccagaaggtggtgaagggcaaccagaagagactggagagcctgcgggagctggccggcaaggaaaacctggaataccctagcgtgaccctgccacctcagcctcacaccaaggagggcgttgatgcctacaacgaagtgatcgcccgggtgcgaatgtgggtgaacctgaacctgtggcagaagctgaagctaagcagagatgatgccaagcctctgctgagactgaagggattcccttcctttcctctggtcgagagacaggccaacgaagtggactggtgggacatggtgtgtaacgtgaagaagctgatcaacgagaaaaaggaggatggcaaggtgttttggcagaatctggctggctacaagagacaggaagccctgagaccatacctgagcagcgaggaagatcggaagaagggaaagaaattcgctcggtaccagctgggcgacctgctgctgcacctggaaaagaagcacggcgaggactggggaaaggtgtacgacgaggcctgggagcggattgacaagaaagtggaaggcctgagcaagcacatcaagctggaagaggaacggagaagcgaggacgcccagagcaaggccgccctgaccgactggctgcgggctaaggccagcttcgtgatcgagggcctgaaggaggccgacaaggacgagttctgcagatgcgagctgaagctgcagaagtggtacggggacctgcggggaaagcccttcgccatcgaagccgagaacagcatcctggacatcagcggcttcagcaagcagtacaactgtgccttcatctggcagaaggacggcgtgaagaagctgaacctgtacctgatcatcaactacttcaagggcggcaagctgcggttcaagaagatcaaacctgaagccttcgaagccaacagattctacaccgtgatcaacaaaaagagcggcgagatcgtgcccatggaggtgaacttcaacttcgacgaccccaacctgatcatcctgcctctggcctttggcaagagacagggcagagaattcatctggaacgacctgctgtccctggaaaccggcagcctgaagctggccaacggaagagtgatcgagaagacactgtacaacagaagaacccggcaggatgagcctgccctgttcgtggccctgaccttcgagcggcgggaggtcctggactcctccaatatcaaaccaatgaacctgatcggcgtggcaagaggcgaaaacatccccgccgtgatcgccctgaccgaccccgagggctgcccactgagccggtttaaggatagcctgggaaacccaacccacatcctgagaatcggcgagagctataaggagaagcagcggaccatccaggccaagaaggaggtggagcagcggagagccggcggctacagccggaagtacgccagcaaagccaagaatctggcagacgatatggtgagaaacaccgctagagatctgctgtactacgccgtgacccaggatgccatgctgatcttcgccaacctgagccggggcttcggccggcagggcaagcggaccttcatggccgagagacagtacacacggatggaggactggctgaccgccaagctggcctacgagggcctgagcaagacctacctgtccaagacactggcccagtacacctccaagacatgcagcaactgtgggtttaccatcaccagcgccgactacgacagggtgctggagaagctgaagaagacagcaacaggctggatgaccacaattaacggcaaggagctgaaggtggagggccagattacctactacaacagatacaagagacagaacgtagtcaaggacctgtccgtcgagctggatagactgagcgaagaatctgtgaacaacgacatctcctcctggacaaagggcagaagcggagaagctctgagcctcctgaagaaaagattctcccatagacccgtgcaggagaagttcgtgtgcctgaactgcggcttcgagacacacgcagccgagcaagccgccctgaacatcgccagatcctggctgttcctgcggagccaggagtacaagaaataccagacaaacaagacaaccggcaacaccgataagagagccttcgtcgagacctggcagtccttttaccggaagaagcttaaggaggtgtggaaacctgccgtgcggtctggcggatctggcggaggctccaccagccccaagaaaaagagaaaagtctaagctgccttctgcggggcttgccttctggccatgcccttcttctctcccttgcacctgtacctcttggtctttgaataaagcctgagtaggaaggctagcaaaaaaaaaaaaaaaaaaaaaaaaaaaaaaaaaaaaaaaaaaaaaaaaaaaaaaaaaaaaaaaaaaaaaaaaaaaaaaaa

SEQ ID NO: 12802 - RNA, 5785 nt, synthetic construct
  source 1..5785: mol_type = other RNA
aggaaataagagagaaaagaagagtaagaagaaatataagagccaccatggcccctaagaagaagcgtaaagtgagccggatggaacgcctcgtctacgaggtgcggcagaagtgcagaaacatcgaggacatctgcatctcctgcggatctctgaacgtgaccctggagcacccactgttcatcggcggcatgtgccagaactgtaaaaactgttttctggagtgtgcctatcaatacgacgatgacggctaccagagctactgcaccatctgttgcggcggaagagaggtgctgatgtgtggaaataacaactgctgccggtgcttctgcgtggaatgcgtggacctgctggtgggccccggcgccgcccaggccgctattaaggaagatccttggaactgctacatgtgcggccacaagggcacatacggcctgctgagacggagagaggactggcctagcagactgcagatgttcttcgccaataaccacgaccaggagttcgacccccctaaggtgtaccctcccgtccccgccgagaagagaaagcccatccgggtcctgagcctgttcgatggcatcgccaccggtctgctggtgctgaaggacctgggcatccaggtggataggtacattgcctccgaggtgtgcgaggactccatcaccgtgggaatggtgcgtcatcagggcaagatcatgtacgtgggcgacgtgcggagcgtgacacagaagcatatccaggagtggggccctttcgacctggtgatcggcggcagcccttgcaatgacctgagcatcgtgaacccagcccggaagggcctgtacgagggaaccggcagactgttcttcgagttttacagactgctgcacgacgcccggcctaaggaaggcgacgaccggcccttcttttggctgttcgagaatgtggtggccatgggagtcagcgacaagcgggatattagccggttcctggagagcaaccccgtgatgatcgatgccaaggaagtgagcgccgcccaccgggccagatacttctggggcaatctgcctggcatgaacagacccctggccagcaccgtgaacgacaagctggagctgcaggagtgcctggagcacggccggatcgccaagttcagcaaggtgagaaccatcaccacccgaagcaacagcatcaaacaaggcaaggaccagcactttcctgtgttcatgaacgagaaggaggacatcctgtggtgtaccgagatggagagagtgttcgggttcccagtccactacacagatgtcagcaacatgtctagactggccagacagagactgctgggaagaagctggtccgtccctgtgatcagacacctgttcgcccctctgaaggagtacttcgcctgcgtgagcagcggcaacagcaacgccaacagccggggccccagcttctctagcggcctggtgccactgtccctgagagggagccacatgggccccatggagatctacaaaaccgtgagcgcctggaagcggcagcctgtgcgcgtgctgagcctgtttcggaatatcgataaagtcctgaaaagcctgggattcctggagagcggctctggctccggcggtggcaccctgaagtacgtggaggatgtgacaaacgtggtcagacgggatgtggagaagtggggccccttcgatctggtgtacggcagcacccaacccctgggcagctcttgtgaccggtgccctggctggtacatgtttcagttccaccggatcctgcagtacgccctgccgagacaggagtcccagcggccattcttttggattttcatggacaacttgctgctgaccgaggatgaccaggaaactaccactcggttcctgcagaccgaagccgtgaccctgcaggacgtgagaggccgggactaccagaacgccatgcgggtgtggtccaacatccctggactgaaaagcaagcacgcacctctgacccctaaagaagaggagtacctgcaggcccaggtgcggagcagaagcaagctggacgcccctaaggtggatctgctggtgaagaattgcctcctgcccctgagagagtacttcaagtatttcagccagaatagtctgcccctgggaggcagcggcggcggcgagatgggcctgctgaccttcagggacatcgccatcgagttcagcctggaggagtggcagtgcctggactgcgcccagaggaacctgtacagggacgtgatgctggagaactacaggaacctggtgagcctgggcatcgccgtgagcaagcccgacctgatcacctgcctggagcagaacaaggagagccagaacatcaagaggaacgagatggtggccaagcaccccgtgaccaggagccacggcggcccaagcagcggcgcccctcctcccagcggcggcagcccagccggctccccaacctctaccgaggagggcacctctgagtccgccacccccgagagcggccctggcacctccaccgagcccagcgagggcagcgcacccggcagccctgccggcagccccacctccacagaggagggaaccagcaccgagcccagcgaaggcagcgccccaggcaccagcaccgagcctagtgagcaggagattaaacggatcaacaagatcagaagaagacttgtgaaagacagcaacaccaagaaggccggcaagacaggccccatgaaaaccctgctggttagagtgatgacacccgatctgagagagcggctggaaaacctgagaaagaagcctgaaaatatcccccagcccatcagcaatacatctagagccaacctgaataagctgctgaccgattacaccgaaatgaagaaggcgatcctgcatgtgtactgggaagagttccagaaggaccctgtgggcctgatgagccgggtggcccagcctgccagcaagaagatcgatcagaacaagctgaaacctgagatggacgagaagggcaacctgaccaccgccggctttgcctgctctcagtgtggccagcccctgttcgtgtacaagctggagcaggtgtctgagaagggcaaggcttacaccaactacttcggacggtgcaatgtggccgagcacgaaaagctgatcctgctggcccagctgaagcccgagaaggatagcgacgaagccgtgacatatagcctgggaaagtttgggcagagggccctggatttctacagcattcatgtgaccaaggagtccacccaccccgtgaagcccctggcccagatcgccggaaacagatacgcctccggacctgtgggaaaggccctgagcgacgcatgtatgggcacaatcgcctccttcctgtctaagtaccaggacatcatcatcgaacaccagaaggtggtgaagggcaaccagaagagactggagagcctgcgggagctggccggcaaggaaaacctggaataccctagcgtgaccctgccacctcagcctcacaccaaggagggcgttgatgcctacaacgaagtgatcgcccgggtgcgaatgtgggtgaacctgaacctgtggcagaagctgaagctaagcagagatgatgccaagcctctgctgagactgaagggattcccttcctttcctctggtcgagagacaggccaacgaagtggactggtgggacatggtgtgtaacgtgaagaagctgatcaacgagaaaaaggaggatggcaaggtgttttggcagaatctggctggctacaagagacaggaagccctgagaccatacctgagcagcgaggaagatcggaagaagggaaagaaattcgctcggtaccagctgggcgacctgctgctgcacctggaaaagaagcacggcgaggactggggaaaggtgtacgacgaggcctgggagcggattgacaagaaagtggaaggcctgagcaagcacatcaagctggaagaggaacggagaagcgaggacgcccagagcaaggccgccctgaccgactggctgcgggctaaggccagcttcgtgatcgagggcctgaaggaggccgacaaggacgagttctgcagatgcgagctgaagctgcagaagtggtacggggacctgcggggaaagcccttcgccatcgaagccgagaacagcatcctggacatcagcggcttcagcaagcagtacaactgtgccttcatctggcagaaggacggcgtgaagaagctgaacctgtacctgatcatcaactacttcaagggcggcaagctgcggttcaagaagatcaaacctgaagccttcgaagccaacagattctacaccgtgatcaacaaaaagagcggcgagatcgtgcccatggaggtgaacttcaacttcgacgaccccaacctgatcatcctgcctctggcctttggcaagagacagggcagagaattcatctggaacgacctgctgtccctggaaaccggcagcctgaagctggccaacggaagagtgatcgagaagacactgtacaacagaagaacccggcaggatgagcctgccctgttcgtggccctgaccttcgagcggcgggaggtcctggactcctccaatatcaaaccaatgaacctgatcggcgtggcaagaggcgaaaacatccccgccgtgatcgccctgaccgaccccgagggctgcccactgagccggtttaaggatagcctgggaaacccaacccacatcctgagaatcggcgagagctataaggagaagcagcggaccatccaggccaagaaggaggtggagcagcggagagccggcggctacagccggaagtacgccagcaaagccaagaatctggcagacgatatggtgagaaacaccgctagagatctgctgtactacgccgtgacccaggatgccatgctgatcttcgccaacctgagccggggcttcggccggcagggcaagcggaccttcatggccgagagacagtacacacggatggaggactggctgaccgccaagctggcctacgagggcctgagcaagacctacctgtccaagacactggcccagtacacctccaagacatgcagcaactgtgggtttaccatcaccagcgccgactacgacagggtgctggagaagctgaagaagacagcaacaggctggatgaccacaattaacggcaaggagctgaaggtggagggccagattacctactacaacagatacaagagacagaacgtagtcaaggacctgtccgtcgagctggatagactgagcgaagaatctgtgaacaacgacatctcctcctggacaaagggcagaagcggagaagctctgagcctcctgaagaaaagattctcccatagacccgtgcaggagaagttcgtgtgcctgaactgcggcttcgagacacacgcagccgagcaagccgccctgaacatcgccagatcctggctgttcctgcggagccaggagtacaagaaataccagacaaacaagacaaccggcaacaccgataagagagccttcgtcgagacctggcagtccttttaccggaagaagcttaaggaggtgtggaaacctgccgtgcggtctggcggatctggcggaggctccaccagccccaagaaaaagagaaaagtctaagctgccttctgcggggcttgccttctggccatgcccttcttctctcccttgcacctgtacctcttggtctttgaataaagcctgagtaggaaggctagcaaaaaaaaaaaaaaaaaaaaaaaaaaaaaaaaaaaaaaaaaaaaaaaaaaaaaaaaaaaaaaaaaaaaaaaaaaaaaaaa

SEQ ID NO: 12803 - RNA, 5785 nt, synthetic construct
  source 1..5785: mol_type = other RNA
aggaaataagagagaaaagaagagtaagaagaaatataagagccaccatggcccctaagaagaagcgtaaagtgagccggatggaacgcctcgtctacgaggtgcggcagaagtgcagaaacatcgaggacatctgcatctcctgcggatctctgaacgtgaccctggagcacccactgttcatcggcggcatgtgccagaactgtaaaaactgttttctggagtgtgcctatcaatacgacgatgacggctaccagagctactgcaccatctgttgcggcggaagagaggtgctgatgtgtggaaataacaactgctgccggtgcttctgcgtggaatgcgtggacctgctggtgggccccggcgccgcccaggccgctattaaggaagatccttggaactgctacatgtgcggccacaagggcacatacggcctgctgagacggagagaggactggcctagcagactgcagatgttcttcgccaataaccacgaccaggagttcgacccccctaaggtgtaccctcccgtccccgccgagaagagaaagcccatccgggtcctgagcctgttcgatggcatcgccaccggtctgctggtgctgaaggacctgggcatccaggtggataggtacattgcctccgaggtgtgcgaggactccatcaccgtgggaatggtgcgtcatcagggcaagatcatgtacgtgggcgacgtgcggagcgtgacacagaagcatatccaggagtggggccctttcgacctggtgatcggcggcagcccttgcaatgacctgagcatcgtgaacccagcccggaagggcctgtacgagggaaccggcagactgttcttcgagttttacagactgctgcacgacgcccggcctaaggaaggcgacgaccggcccttcttttggctgttcgagaatgtggtggccatgggagtcagcgacaagcgggatattagccggttcctggagagcaaccccgtgatgatcgatgccaaggaagtgagcgccgcccaccgggccagatacttctggggcaatctgcctggcatgaacagacccctggccagcaccgtgaacgacaagctggagctgcaggagtgcctggagcacggccggatcgccaagttcagcaaggtgagaaccatcaccacccgaagcaacagcatcaaacaaggcaaggaccagcactttcctgtgttcatgaacgagaaggaggacatcctgtggtgtaccgagatggagagagtgttcgggttcccagtccactacacagatgtcagcaacatgtctagactggccagacagagactgctgggaagaagctggtccgtccctgtgatcagacacctgttcgcccctctgaaggagtacttcgcctgcgtgagcagcggcaacagcaacgccaacagccggggccccagcttctctagcggcctggtgccactgtccctgagagggagccacatgggccccatggagatctacaaaaccgtgagcgcctggaagcggcagcctgtgcgcgtgctgagcctgtttcggaatatcgataaagtcctgaaaagcctgggattcctggagagcggctctggctccggcggtggcaccctgaagtacgtggaggatgtgacaaacgtggtcagacgggatgtggagaagtggggccccttcgatctggtgtacggcagcacccaacccctgggcagctcttgtgaccggtgccctggctggtacatgtttcagttccaccggatcctgcagtacgccctgccgagacaggagtcccagcggccattcttttggattttcatggacaacttgctgctgaccgaggatgaccaggaaactaccactcggttcctgcagaccgaagccgtgaccctgcaggacgtgagaggccgggactaccagaacgccatgcgggtgtggtccaacatccctggactgaaaagcaagcacgcacctctgacccctaaagaagaggagtacctgcaggcccaggtgcggagcagaagcaagctggacgcccctaaggtggatctgctggtgaagaattgcctcctgcccctgagagagtacttcaagtatttcagccagaatagtctgcccctgggaggcagcggcggcggcaccagcgcccccgtgaccttcggcgacctggccatctacttcagccaggaggagtgggagtggctgagccccgtgcagaaggccctgtacgaggacgtgatgctggagaactaccagaccctggccagcctgggcctgagcttcaggaggcccaacgtgatcaccctgctggagaagggcaaggccccctggatggtggagcccgtgaggaggaggaggggcctggacagcggcagcaagtgcggcggcccaagcagcggcgcccctcctcccagcggcggcagcccagccggctccccaacctctaccgaggagggcacctctgagtccgccacccccgagagcggccctggcacctccaccgagcccagcgagggcagcgcacccggcagccctgccggcagccccacctccacagaggagggaaccagcaccgagcccagcgaaggcagcgccccaggcaccagcaccgagcctagtgagcaggagattaaacggatcaacaagatcagaagaagacttgtgaaagacagcaacaccaagaaggccggcaagacaggccccatgaaaaccctgctggttagagtgatgacacccgatctgagagagcggctggaaaacctgagaaagaagcctgaaaatatcccccagcccatcagcaatacatctagagccaacctgaataagctgctgaccgattacaccgaaatgaagaaggcgatcctgcatgtgtactgggaagagttccagaaggaccctgtgggcctgatgagccgggtggcccagcctgccagcaagaagatcgatcagaacaagctgaaacctgagatggacgagaagggcaacctgaccaccgccggctttgcctgctctcagtgtggccagcccctgttcgtgtacaagctggagcaggtgtctgagaagggcaaggcttacaccaactacttcggacggtgcaatgtggccgagcacgaaaagctgatcctgctggcccagctgaagcccgagaaggatagcgacgaagccgtgacatatagcctgggaaagtttgggcagagggccctggatttctacagcattcatgtgaccaaggagtccacccaccccgtgaagcccctggcccagatcgccggaaacagatacgcctccggacctgtgggaaaggccctgagcgacgcatgtatgggcacaatcgcctccttcctgtctaagtaccaggacatcatcatcgaacaccagaaggtggtgaagggcaaccagaagagactggagagcctgcgggagctggccggcaaggaaaacctggaataccctagcgtgaccctgccacctcagcctcacaccaaggagggcgttgatgcctacaacgaagtgatcgcccgggtgcgaatgtgggtgaacctgaacctgtggcagaagctgaagctaagcagagatgatgccaagcctctgctgagactgaagggattcccttcctttcctctggtcgagagacaggccaacgaagtggactggtgggacatggtgtgtaacgtgaagaagctgatcaacgagaaaaaggaggatggcaaggtgttttggcagaatctggctggctacaagagacaggaagccctgagaccatacctgagcagcgaggaagatcggaagaagggaaagaaattcgctcggtaccagctgggcgacctgctgctgcacctggaaaagaagcacggcgaggactggggaaaggtgtacgacgaggcctgggagcggattgacaagaaagtggaaggcctgagcaagcacatcaagctggaagaggaacggagaagcgaggacgcccagagcaaggccgccctgaccgactggctgcgggctaaggccagcttcgtgatcgagggcctgaaggaggccgacaaggacgagttctgcagatgcgagctgaagctgcagaagtggtacggggacctgcggggaaagcccttcgccatcgaagccgagaacagcatcctggacatcagcggcttcagcaagcagtacaactgtgccttcatctggcagaaggacggcgtgaagaagctgaacctgtacctgatcatcaactacttcaagggcggcaagctgcggttcaagaagatcaaacctgaagccttcgaagccaacagattctacaccgtgatcaacaaaaagagcggcgagatcgtgcccatggaggtgaacttcaacttcgacgaccccaacctgatcatcctgcctctggcctttggcaagagacagggcagagaattcatctggaacgacctgctgtccctggaaaccggcagcctgaagctggccaacggaagagtgatcgagaagacactgtacaacagaagaacccggcaggatgagcctgccctgttcgtggccctgaccttcgagcggcgggaggtcctggactcctccaatatcaaaccaatgaacctgatcggcgtggcaagaggcgaaaacatccccgccgtgatcgccctgaccgaccccgagggctgcccactgagccggtttaaggatagcctgggaaacccaacccacatcctgagaatcggcgagagctataaggagaagcagcggaccatccaggccaagaaggaggtggagcagcggagagccggcggctacagccggaagtacgccagcaaagccaagaatctggcagacgatatggtgagaaacaccgctagagatctgctgtactacgccgtgacccaggatgccatgctgatcttcgccaacctgagccggggcttcggccggcagggcaagcggaccttcatggccgagagacagtacacacggatggaggactggctgaccgccaagctggcctacgagggcctgagcaagacctacctgtccaagacactggcccagtacacctccaagacatgcagcaactgtgggtttaccatcaccagcgccgactacgacagggtgctggagaagctgaagaagacagcaacaggctggatgaccacaattaacggcaaggagctgaaggtggagggccagattacctactacaacagatacaagagacagaacgtagtcaaggacctgtccgtcgagctggatagactgagcgaagaatctgtgaacaacgacatctcctcctggacaaagggcagaagcggagaagctctgagcctcctgaagaaaagattctcccatagacccgtgcaggagaagttcgtgtgcctgaactgcggcttcgagacacacgcagccgagcaagccgccctgaacatcgccagatcctggctgttcctgcggagccaggagtacaagaaataccagacaaacaagacaaccggcaacaccgataagagagccttcgtcgagacctggcagtccttttaccggaagaagcttaaggaggtgtggaaacctgccgtgcggtctggcggatctggcggaggctccaccagccccaagaaaaagagaaaagtctaagctgccttctgcggggcttgccttctggccatgcccttcttctctcccttgcacctgtacctcttggtctttgaataaagcctgagtaggaaggctagcaaaaaaaaaaaaaaaaaaaaaaaaaaaaaaaaaaaaaaaaaaaaaaaaaaaaaaaaaaaaaaaaaaaaaaaaaaaaaaaa

SEQ ID NO: 12804 - RNA, 5785 nt, synthetic construct
  source 1..5785: mol_type = other RNA
aggaaataagagagaaaagaagagtaagaagaaatataagagccaccatggcccctaagaagaagcgtaaagtgagccggatggaacgcctcgtctacgaggtgcggcagaagtgcagaaacatcgaggacatctgcatctcctgcggatctctgaacgtgaccctggagcacccactgttcatcggcggcatgtgccagaactgtaaaaactgttttctggagtgtgcctatcaatacgacgatgacggctaccagagctactgcaccatctgttgcggcggaagagaggtgctgatgtgtggaaataacaactgctgccggtgcttctgcgtggaatgcgtggacctgctggtgggccccggcgccgcccaggccgctattaaggaagatccttggaactgctacatgtgcggccacaagggcacatacggcctgctgagacggagagaggactggcctagcagactgcagatgttcttcgccaataaccacgaccaggagttcgacccccctaaggtgtaccctcccgtccccgccgagaagagaaagcccatccgggtcctgagcctgttcgatggcatcgccaccggtctgctggtgctgaaggacctgggcatccaggtggataggtacattgcctccgaggtgtgcgaggactccatcaccgtgggaatggtgcgtcatcagggcaagatcatgtacgtgggcgacgtgcggagcgtgacacagaagcatatccaggagtggggccctttcgacctggtgatcggcggcagcccttgcaatgacctgagcatcgtgaacccagcccggaagggcctgtacgagggaaccggcagactgttcttcgagttttacagactgctgcacgacgcccggcctaaggaaggcgacgaccggcccttcttttggctgttcgagaatgtggtggccatgggagtcagcgacaagcgggatattagccggttcctggagagcaaccccgtgatgatcgatgccaaggaagtgagcgccgcccaccgggccagatacttctggggcaatctgcctggcatgaacagacccctggccagcaccgtgaacgacaagctggagctgcaggagtgcctggagcacggccggatcgccaagttcagcaaggtgagaaccatcaccacccgaagcaacagcatcaaacaaggcaaggaccagcactttcctgtgttcatgaacgagaaggaggacatcctgtggtgtaccgagatggagagagtgttcgggttcccagtccactacacagatgtcagcaacatgtctagactggccagacagagactgctgggaagaagctggtccgtccctgtgatcagacacctgttcgcccctctgaaggagtacttcgcctgcgtgagcagcggcaacagcaacgccaacagccggggccccagcttctctagcggcctggtgccactgtccctgagagggagccacatgggccccatggagatctacaaaaccgtgagcgcctggaagcggcagcctgtgcgcgtgctgagcctgtttcggaatatcgataaagtcctgaaaagcctgggattcctggagagcggctctggctccggcggtggcaccctgaagtacgtggaggatgtgacaaacgtggtcagacgggatgtggagaagtggggccccttcgatctggtgtacggcagcacccaacccctgggcagctcttgtgaccggtgccctggctggtacatgtttcagttccaccggatcctgcagtacgccctgccgagacaggagtcccagcggccattcttttggattttcatggacaacttgctgctgaccgaggatgaccaggaaactaccactcggttcctgcagaccgaagccgtgaccctgcaggacgtgagaggccgggactaccagaacgccatgcgggtgtggtccaacatccctggactgaaaagcaagcacgcacctctgacccctaaagaagaggagtacctgcaggcccaggtgcggagcagaagcaagctggacgcccctaaggtggatctgctggtgaagaattgcctcctgcccctgagagagtacttcaagtatttcagccagaatagtctgcccctgggaggcagcggcggcggcgacagcgtgaccttcgaggacgtggccatcagcttcaccgtggaggagtgggccctgctggaccccagccagaagaagctgcacagggacgtgatggaggagaccttcaggaacctggccgccatcggcaggacccaggacgaccagcacatcgacaacgaccacaggtacagcaggaggaaccagaggaacgaggtggtggagaggctgctggagaggaacaagagcagcgagtgcaaggagggcggcccaagcagcggcgcccctcctcccagcggcggcagcccagccggctccccaacctctaccgaggagggcacctctgagtccgccacccccgagagcggccctggcacctccaccgagcccagcgagggcagcgcacccggcagccctgccggcagccccacctccacagaggagggaaccagcaccgagcccagcgaaggcagcgccccaggcaccagcaccgagcctagtgagcaggagattaaacggatcaacaagatcagaagaagacttgtgaaagacagcaacaccaagaaggccggcaagacaggccccatgaaaaccctgctggttagagtgatgacacccgatctgagagagcggctggaaaacctgagaaagaagcctgaaaatatcccccagcccatcagcaatacatctagagccaacctgaataagctgctgaccgattacaccgaaatgaagaaggcgatcctgcatgtgtactgggaagagttccagaaggaccctgtgggcctgatgagccgggtggcccagcctgccagcaagaagatcgatcagaacaagctgaaacctgagatggacgagaagggcaacctgaccaccgccggctttgcctgctctcagtgtggccagcccctgttcgtgtacaagctggagcaggtgtctgagaagggcaaggcttacaccaactacttcggacggtgcaatgtggccgagcacgaaaagctgatcctgctggcccagctgaagcccgagaaggatagcgacgaagccgtgacatatagcctgggaaagtttgggcagagggccctggatttctacagcattcatgtgaccaaggagtccacccaccccgtgaagcccctggcccagatcgccggaaacagatacgcctccggacctgtgggaaaggccctgagcgacgcatgtatgggcacaatcgcctccttcctgtctaagtaccaggacatcatcatcgaacaccagaaggtggtgaagggcaaccagaagagactggagagcctgcgggagctggccggcaaggaaaacctggaataccctagcgtgaccctgccacctcagcctcacaccaaggagggcgttgatgcctacaacgaagtgatcgcccgggtgcgaatgtgggtgaacctgaacctgtggcagaagctgaagctaagcagagatgatgccaagcctctgctgagactgaagggattcccttcctttcctctggtcgagagacaggccaacgaagtggactggtgggacatggtgtgtaacgtgaagaagctgatcaacgagaaaaaggaggatggcaaggtgttttggcagaatctggctggctacaagagacaggaagccctgagaccatacctgagcagcgaggaagatcggaagaagggaaagaaattcgctcggtaccagctgggcgacctgctgctgcacctggaaaagaagcacggcgaggactggggaaaggtgtacgacgaggcctgggagcggattgacaagaaagtggaaggcctgagcaagcacatcaagctggaagaggaacggagaagcgaggacgcccagagcaaggccgccctgaccgactggctgcgggctaaggccagcttcgtgatcgagggcctgaaggaggccgacaaggacgagttctgcagatgcgagctgaagctgcagaagtggtacggggacctgcggggaaagcccttcgccatcgaagccgagaacagcatcctggacatcagcggcttcagcaagcagtacaactgtgccttcatctggcagaaggacggcgtgaagaagctgaacctgtacctgatcatcaactacttcaagggcggcaagctgcggttcaagaagatcaaacctgaagccttcgaagccaacagattctacaccgtgatcaacaaaaagagcggcgagatcgtgcccatggaggtgaacttcaacttcgacgaccccaacctgatcatcctgcctctggcctttggcaagagacagggcagagaattcatctggaacgacctgctgtccctggaaaccggcagcctgaagctggccaacggaagagtgatcgagaagacactgtacaacagaagaacccggcaggatgagcctgccctgttcgtggccctgaccttcgagcggcgggaggtcctggactcctccaatatcaaaccaatgaacctgatcggcgtggcaagaggcgaaaacatccccgccgtgatcgccctgaccgaccccgagggctgcccactgagccggtttaaggatagcctgggaaacccaacccacatcctgagaatcggcgagagctataaggagaagcagcggaccatccaggccaagaaggaggtggagcagcggagagccggcggctacagccggaagtacgccagcaaagccaagaatctggcagacgatatggtgagaaacaccgctagagatctgctgtactacgccgtgacccaggatgccatgctgatcttcgccaacctgagccggggcttcggccggcagggcaagcggaccttcatggccgagagacagtacacacggatggaggactggctgaccgccaagctggcctacgagggcctgagcaagacctacctgtccaagacactggcccagtacacctccaagacatgcagcaactgtgggtttaccatcaccagcgccgactacgacagggtgctggagaagctgaagaagacagcaacaggctggatgaccacaattaacggcaaggagctgaaggtggagggccagattacctactacaacagatacaagagacagaacgtagtcaaggacctgtccgtcgagctggatagactgagcgaagaatctgtgaacaacgacatctcctcctggacaaagggcagaagcggagaagctctgagcctcctgaagaaaagattctcccatagacccgtgcaggagaagttcgtgtgcctgaactgcggcttcgagacacacgcagccgagcaagccgccctgaacatcgccagatcctggctgttcctgcggagccaggagtacaagaaataccagacaaacaagacaaccggcaacaccgataagagagccttcgtcgagacctggcagtccttttaccggaagaagcttaaggaggtgtggaaacctgccgtgcggtctggcggatctggcggaggctccaccagccccaagaaaaagagaaaagtctaagctgccttctgcggggcttgccttctggccatgcccttcttctctcccttgcacctgtacctcttggtctttgaataaagcctgagtaggaaggctagcaaaaaaaaaaaaaaaaaaaaaaaaaaaaaaaaaaaaaaaaaaaaaaaaaaaaaaaaaaaaaaaaaaaaaaaaaaaaaaaa

SEQ ID NO: 12805 - RNA, 5785 nt, synthetic construct
  source 1..5785: mol_type = other RNA
aggaaataagagagaaaagaagagtaagaagaaatataagagccaccatggcccctaagaagaagcgtaaagtgagccggatggaacgcctcgtctacgaggtgcggcagaagtgcagaaacatcgaggacatctgcatctcctgcggatctctgaacgtgaccctggagcacccactgttcatcggcggcatgtgccagaactgtaaaaactgttttctggagtgtgcctatcaatacgacgatgacggctaccagagctactgcaccatctgttgcggcggaagagaggtgctgatgtgtggaaataacaactgctgccggtgcttctgcgtggaatgcgtggacctgctggtgggccccggcgccgcccaggccgctattaaggaagatccttggaactgctacatgtgcggccacaagggcacatacggcctgctgagacggagagaggactggcctagcagactgcagatgttcttcgccaataaccacgaccaggagttcgacccccctaaggtgtaccctcccgtccccgccgagaagagaaagcccatccgggtcctgagcctgttcgatggcatcgccaccggtctgctggtgctgaaggacctgggcatccaggtggataggtacattgcctccgaggtgtgcgaggactccatcaccgtgggaatggtgcgtcatcagggcaagatcatgtacgtgggcgacgtgcggagcgtgacacagaagcatatccaggagtggggccctttcgacctggtgatcggcggcagcccttgcaatgacctgagcatcgtgaacccagcccggaagggcctgtacgagggaaccggcagactgttcttcgagttttacagactgctgcacgacgcccggcctaaggaaggcgacgaccggcccttcttttggctgttcgagaatgtggtggccatgggagtcagcgacaagcgggatattagccggttcctggagagcaaccccgtgatgatcgatgccaaggaagtgagcgccgcccaccgggccagatacttctggggcaatctgcctggcatgaacagacccctggccagcaccgtgaacgacaagctggagctgcaggagtgcctggagcacggccggatcgccaagttcagcaaggtgagaaccatcaccacccgaagcaacagcatcaaacaaggcaaggaccagcactttcctgtgttcatgaacgagaaggaggacatcctgtggtgtaccgagatggagagagtgttcgggttcccagtccactacacagatgtcagcaacatgtctagactggccagacagagactgctgggaagaagctggtccgtccctgtgatcagacacctgttcgcccctctgaaggagtacttcgcctgcgtgagcagcggcaacagcaacgccaacagccggggccccagcttctctagcggcctggtgccactgtccctgagagggagccacatgggccccatggagatctacaaaaccgtgagcgcctggaagcggcagcctgtgcgcgtgctgagcctgtttcggaatatcgataaagtcctgaaaagcctgggattcctggagagcggctctggctccggcggtggcaccctgaagtacgtggaggatgtgacaaacgtggtcagacgggatgtggagaagtggggccccttcgatctggtgtacggcagcacccaacccctgggcagctcttgtgaccggtgccctggctggtacatgtttcagttccaccggatcctgcagtacgccctgccgagacaggagtcccagcggccattcttttggattttcatggacaacttgctgctgaccgaggatgaccaggaaactaccactcggttcctgcagaccgaagccgtgaccctgcaggacgtgagaggccgggactaccagaacgccatgcgggtgtggtccaacatccctggactgaaaagcaagcacgcacctctgacccctaaagaagaggagtacctgcaggcccaggtgcggagcagaagcaagctggacgcccctaaggtggatctgctggtgaagaattgcctcctgcccctgagagagtacttcaagtatttcagccagaatagtctgcccctgggaggcagcggcggcggcggcgagaacctggagagcagggtgaccctgggcagccccgccgccgagagccaggagctgctgaccttcaaggacgtgagcgtggacttcacccaggaggagtggggccagctggcccccgcccacaggaacctgtacagggaggtgatgctggagaactacggcaacctggtgagcgtgggctaccagctgagcaagcccggcctgatcagccagctggagaagggcgaggagccctggctgggcggcccaagcagcggcgcccctcctcccagcggcggcagcccagccggctccccaacctctaccgaggagggcacctctgagtccgccacccccgagagcggccctggcacctccaccgagcccagcgagggcagcgcacccggcagccctgccggcagccccacctccacagaggagggaaccagcaccgagcccagcgaaggcagcgccccaggcaccagcaccgagcctagtgagcaggagattaaacggatcaacaagatcagaagaagacttgtgaaagacagcaacaccaagaaggccggcaagacaggccccatgaaaaccctgctggttagagtgatgacacccgatctgagagagcggctggaaaacctgagaaagaagcctgaaaatatcccccagcccatcagcaatacatctagagccaacctgaataagctgctgaccgattacaccgaaatgaagaaggcgatcctgcatgtgtactgggaagagttccagaaggaccctgtgggcctgatgagccgggtggcccagcctgccagcaagaagatcgatcagaacaagctgaaacctgagatggacgagaagggcaacctgaccaccgccggctttgcctgctctcagtgtggccagcccctgttcgtgtacaagctggagcaggtgtctgagaagggcaaggcttacaccaactacttcggacggtgcaatgtggccgagcacgaaaagctgatcctgctggcccagctgaagcccgagaaggatagcgacgaagccgtgacatatagcctgggaaagtttgggcagagggccctggatttctacagcattcatgtgaccaaggagtccacccaccccgtgaagcccctggcccagatcgccggaaacagatacgcctccggacctgtgggaaaggccctgagcgacgcatgtatgggcacaatcgcctccttcctgtctaagtaccaggacatcatcatcgaacaccagaaggtggtgaagggcaaccagaagagactggagagcctgcgggagctggccggcaaggaaaacctggaataccctagcgtgaccctgccacctcagcctcacaccaaggagggcgttgatgcctacaacgaagtgatcgcccgggtgcgaatgtgggtgaacctgaacctgtggcagaagctgaagctaagcagagatgatgccaagcctctgctgagactgaagggattcccttcctttcctctggtcgagagacaggccaacgaagtggactggtgggacatggtgtgtaacgtgaagaagctgatcaacgagaaaaaggaggatggcaaggtgttttggcagaatctggctggctacaagagacaggaagccctgagaccatacctgagcagcgaggaagatcggaagaagggaaagaaattcgctcggtaccagctgggcgacctgctgctgcacctggaaaagaagcacggcgaggactggggaaaggtgtacgacgaggcctgggagcggattgacaagaaagtggaaggcctgagcaagcacatcaagctggaagaggaacggagaagcgaggacgcccagagcaaggccgccctgaccgactggctgcgggctaaggccagcttcgtgatcgagggcctgaaggaggccgacaaggacgagttctgcagatgcgagctgaagctgcagaagtggtacggggacctgcggggaaagcccttcgccatcgaagccgagaacagcatcctggacatcagcggcttcagcaagcagtacaactgtgccttcatctggcagaaggacggcgtgaagaagctgaacctgtacctgatcatcaactacttcaagggcggcaagctgcggttcaagaagatcaaacctgaagccttcgaagccaacagattctacaccgtgatcaacaaaaagagcggcgagatcgtgcccatggaggtgaacttcaacttcgacgaccccaacctgatcatcctgcctctggcctttggcaagagacagggcagagaattcatctggaacgacctgctgtccctggaaaccggcagcctgaagctggccaacggaagagtgatcgagaagacactgtacaacagaagaacccggcaggatgagcctgccctgttcgtggccctgaccttcgagcggcgggaggtcctggactcctccaatatcaaaccaatgaacctgatcggcgtggcaagaggcgaaaacatccccgccgtgatcgccctgaccgaccccgagggctgcccactgagccggtttaaggatagcctgggaaacccaacccacatcctgagaatcggcgagagctataaggagaagcagcggaccatccaggccaagaaggaggtggagcagcggagagccggcggctacagccggaagtacgccagcaaagccaagaatctggcagacgatatggtgagaaacaccgctagagatctgctgtactacgccgtgacccaggatgccatgctgatcttcgccaacctgagccggggcttcggccggcagggcaagcggaccttcatggccgagagacagtacacacggatggaggactggctgaccgccaagctggcctacgagggcctgagcaagacctacctgtccaagacactggcccagtacacctccaagacatgcagcaactgtgggtttaccatcaccagcgccgactacgacagggtgctggagaagctgaagaagacagcaacaggctggatgaccacaattaacggcaaggagctgaaggtggagggccagattacctactacaacagatacaagagacagaacgtagtcaaggacctgtccgtcgagctggatagactgagcgaagaatctgtgaacaacgacatctcctcctggacaaagggcagaagcggagaagctctgagcctcctgaagaaaagattctcccatagacccgtgcaggagaagttcgtgtgcctgaactgcggcttcgagacacacgcagccgagcaagccgccctgaacatcgccagatcctggctgttcctgcggagccaggagtacaagaaataccagacaaacaagacaaccggcaacaccgataagagagccttcgtcgagacctggcagtccttttaccggaagaagcttaaggaggtgtggaaacctgccgtgcggtctggcggatctggcggaggctccaccagccccaagaaaaagagaaaagtctaagctgccttctgcggggcttgccttctggccatgcccttcttctctcccttgcacctgtacctcttggtctttgaataaagcctgagtaggaaggctagcaaaaaaaaaaaaaaaaaaaaaaaaaaaaaaaaaaaaaaaaaaaaaaaaaaaaaaaaaaaaaaaaaaaaaaaaaaaaaaaa

SEQ ID NO: 12806 - RNA, 5785 nt, synthetic construct
  source 1..5785: mol_type = other RNA
aggaaataagagagaaaagaagagtaagaagaaatataagagccaccatggcccctaagaagaagcgtaaagtgagccggatggaacgcctcgtctacgaggtgcggcagaagtgcagaaacatcgaggacatctgcatctcctgcggatctctgaacgtgaccctggagcacccactgttcatcggcggcatgtgccagaactgtaaaaactgttttctggagtgtgcctatcaatacgacgatgacggctaccagagctactgcaccatctgttgcggcggaagagaggtgctgatgtgtggaaataacaactgctgccggtgcttctgcgtggaatgcgtggacctgctggtgggccccggcgccgcccaggccgctattaaggaagatccttggaactgctacatgtgcggccacaagggcacatacggcctgctgagacggagagaggactggcctagcagactgcagatgttcttcgccaataaccacgaccaggagttcgacccccctaaggtgtaccctcccgtccccgccgagaagagaaagcccatccgggtcctgagcctgttcgatggcatcgccaccggtctgctggtgctgaaggacctgggcatccaggtggataggtacattgcctccgaggtgtgcgaggactccatcaccgtgggaatggtgcgtcatcagggcaagatcatgtacgtgggcgacgtgcggagcgtgacacagaagcatatccaggagtggggccctttcgacctggtgatcggcggcagcccttgcaatgacctgagcatcgtgaacccagcccggaagggcctgtacgagggaaccggcagactgttcttcgagttttacagactgctgcacgacgcccggcctaaggaaggcgacgaccggcccttcttttggctgttcgagaatgtggtggccatgggagtcagcgacaagcgggatattagccggttcctggagagcaaccccgtgatgatcgatgccaaggaagtgagcgccgcccaccgggccagatacttctggggcaatctgcctggcatgaacagacccctggccagcaccgtgaacgacaagctggagctgcaggagtgcctggagcacggccggatcgccaagttcagcaaggtgagaaccatcaccacccgaagcaacagcatcaaacaaggcaaggaccagcactttcctgtgttcatgaacgagaaggaggacatcctgtggtgtaccgagatggagagagtgttcgggttcccagtccactacacagatgtcagcaacatgtctagactggccagacagagactgctgggaagaagctggtccgtccctgtgatcagacacctgttcgcccctctgaaggagtacttcgcctgcgtgagcagcggcaacagcaacgccaacagccggggccccagcttctctagcggcctggtgccactgtccctgagagggagccacatgggccccatggagatctacaaaaccgtgagcgcctggaagcggcagcctgtgcgcgtgctgagcctgtttcggaatatcgataaagtcctgaaaagcctgggattcctggagagcggctctggctccggcggtggcaccctgaagtacgtggaggatgtgacaaacgtggtcagacgggatgtggagaagtggggccccttcgatctggtgtacggcagcacccaacccctgggcagctcttgtgaccggtgccctggctggtacatgtttcagttccaccggatcctgcagtacgccctgccgagacaggagtcccagcggccattcttttggattttcatggacaacttgctgctgaccgaggatgaccaggaaactaccactcggttcctgcagaccgaagccgtgaccctgcaggacgtgagaggccgggactaccagaacgccatgcgggtgtggtccaacatccctggactgaaaagcaagcacgcacctctgacccctaaagaagaggagtacctgcaggcccaggtgcggagcagaagcaagctggacgcccctaaggtggatctgctggtgaagaattgcctcctgcccctgagagagtacttcaagtatttcagccagaatagtctgcccctgggaggcagcggcggcggcccccaggccagcgtgaccttcgaggacgtggccgtgtacctgacccaggaggagtggggccacctggagcccgcccagaggggcctgtacagggacgtgatgctggagaactacggcaacgtggtgagcctgggcttccccgtgagcaagcccgacgtgatcctgcagctggagctgaggggcgagccctggttcctggacatgcagggcaccgagggcagggagatcctgagggactgcgagggcggcccaagcagcggcgcccctcctcccagcggcggcagcccagccggctccccaacctctaccgaggagggcacctctgagtccgccacccccgagagcggccctggcacctccaccgagcccagcgagggcagcgcacccggcagccctgccggcagccccacctccacagaggagggaaccagcaccgagcccagcgaaggcagcgccccaggcaccagcaccgagcctagtgagcaggagattaaacggatcaacaagatcagaagaagacttgtgaaagacagcaacaccaagaaggccggcaagacaggccccatgaaaaccctgctggttagagtgatgacacccgatctgagagagcggctggaaaacctgagaaagaagcctgaaaatatcccccagcccatcagcaatacatctagagccaacctgaataagctgctgaccgattacaccgaaatgaagaaggcgatcctgcatgtgtactgggaagagttccagaaggaccctgtgggcctgatgagccgggtggcccagcctgccagcaagaagatcgatcagaacaagctgaaacctgagatggacgagaagggcaacctgaccaccgccggctttgcctgctctcagtgtggccagcccctgttcgtgtacaagctggagcaggtgtctgagaagggcaaggcttacaccaactacttcggacggtgcaatgtggccgagcacgaaaagctgatcctgctggcccagctgaagcccgagaaggatagcgacgaagccgtgacatatagcctgggaaagtttgggcagagggccctggatttctacagcattcatgtgaccaaggagtccacccaccccgtgaagcccctggcccagatcgccggaaacagatacgcctccggacctgtgggaaaggccctgagcgacgcatgtatgggcacaatcgcctccttcctgtctaagtaccaggacatcatcatcgaacaccagaaggtggtgaagggcaaccagaagagactggagagcctgcgggagctggccggcaaggaaaacctggaataccctagcgtgaccctgccacctcagcctcacaccaaggagggcgttgatgcctacaacgaagtgatcgcccgggtgcgaatgtgggtgaacctgaacctgtggcagaagctgaagctaagcagagatgatgccaagcctctgctgagactgaagggattcccttcctttcctctggtcgagagacaggccaacgaagtggactggtgggacatggtgtgtaacgtgaagaagctgatcaacgagaaaaaggaggatggcaaggtgttttggcagaatctggctggctacaagagacaggaagccctgagaccatacctgagcagcgaggaagatcggaagaagggaaagaaattcgctcggtaccagctgggcgacctgctgctgcacctggaaaagaagcacggcgaggactggggaaaggtgtacgacgaggcctgggagcggattgacaagaaagtggaaggcctgagcaagcacatcaagctggaagaggaacggagaagcgaggacgcccagagcaaggccgccctgaccgactggctgcgggctaaggccagcttcgtgatcgagggcctgaaggaggccgacaaggacgagttctgcagatgcgagctgaagctgcagaagtggtacggggacctgcggggaaagcccttcgccatcgaagccgagaacagcatcctggacatcagcggcttcagcaagcagtacaactgtgccttcatctggcagaaggacggcgtgaagaagctgaacctgtacctgatcatcaactacttcaagggcggcaagctgcggttcaagaagatcaaacctgaagccttcgaagccaacagattctacaccgtgatcaacaaaaagagcggcgagatcgtgcccatggaggtgaacttcaacttcgacgaccccaacctgatcatcctgcctctggcctttggcaagagacagggcagagaattcatctggaacgacctgctgtccctggaaaccggcagcctgaagctggccaacggaagagtgatcgagaagacactgtacaacagaagaacccggcaggatgagcctgccctgttcgtggccctgaccttcgagcggcgggaggtcctggactcctccaatatcaaaccaatgaacctgatcggcgtggcaagaggcgaaaacatccccgccgtgatcgccctgaccgaccccgagggctgcccactgagccggtttaaggatagcctgggaaacccaacccacatcctgagaatcggcgagagctataaggagaagcagcggaccatccaggccaagaaggaggtggagcagcggagagccggcggctacagccggaagtacgccagcaaagccaagaatctggcagacgatatggtgagaaacaccgctagagatctgctgtactacgccgtgacccaggatgccatgctgatcttcgccaacctgagccggggcttcggccggcagggcaagcggaccttcatggccgagagacagtacacacggatggaggactggctgaccgccaagctggcctacgagggcctgagcaagacctacctgtccaagacactggcccagtacacctccaagacatgcagcaactgtgggtttaccatcaccagcgccgactacgacagggtgctggagaagctgaagaagacagcaacaggctggatgaccacaattaacggcaaggagctgaaggtggagggccagattacctactacaacagatacaagagacagaacgtagtcaaggacctgtccgtcgagctggatagactgagcgaagaatctgtgaacaacgacatctcctcctggacaaagggcagaagcggagaagctctgagcctcctgaagaaaagattctcccatagacccgtgcaggagaagttcgtgtgcctgaactgcggcttcgagacacacgcagccgagcaagccgccctgaacatcgccagatcctggctgttcctgcggagccaggagtacaagaaataccagacaaacaagacaaccggcaacaccgataagagagccttcgtcgagacctggcagtccttttaccggaagaagcttaaggaggtgtggaaacctgccgtgcggtctggcggatctggcggaggctccaccagccccaagaaaaagagaaaagtctaagctgccttctgcggggcttgccttctggccatgcccttcttctctcccttgcacctgtacctcttggtctttgaataaagcctgagtaggaaggctagcaaaaaaaaaaaaaaaaaaaaaaaaaaaaaaaaaaaaaaaaaaaaaaaaaaaaaaaaaaaaaaaaaaaaaaaaaaaaaaaa

SEQ ID NO: 12807 - RNA, 5785 nt, synthetic construct
  source 1..5785: mol_type = other RNA
aggaaataagagagaaaagaagagtaagaagaaatataagagccaccatggcccctaagaagaagcgtaaagtgagccggatggaacgcctcgtctacgaggtgcggcagaagtgcagaaacatcgaggacatctgcatctcctgcggatctctgaacgtgaccctggagcacccactgttcatcggcggcatgtgccagaactgtaaaaactgttttctggagtgtgcctatcaatacgacgatgacggctaccagagctactgcaccatctgttgcggcggaagagaggtgctgatgtgtggaaataacaactgctgccggtgcttctgcgtggaatgcgtggacctgctggtgggccccggcgccgcccaggccgctattaaggaagatccttggaactgctacatgtgcggccacaagggcacatacggcctgctgagacggagagaggactggcctagcagactgcagatgttcttcgccaataaccacgaccaggagttcgacccccctaaggtgtaccctcccgtccccgccgagaagagaaagcccatccgggtcctgagcctgttcgatggcatcgccaccggtctgctggtgctgaaggacctgggcatccaggtggataggtacattgcctccgaggtgtgcgaggactccatcaccgtgggaatggtgcgtcatcagggcaagatcatgtacgtgggcgacgtgcggagcgtgacacagaagcatatccaggagtggggccctttcgacctggtgatcggcggcagcccttgcaatgacctgagcatcgtgaacccagcccggaagggcctgtacgagggaaccggcagactgttcttcgagttttacagactgctgcacgacgcccggcctaaggaaggcgacgaccggcccttcttttggctgttcgagaatgtggtggccatgggagtcagcgacaagcgggatattagccggttcctggagagcaaccccgtgatgatcgatgccaaggaagtgagcgccgcccaccgggccagatacttctggggcaatctgcctggcatgaacagacccctggccagcaccgtgaacgacaagctggagctgcaggagtgcctggagcacggccggatcgccaagttcagcaaggtgagaaccatcaccacccgaagcaacagcatcaaacaaggcaaggaccagcactttcctgtgttcatgaacgagaaggaggacatcctgtggtgtaccgagatggagagagtgttcgggttcccagtccactacacagatgtcagcaacatgtctagactggccagacagagactgctgggaagaagctggtccgtccctgtgatcagacacctgttcgcccctctgaaggagtacttcgcctgcgtgagcagcggcaacagcaacgccaacagccggggccccagcttctctagcggcctggtgccactgtccctgagagggagccacatgggccccatggagatctacaaaaccgtgagcgcctggaagcggcagcctgtgcgcgtgctgagcctgtttcggaatatcgataaagtcctgaaaagcctgggattcctggagagcggctctggctccggcggtggcaccctgaagtacgtggaggatgtgacaaacgtggtcagacgggatgtggagaagtggggccccttcgatctggtgtacggcagcacccaacccctgggcagctcttgtgaccggtgccctggctggtacatgtttcagttccaccggatcctgcagtacgccctgccgagacaggagtcccagcggccattcttttggattttcatggacaacttgctgctgaccgaggatgaccaggaaactaccactcggttcctgcagaccgaagccgtgaccctgcaggacgtgagaggccgggactaccagaacgccatgcgggtgtggtccaacatccctggactgaaaagcaagcacgcacctctgacccctaaagaagaggagtacctgcaggcccaggtgcggagcagaagcaagctggacgcccctaaggtggatctgctggtgaagaattgcctcctgcccctgagagagtacttcaagtatttcagccagaatagtctgcccctgggaggcagcggcggcggcgaggccctgcccgtggtgttcgaggacgtggccgtgtacttcaccagggaggagtggggcgccctggacaagaggcagaaggagatgtacagggacgtgatgaggatgaactacgagctgctggccagcctgggccccgccgccgccaagcccgacctgatcagcaagctggagaggagggccgccccctggatcaaggacccccacggcctgaagtggggcaagggcaggccccccggcaagggcggcccaagcagcggcgcccctcctcccagcggcggcagcccagccggctccccaacctctaccgaggagggcacctctgagtccgccacccccgagagcggccctggcacctccaccgagcccagcgagggcagcgcacccggcagccctgccggcagccccacctccacagaggagggaaccagcaccgagcccagcgaaggcagcgccccaggcaccagcaccgagcctagtgagcaggagattaaacggatcaacaagatcagaagaagacttgtgaaagacagcaacaccaagaaggccggcaagacaggccccatgaaaaccctgctggttagagtgatgacacccgatctgagagagcggctggaaaacctgagaaagaagcctgaaaatatcccccagcccatcagcaatacatctagagccaacctgaataagctgctgaccgattacaccgaaatgaagaaggcgatcctgcatgtgtactgggaagagttccagaaggaccctgtgggcctgatgagccgggtggcccagcctgccagcaagaagatcgatcagaacaagctgaaacctgagatggacgagaagggcaacctgaccaccgccggctttgcctgctctcagtgtggccagcccctgttcgtgtacaagctggagcaggtgtctgagaagggcaaggcttacaccaactacttcggacggtgcaatgtggccgagcacgaaaagctgatcctgctggcccagctgaagcccgagaaggatagcgacgaagccgtgacatatagcctgggaaagtttgggcagagggccctggatttctacagcattcatgtgaccaaggagtccacccaccccgtgaagcccctggcccagatcgccggaaacagatacgcctccggacctgtgggaaaggccctgagcgacgcatgtatgggcacaatcgcctccttcctgtctaagtaccaggacatcatcatcgaacaccagaaggtggtgaagggcaaccagaagagactggagagcctgcgggagctggccggcaaggaaaacctggaataccctagcgtgaccctgccacctcagcctcacaccaaggagggcgttgatgcctacaacgaagtgatcgcccgggtgcgaatgtgggtgaacctgaacctgtggcagaagctgaagctaagcagagatgatgccaagcctctgctgagactgaagggattcccttcctttcctctggtcgagagacaggccaacgaagtggactggtgggacatggtgtgtaacgtgaagaagctgatcaacgagaaaaaggaggatggcaaggtgttttggcagaatctggctggctacaagagacaggaagccctgagaccatacctgagcagcgaggaagatcggaagaagggaaagaaattcgctcggtaccagctgggcgacctgctgctgcacctggaaaagaagcacggcgaggactggggaaaggtgtacgacgaggcctgggagcggattgacaagaaagtggaaggcctgagcaagcacatcaagctggaagaggaacggagaagcgaggacgcccagagcaaggccgccctgaccgactggctgcgggctaaggccagcttcgtgatcgagggcctgaaggaggccgacaaggacgagttctgcagatgcgagctgaagctgcagaagtggtacggggacctgcggggaaagcccttcgccatcgaagccgagaacagcatcctggacatcagcggcttcagcaagcagtacaactgtgccttcatctggcagaaggacggcgtgaagaagctgaacctgtacctgatcatcaactacttcaagggcggcaagctgcggttcaagaagatcaaacctgaagccttcgaagccaacagattctacaccgtgatcaacaaaaagagcggcgagatcgtgcccatggaggtgaacttcaacttcgacgaccccaacctgatcatcctgcctctggcctttggcaagagacagggcagagaattcatctggaacgacctgctgtccctggaaaccggcagcctgaagctggccaacggaagagtgatcgagaagacactgtacaacagaagaacccggcaggatgagcctgccctgttcgtggccctgaccttcgagcggcgggaggtcctggactcctccaatatcaaaccaatgaacctgatcggcgtggcaagaggcgaaaacatccccgccgtgatcgccctgaccgaccccgagggctgcccactgagccggtttaaggatagcctgggaaacccaacccacatcctgagaatcggcgagagctataaggagaagcagcggaccatccaggccaagaaggaggtggagcagcggagagccggcggctacagccggaagtacgccagcaaagccaagaatctggcagacgatatggtgagaaacaccgctagagatctgctgtactacgccgtgacccaggatgccatgctgatcttcgccaacctgagccggggcttcggccggcagggcaagcggaccttcatggccgagagacagtacacacggatggaggactggctgaccgccaagctggcctacgagggcctgagcaagacctacctgtccaagacactggcccagtacacctccaagacatgcagcaactgtgggtttaccatcaccagcgccgactacgacagggtgctggagaagctgaagaagacagcaacaggctggatgaccacaattaacggcaaggagctgaaggtggagggccagattacctactacaacagatacaagagacagaacgtagtcaaggacctgtccgtcgagctggatagactgagcgaagaatctgtgaacaacgacatctcctcctggacaaagggcagaagcggagaagctctgagcctcctgaagaaaagattctcccatagacccgtgcaggagaagttcgtgtgcctgaactgcggcttcgagacacacgcagccgagcaagccgccctgaacatcgccagatcctggctgttcctgcggagccaggagtacaagaaataccagacaaacaagacaaccggcaacaccgataagagagccttcgtcgagacctggcagtccttttaccggaagaagcttaaggaggtgtggaaacctgccgtgcggtctggcggatctggcggaggctccaccagccccaagaaaaagagaaaagtctaagctgccttctgcggggcttgccttctggccatgcccttcttctctcccttgcacctgtacctcttggtctttgaataaagcctgagtaggaaggctagcaaaaaaaaaaaaaaaaaaaaaaaaaaaaaaaaaaaaaaaaaaaaaaaaaaaaaaaaaaaaaaaaaaaaaaaaaaaaaaaa

SEQ ID NO: 12808 - RNA, 5812 nt, synthetic construct
  source 1..5812: mol_type = other RNA
aggaaataagagagaaaagaagagtaagaagaaatataagagccaccatggcccctaagaagaagcgtaaagtgagccggatggaacgcctcgtctacgaggtgcggcagaagtgcagaaacatcgaggacatctgcatctcctgcggatctctgaacgtgaccctggagcacccactgttcatcggcggcatgtgccagaactgtaaaaactgttttctggagtgtgcctatcaatacgacgatgacggctaccagagctactgcaccatctgttgcggcggaagagaggtgctgatgtgtggaaataacaactgctgccggtgcttctgcgtggaatgcgtggacctgctggtgggccccggcgccgcccaggccgctattaaggaagatccttggaactgctacatgtgcggccacaagggcacatacggcctgctgagacggagagaggactggcctagcagactgcagatgttcttcgccaataaccacgaccaggagttcgacccccctaaggtgtaccctcccgtccccgccgagaagagaaagcccatccgggtcctgagcctgttcgatggcatcgccaccggtctgctggtgctgaaggacctgggcatccaggtggataggtacattgcctccgaggtgtgcgaggactccatcaccgtgggaatggtgcgtcatcagggcaagatcatgtacgtgggcgacgtgcggagcgtgacacagaagcatatccaggagtggggccctttcgacctggtgatcggcggcagcccttgcaatgacctgagcatcgtgaacccagcccggaagggcctgtacgagggaaccggcagactgttcttcgagttttacagactgctgcacgacgcccggcctaaggaaggcgacgaccggcccttcttttggctgttcgagaatgtggtggccatgggagtcagcgacaagcgggatattagccggttcctggagagcaaccccgtgatgatcgatgccaaggaagtgagcgccgcccaccgggccagatacttctggggcaatctgcctggcatgaacagacccctggccagcaccgtgaacgacaagctggagctgcaggagtgcctggagcacggccggatcgccaagttcagcaaggtgagaaccatcaccacccgaagcaacagcatcaaacaaggcaaggaccagcactttcctgtgttcatgaacgagaaggaggacatcctgtggtgtaccgagatggagagagtgttcgggttcccagtccactacacagatgtcagcaacatgtctagactggccagacagagactgctgggaagaagctggtccgtccctgtgatcagacacctgttcgcccctctgaaggagtacttcgcctgcgtgagcagcggcaacagcaacgccaacagccggggccccagcttctctagcggcctggtgccactgtccctgagagggagccacatgggccccatggagatctacaaaaccgtgagcgcctggaagcggcagcctgtgcgcgtgctgagcctgtttcggaatatcgataaagtcctgaaaagcctgggattcctggagagcggctctggctccggcggtggcaccctgaagtacgtggaggatgtgacaaacgtggtcagacgggatgtggagaagtggggccccttcgatctggtgtacggcagcacccaacccctgggcagctcttgtgaccggtgccctggctggtacatgtttcagttccaccggatcctgcagtacgccctgccgagacaggagtcccagcggccattcttttggattttcatggacaacttgctgctgaccgaggatgaccaggaaactaccactcggttcctgcagaccgaagccgtgaccctgcaggacgtgagaggccgggactaccagaacgccatgcgggtgtggtccaacatccctggactgaaaagcaagcacgcacctctgacccctaaagaagaggagtacctgcaggcccaggtgcggagcagaagcaagctggacgcccctaaggtggatctgctggtgaagaattgcctcctgcccctgagagagtacttcaagtatttcagccagaatagtctgcccctgggaggcagcggcggcggcgtggccttcagggacgtgatcgtggacttcacccaggaggagtggcagcagctgaagcccgcccagaaggacctgtacagggacgtgatgatggagatctactggaacctggtgagcctggacctggagaccgagggcgacatgaacgagcccgaccccgagaaggacagctgggaggacaggaccagcatcgtggtggtggagggcctgatgaggaacggcgcccagggctacgcctgcgagaaggccggcatccagggctgcagggtgggcggcccaagcagcggcgcccctcctcccagcggcggcagcccagccggctccccaacctctaccgaggagggcacctctgagtccgccacccccgagagcggccctggcacctccaccgagcccagcgagggcagcgcacccggcagccctgccggcagccccacctccacagaggagggaaccagcaccgagcccagcgaaggcagcgccccaggcaccagcaccgagcctagtgagcaggagattaaacggatcaacaagatcagaagaagacttgtgaaagacagcaacaccaagaaggccggcaagacaggccccatgaaaaccctgctggttagagtgatgacacccgatctgagagagcggctggaaaacctgagaaagaagcctgaaaatatcccccagcccatcagcaatacatctagagccaacctgaataagctgctgaccgattacaccgaaatgaagaaggcgatcctgcatgtgtactgggaagagttccagaaggaccctgtgggcctgatgagccgggtggcccagcctgccagcaagaagatcgatcagaacaagctgaaacctgagatggacgagaagggcaacctgaccaccgccggctttgcctgctctcagtgtggccagcccctgttcgtgtacaagctggagcaggtgtctgagaagggcaaggcttacaccaactacttcggacggtgcaatgtggccgagcacgaaaagctgatcctgctggcccagctgaagcccgagaaggatagcgacgaagccgtgacatatagcctgggaaagtttgggcagagggccctggatttctacagcattcatgtgaccaaggagtccacccaccccgtgaagcccctggcccagatcgccggaaacagatacgcctccggacctgtgggaaaggccctgagcgacgcatgtatgggcacaatcgcctccttcctgtctaagtaccaggacatcatcatcgaacaccagaaggtggtgaagggcaaccagaagagactggagagcctgcgggagctggccggcaaggaaaacctggaataccctagcgtgaccctgccacctcagcctcacaccaaggagggcgttgatgcctacaacgaagtgatcgcccgggtgcgaatgtgggtgaacctgaacctgtggcagaagctgaagctaagcagagatgatgccaagcctctgctgagactgaagggattcccttcctttcctctggtcgagagacaggccaacgaagtggactggtgggacatggtgtgtaacgtgaagaagctgatcaacgagaaaaaggaggatggcaaggtgttttggcagaatctggctggctacaagagacaggaagccctgagaccatacctgagcagcgaggaagatcggaagaagggaaagaaattcgctcggtaccagctgggcgacctgctgctgcacctggaaaagaagcacggcgaggactggggaaaggtgtacgacgaggcctgggagcggattgacaagaaagtggaaggcctgagcaagcacatcaagctggaagaggaacggagaagcgaggacgcccagagcaaggccgccctgaccgactggctgcgggctaaggccagcttcgtgatcgagggcctgaaggaggccgacaaggacgagttctgcagatgcgagctgaagctgcagaagtggtacggggacctgcggggaaagcccttcgccatcgaagccgagaacagcatcctggacatcagcggcttcagcaagcagtacaactgtgccttcatctggcagaaggacggcgtgaagaagctgaacctgtacctgatcatcaactacttcaagggcggcaagctgcggttcaagaagatcaaacctgaagccttcgaagccaacagattctacaccgtgatcaacaaaaagagcggcgagatcgtgcccatggaggtgaacttcaacttcgacgaccccaacctgatcatcctgcctctggcctttggcaagagacagggcagagaattcatctggaacgacctgctgtccctggaaaccggcagcctgaagctggccaacggaagagtgatcgagaagacactgtacaacagaagaacccggcaggatgagcctgccctgttcgtggccctgaccttcgagcggcgggaggtcctggactcctccaatatcaaaccaatgaacctgatcggcgtggcaagaggcgaaaacatccccgccgtgatcgccctgaccgaccccgagggctgcccactgagccggtttaaggatagcctgggaaacccaacccacatcctgagaatcggcgagagctataaggagaagcagcggaccatccaggccaagaaggaggtggagcagcggagagccggcggctacagccggaagtacgccagcaaagccaagaatctggcagacgatatggtgagaaacaccgctagagatctgctgtactacgccgtgacccaggatgccatgctgatcttcgccaacctgagccggggcttcggccggcagggcaagcggaccttcatggccgagagacagtacacacggatggaggactggctgaccgccaagctggcctacgagggcctgagcaagacctacctgtccaagacactggcccagtacacctccaagacatgcagcaactgtgggtttaccatcaccagcgccgactacgacagggtgctggagaagctgaagaagacagcaacaggctggatgaccacaattaacggcaaggagctgaaggtggagggccagattacctactacaacagatacaagagacagaacgtagtcaaggacctgtccgtcgagctggatagactgagcgaagaatctgtgaacaacgacatctcctcctggacaaagggcagaagcggagaagctctgagcctcctgaagaaaagattctcccatagacccgtgcaggagaagttcgtgtgcctgaactgcggcttcgagacacacgcagccgagcaagccgccctgaacatcgccagatcctggctgttcctgcggagccaggagtacaagaaataccagacaaacaagacaaccggcaacaccgataagagagccttcgtcgagacctggcagtccttttaccggaagaagcttaaggaggtgtggaaacctgccgtgcggtctggcggatctggcggaggctccaccagccccaagaaaaagagaaaagtctaagctgccttctgcggggcttgccttctggccatgcccttcttctctcccttgcacctgtacctcttggtctttgaataaagcctgagtaggaaggctagcaaaaaaaaaaaaaaaaaaaaaaaaaaaaaaaaaaaaaaaaaaaaaaaaaaaaaaaaaaaaaaaaaaaaaaaaaaaaaaaa

SEQ ID NO: 12809 - RNA, 5785 nt, synthetic construct
  source 1..5785: mol_type = other RNA
aggaaataagagagaaaagaagagtaagaagaaatataagagccaccatggcccctaagaagaagcgtaaagtgagccggatggaacgcctcgtctacgaggtgcggcagaagtgcagaaacatcgaggacatctgcatctcctgcggatctctgaacgtgaccctggagcacccactgttcatcggcggcatgtgccagaactgtaaaaactgttttctggagtgtgcctatcaatacgacgatgacggctaccagagctactgcaccatctgttgcggcggaagagaggtgctgatgtgtggaaataacaactgctgccggtgcttctgcgtggaatgcgtggacctgctggtgggccccggcgccgcccaggccgctattaaggaagatccttggaactgctacatgtgcggccacaagggcacatacggcctgctgagacggagagaggactggcctagcagactgcagatgttcttcgccaataaccacgaccaggagttcgacccccctaaggtgtaccctcccgtccccgccgagaagagaaagcccatccgggtcctgagcctgttcgatggcatcgccaccggtctgctggtgctgaaggacctgggcatccaggtggataggtacattgcctccgaggtgtgcgaggactccatcaccgtgggaatggtgcgtcatcagggcaagatcatgtacgtgggcgacgtgcggagcgtgacacagaagcatatccaggagtggggccctttcgacctggtgatcggcggcagcccttgcaatgacctgagcatcgtgaacccagcccggaagggcctgtacgagggaaccggcagactgttcttcgagttttacagactgctgcacgacgcccggcctaaggaaggcgacgaccggcccttcttttggctgttcgagaatgtggtggccatgggagtcagcgacaagcgggatattagccggttcctggagagcaaccccgtgatgatcgatgccaaggaagtgagcgccgcccaccgggccagatacttctggggcaatctgcctggcatgaacagacccctggccagcaccgtgaacgacaagctggagctgcaggagtgcctggagcacggccggatcgccaagttcagcaaggtgagaaccatcaccacccgaagcaacagcatcaaacaaggcaaggaccagcactttcctgtgttcatgaacgagaaggaggacatcctgtggtgtaccgagatggagagagtgttcgggttcccagtccactacacagatgtcagcaacatgtctagactggccagacagagactgctgggaagaagctggtccgtccctgtgatcagacacctgttcgcccctctgaaggagtacttcgcctgcgtgagcagcggcaacagcaacgccaacagccggggccccagcttctctagcggcctggtgccactgtccctgagagggagccacatgggccccatggagatctacaaaaccgtgagcgcctggaagcggcagcctgtgcgcgtgctgagcctgtttcggaatatcgataaagtcctgaaaagcctgggattcctggagagcggctctggctccggcggtggcaccctgaagtacgtggaggatgtgacaaacgtggtcagacgggatgtggagaagtggggccccttcgatctggtgtacggcagcacccaacccctgggcagctcttgtgaccggtgccctggctggtacatgtttcagttccaccggatcctgcagtacgccctgccgagacaggagtcccagcggccattcttttggattttcatggacaacttgctgctgaccgaggatgaccaggaaactaccactcggttcctgcagaccgaagccgtgaccctgcaggacgtgagaggccgggactaccagaacgccatgcgggtgtggtccaacatccctggactgaaaagcaagcacgcacctctgacccctaaagaagaggagtacctgcaggcccaggtgcggagcagaagcaagctggacgcccctaaggtggatctgctggtgaagaattgcctcctgcccctgagagagtacttcaagtatttcagccagaatagtctgcccctgggaggcagcggcggcggcggcccctggaccctgctgaccttcagggacgtggccatcgagttcagccaggaggagtggggctgcctgaaccacagccagagggagctgtacagggacgtgatgctggagacctacggccacctgctgttcctgggcctggtgagcaagcccgacctggtgatcctgctggagcagaagaaggagctgtggggcgtgaagaggaaggagaccgtgggctgccagttcgagggccacgtgaccggcggcccaagcagcggcgcccctcctcccagcggcggcagcccagccggctccccaacctctaccgaggagggcacctctgagtccgccacccccgagagcggccctggcacctccaccgagcccagcgagggcagcgcacccggcagccctgccggcagccccacctccacagaggagggaaccagcaccgagcccagcgaaggcagcgccccaggcaccagcaccgagcctagtgagcaggagattaaacggatcaacaagatcagaagaagacttgtgaaagacagcaacaccaagaaggccggcaagacaggccccatgaaaaccctgctggttagagtgatgacacccgatctgagagagcggctggaaaacctgagaaagaagcctgaaaatatcccccagcccatcagcaatacatctagagccaacctgaataagctgctgaccgattacaccgaaatgaagaaggcgatcctgcatgtgtactgggaagagttccagaaggaccctgtgggcctgatgagccgggtggcccagcctgccagcaagaagatcgatcagaacaagctgaaacctgagatggacgagaagggcaacctgaccaccgccggctttgcctgctctcagtgtggccagcccctgttcgtgtacaagctggagcaggtgtctgagaagggcaaggcttacaccaactacttcggacggtgcaatgtggccgagcacgaaaagctgatcctgctggcccagctgaagcccgagaaggatagcgacgaagccgtgacatatagcctgggaaagtttgggcagagggccctggatttctacagcattcatgtgaccaaggagtccacccaccccgtgaagcccctggcccagatcgccggaaacagatacgcctccggacctgtgggaaaggccctgagcgacgcatgtatgggcacaatcgcctccttcctgtctaagtaccaggacatcatcatcgaacaccagaaggtggtgaagggcaaccagaagagactggagagcctgcgggagctggccggcaaggaaaacctggaataccctagcgtgaccctgccacctcagcctcacaccaaggagggcgttgatgcctacaacgaagtgatcgcccgggtgcgaatgtgggtgaacctgaacctgtggcagaagctgaagctaagcagagatgatgccaagcctctgctgagactgaagggattcccttcctttcctctggtcgagagacaggccaacgaagtggactggtgggacatggtgtgtaacgtgaagaagctgatcaacgagaaaaaggaggatggcaaggtgttttggcagaatctggctggctacaagagacaggaagccctgagaccatacctgagcagcgaggaagatcggaagaagggaaagaaattcgctcggtaccagctgggcgacctgctgctgcacctggaaaagaagcacggcgaggactggggaaaggtgtacgacgaggcctgggagcggattgacaagaaagtggaaggcctgagcaagcacatcaagctggaagaggaacggagaagcgaggacgcccagagcaaggccgccctgaccgactggctgcgggctaaggccagcttcgtgatcgagggcctgaaggaggccgacaaggacgagttctgcagatgcgagctgaagctgcagaagtggtacggggacctgcggggaaagcccttcgccatcgaagccgagaacagcatcctggacatcagcggcttcagcaagcagtacaactgtgccttcatctggcagaaggacggcgtgaagaagctgaacctgtacctgatcatcaactacttcaagggcggcaagctgcggttcaagaagatcaaacctgaagccttcgaagccaacagattctacaccgtgatcaacaaaaagagcggcgagatcgtgcccatggaggtgaacttcaacttcgacgaccccaacctgatcatcctgcctctggcctttggcaagagacagggcagagaattcatctggaacgacctgctgtccctggaaaccggcagcctgaagctggccaacggaagagtgatcgagaagacactgtacaacagaagaacccggcaggatgagcctgccctgttcgtggccctgaccttcgagcggcgggaggtcctggactcctccaatatcaaaccaatgaacctgatcggcgtggcaagaggcgaaaacatccccgccgtgatcgccctgaccgaccccgagggctgcccactgagccggtttaaggatagcctgggaaacccaacccacatcctgagaatcggcgagagctataaggagaagcagcggaccatccaggccaagaaggaggtggagcagcggagagccggcggctacagccggaagtacgccagcaaagccaagaatctggcagacgatatggtgagaaacaccgctagagatctgctgtactacgccgtgacccaggatgccatgctgatcttcgccaacctgagccggggcttcggccggcagggcaagcggaccttcatggccgagagacagtacacacggatggaggactggctgaccgccaagctggcctacgagggcctgagcaagacctacctgtccaagacactggcccagtacacctccaagacatgcagcaactgtgggtttaccatcaccagcgccgactacgacagggtgctggagaagctgaagaagacagcaacaggctggatgaccacaattaacggcaaggagctgaaggtggagggccagattacctactacaacagatacaagagacagaacgtagtcaaggacctgtccgtcgagctggatagactgagcgaagaatctgtgaacaacgacatctcctcctggacaaagggcagaagcggagaagctctgagcctcctgaagaaaagattctcccatagacccgtgcaggagaagttcgtgtgcctgaactgcggcttcgagacacacgcagccgagcaagccgccctgaacatcgccagatcctggctgttcctgcggagccaggagtacaagaaataccagacaaacaagacaaccggcaacaccgataagagagccttcgtcgagacctggcagtccttttaccggaagaagcttaaggaggtgtggaaacctgccgtgcggtctggcggatctggcggaggctccaccagccccaagaaaaagagaaaagtctaagctgccttctgcggggcttgccttctggccatgcccttcttctctcccttgcacctgtacctcttggtctttgaataaagcctgagtaggaaggctagcaaaaaaaaaaaaaaaaaaaaaaaaaaaaaaaaaaaaaaaaaaaaaaaaaaaaaaaaaaaaaaaaaaaaaaaaaaaaaaaa

SEQ ID NO: 12810 - RNA, 5785 nt, synthetic construct
  source 1..5785: mol_type = other RNA
aggaaataagagagaaaagaagagtaagaagaaatataagagccaccatggcccctaagaagaagcgtaaagtgagccggatggaacgcctcgtctacgaggtgcggcagaagtgcagaaacatcgaggacatctgcatctcctgcggatctctgaacgtgaccctggagcacccactgttcatcggcggcatgtgccagaactgtaaaaactgttttctggagtgtgcctatcaatacgacgatgacggctaccagagctactgcaccatctgttgcggcggaagagaggtgctgatgtgtggaaataacaactgctgccggtgcttctgcgtggaatgcgtggacctgctggtgggccccggcgccgcccaggccgctattaaggaagatccttggaactgctacatgtgcggccacaagggcacatacggcctgctgagacggagagaggactggcctagcagactgcagatgttcttcgccaataaccacgaccaggagttcgacccccctaaggtgtaccctcccgtccccgccgagaagagaaagcccatccgggtcctgagcctgttcgatggcatcgccaccggtctgctggtgctgaaggacctgggcatccaggtggataggtacattgcctccgaggtgtgcgaggactccatcaccgtgggaatggtgcgtcatcagggcaagatcatgtacgtgggcgacgtgcggagcgtgacacagaagcatatccaggagtggggccctttcgacctggtgatcggcggcagcccttgcaatgacctgagcatcgtgaacccagcccggaagggcctgtacgagggaaccggcagactgttcttcgagttttacagactgctgcacgacgcccggcctaaggaaggcgacgaccggcccttcttttggctgttcgagaatgtggtggccatgggagtcagcgacaagcgggatattagccggttcctggagagcaaccccgtgatgatcgatgccaaggaagtgagcgccgcccaccgggccagatacttctggggcaatctgcctggcatgaacagacccctggccagcaccgtgaacgacaagctggagctgcaggagtgcctggagcacggccggatcgccaagttcagcaaggtgagaaccatcaccacccgaagcaacagcatcaaacaaggcaaggaccagcactttcctgtgttcatgaacgagaaggaggacatcctgtggtgtaccgagatggagagagtgttcgggttcccagtccactacacagatgtcagcaacatgtctagactggccagacagagactgctgggaagaagctggtccgtccctgtgatcagacacctgttcgcccctctgaaggagtacttcgcctgcgtgagcagcggcaacagcaacgccaacagccggggccccagcttctctagcggcctggtgccactgtccctgagagggagccacatgggccccatggagatctacaaaaccgtgagcgcctggaagcggcagcctgtgcgcgtgctgagcctgtttcggaatatcgataaagtcctgaaaagcctgggattcctggagagcggctctggctccggcggtggcaccctgaagtacgtggaggatgtgacaaacgtggtcagacgggatgtggagaagtggggccccttcgatctggtgtacggcagcacccaacccctgggcagctcttgtgaccggtgccctggctggtacatgtttcagttccaccggatcctgcagtacgccctgccgagacaggagtcccagcggccattcttttggattttcatggacaacttgctgctgaccgaggatgaccaggaaactaccactcggttcctgcagaccgaagccgtgaccctgcaggacgtgagaggccgggactaccagaacgccatgcgggtgtggtccaacatccctggactgaaaagcaagcacgcacctctgacccctaaagaagaggagtacctgcaggcccaggtgcggagcagaagcaagctggacgcccctaaggtggatctgctggtgaagaattgcctcctgcccctgagagagtacttcaagtatttcagccagaatagtctgcccctgggaggcagcggcggcggcagcaaggcccccgtgaccttcggcgacctggtgatctacttcagccaggaggagtgggagtggctgagccccatccagaaggacctgtacgaggaggtgatgctggagaactaccacaccctggtgagcctgggcctggtgagcaggaggcccaacatcatcaccctgctggagaagggcaaggccccctggatggtggagcccagcaggaggaggaggggccccgagagcggcagcaagaggggcggcccaagcagcggcgcccctcctcccagcggcggcagcccagccggctccccaacctctaccgaggagggcacctctgagtccgccacccccgagagcggccctggcacctccaccgagcccagcgagggcagcgcacccggcagccctgccggcagccccacctccacagaggagggaaccagcaccgagcccagcgaaggcagcgccccaggcaccagcaccgagcctagtgagcaggagattaaacggatcaacaagatcagaagaagacttgtgaaagacagcaacaccaagaaggccggcaagacaggccccatgaaaaccctgctggttagagtgatgacacccgatctgagagagcggctggaaaacctgagaaagaagcctgaaaatatcccccagcccatcagcaatacatctagagccaacctgaataagctgctgaccgattacaccgaaatgaagaaggcgatcctgcatgtgtactgggaagagttccagaaggaccctgtgggcctgatgagccgggtggcccagcctgccagcaagaagatcgatcagaacaagctgaaacctgagatggacgagaagggcaacctgaccaccgccggctttgcctgctctcagtgtggccagcccctgttcgtgtacaagctggagcaggtgtctgagaagggcaaggcttacaccaactacttcggacggtgcaatgtggccgagcacgaaaagctgatcctgctggcccagctgaagcccgagaaggatagcgacgaagccgtgacatatagcctgggaaagtttgggcagagggccctggatttctacagcattcatgtgaccaaggagtccacccaccccgtgaagcccctggcccagatcgccggaaacagatacgcctccggacctgtgggaaaggccctgagcgacgcatgtatgggcacaatcgcctccttcctgtctaagtaccaggacatcatcatcgaacaccagaaggtggtgaagggcaaccagaagagactggagagcctgcgggagctggccggcaaggaaaacctggaataccctagcgtgaccctgccacctcagcctcacaccaaggagggcgttgatgcctacaacgaagtgatcgcccgggtgcgaatgtgggtgaacctgaacctgtggcagaagctgaagctaagcagagatgatgccaagcctctgctgagactgaagggattcccttcctttcctctggtcgagagacaggccaacgaagtggactggtgggacatggtgtgtaacgtgaagaagctgatcaacgagaaaaaggaggatggcaaggtgttttggcagaatctggctggctacaagagacaggaagccctgagaccatacctgagcagcgaggaagatcggaagaagggaaagaaattcgctcggtaccagctgggcgacctgctgctgcacctggaaaagaagcacggcgaggactggggaaaggtgtacgacgaggcctgggagcggattgacaagaaagtggaaggcctgagcaagcacatcaagctggaagaggaacggagaagcgaggacgcccagagcaaggccgccctgaccgactggctgcgggctaaggccagcttcgtgatcgagggcctgaaggaggccgacaaggacgagttctgcagatgcgagctgaagctgcagaagtggtacggggacctgcggggaaagcccttcgccatcgaagccgagaacagcatcctggacatcagcggcttcagcaagcagtacaactgtgccttcatctggcagaaggacggcgtgaagaagctgaacctgtacctgatcatcaactacttcaagggcggcaagctgcggttcaagaagatcaaacctgaagccttcgaagccaacagattctacaccgtgatcaacaaaaagagcggcgagatcgtgcccatggaggtgaacttcaacttcgacgaccccaacctgatcatcctgcctctggcctttggcaagagacagggcagagaattcatctggaacgacctgctgtccctggaaaccggcagcctgaagctggccaacggaagagtgatcgagaagacactgtacaacagaagaacccggcaggatgagcctgccctgttcgtggccctgaccttcgagcggcgggaggtcctggactcctccaatatcaaaccaatgaacctgatcggcgtggcaagaggcgaaaacatccccgccgtgatcgccctgaccgaccccgagggctgcccactgagccggtttaaggatagcctgggaaacccaacccacatcctgagaatcggcgagagctataaggagaagcagcggaccatccaggccaagaaggaggtggagcagcggagagccggcggctacagccggaagtacgccagcaaagccaagaatctggcagacgatatggtgagaaacaccgctagagatctgctgtactacgccgtgacccaggatgccatgctgatcttcgccaacctgagccggggcttcggccggcagggcaagcggaccttcatggccgagagacagtacacacggatggaggactggctgaccgccaagctggcctacgagggcctgagcaagacctacctgtccaagacactggcccagtacacctccaagacatgcagcaactgtgggtttaccatcaccagcgccgactacgacagggtgctggagaagctgaagaagacagcaacaggctggatgaccacaattaacggcaaggagctgaaggtggagggccagattacctactacaacagatacaagagacagaacgtagtcaaggacctgtccgtcgagctggatagactgagcgaagaatctgtgaacaacgacatctcctcctggacaaagggcagaagcggagaagctctgagcctcctgaagaaaagattctcccatagacccgtgcaggagaagttcgtgtgcctgaactgcggcttcgagacacacgcagccgagcaagccgccctgaacatcgccagatcctggctgttcctgcggagccaggagtacaagaaataccagacaaacaagacaaccggcaacaccgataagagagccttcgtcgagacctggcagtccttttaccggaagaagcttaaggaggtgtggaaacctgccgtgcggtctggcggatctggcggaggctccaccagccccaagaaaaagagaaaagtctaagctgccttctgcggggcttgccttctggccatgcccttcttctctcccttgcacctgtacctcttggtctttgaataaagcctgagtaggaaggctagcaaaaaaaaaaaaaaaaaaaaaaaaaaaaaaaaaaaaaaaaaaaaaaaaaaaaaaaaaaaaaaaaaaaaaaaaaaaaaaaa

SEQ ID NO: 12811 - RNA, 5785 nt, synthetic construct
  source 1..5785: mol_type = other RNA
aggaaataagagagaaaagaagagtaagaagaaatataagagccaccatggcccctaagaagaagcgtaaagtgagccggatggaacgcctcgtctacgaggtgcggcagaagtgcagaaacatcgaggacatctgcatctcctgcggatctctgaacgtgaccctggagcacccactgttcatcggcggcatgtgccagaactgtaaaaactgttttctggagtgtgcctatcaatacgacgatgacggctaccagagctactgcaccatctgttgcggcggaagagaggtgctgatgtgtggaaataacaactgctgccggtgcttctgcgtggaatgcgtggacctgctggtgggccccggcgccgcccaggccgctattaaggaagatccttggaactgctacatgtgcggccacaagggcacatacggcctgctgagacggagagaggactggcctagcagactgcagatgttcttcgccaataaccacgaccaggagttcgacccccctaaggtgtaccctcccgtccccgccgagaagagaaagcccatccgggtcctgagcctgttcgatggcatcgccaccggtctgctggtgctgaaggacctgggcatccaggtggataggtacattgcctccgaggtgtgcgaggactccatcaccgtgggaatggtgcgtcatcagggcaagatcatgtacgtgggcgacgtgcggagcgtgacacagaagcatatccaggagtggggccctttcgacctggtgatcggcggcagcccttgcaatgacctgagcatcgtgaacccagcccggaagggcctgtacgagggaaccggcagactgttcttcgagttttacagactgctgcacgacgcccggcctaaggaaggcgacgaccggcccttcttttggctgttcgagaatgtggtggccatgggagtcagcgacaagcgggatattagccggttcctggagagcaaccccgtgatgatcgatgccaaggaagtgagcgccgcccaccgggccagatacttctggggcaatctgcctggcatgaacagacccctggccagcaccgtgaacgacaagctggagctgcaggagtgcctggagcacggccggatcgccaagttcagcaaggtgagaaccatcaccacccgaagcaacagcatcaaacaaggcaaggaccagcactttcctgtgttcatgaacgagaaggaggacatcctgtggtgtaccgagatggagagagtgttcgggttcccagtccactacacagatgtcagcaacatgtctagactggccagacagagactgctgggaagaagctggtccgtccctgtgatcagacacctgttcgcccctctgaaggagtacttcgcctgcgtgagcagcggcaacagcaacgccaacagccggggccccagcttctctagcggcctggtgccactgtccctgagagggagccacatgggccccatggagatctacaaaaccgtgagcgcctggaagcggcagcctgtgcgcgtgctgagcctgtttcggaatatcgataaagtcctgaaaagcctgggattcctggagagcggctctggctccggcggtggcaccctgaagtacgtggaggatgtgacaaacgtggtcagacgggatgtggagaagtggggccccttcgatctggtgtacggcagcacccaacccctgggcagctcttgtgaccggtgccctggctggtacatgtttcagttccaccggatcctgcagtacgccctgccgagacaggagtcccagcggccattcttttggattttcatggacaacttgctgctgaccgaggatgaccaggaaactaccactcggttcctgcagaccgaagccgtgaccctgcaggacgtgagaggccgggactaccagaacgccatgcgggtgtggtccaacatccctggactgaaaagcaagcacgcacctctgacccctaaagaagaggagtacctgcaggcccaggtgcggagcagaagcaagctggacgcccctaaggtggatctgctggtgaagaattgcctcctgcccctgagagagtacttcaagtatttcagccagaatagtctgcccctgggaggcagcggcggcggcgagcccgtgagcttcgaggaggtggccgtgtacttcagcagggaggagtgggccctgctggaccccgcccagagggccctgtactgggacgtgatgctggagacctacgagtgcgtggccagcctggcccccctgcccggccccaagcccatggtgatcagcctgctggaggagggcgaggagccctggatccccgacgtgggcagccccgaggccgtggccggcgacgtgagccccggcgagggcggcccaagcagcggcgcccctcctcccagcggcggcagcccagccggctccccaacctctaccgaggagggcacctctgagtccgccacccccgagagcggccctggcacctccaccgagcccagcgagggcagcgcacccggcagccctgccggcagccccacctccacagaggagggaaccagcaccgagcccagcgaaggcagcgccccaggcaccagcaccgagcctagtgagcaggagattaaacggatcaacaagatcagaagaagacttgtgaaagacagcaacaccaagaaggccggcaagacaggccccatgaaaaccctgctggttagagtgatgacacccgatctgagagagcggctggaaaacctgagaaagaagcctgaaaatatcccccagcccatcagcaatacatctagagccaacctgaataagctgctgaccgattacaccgaaatgaagaaggcgatcctgcatgtgtactgggaagagttccagaaggaccctgtgggcctgatgagccgggtggcccagcctgccagcaagaagatcgatcagaacaagctgaaacctgagatggacgagaagggcaacctgaccaccgccggctttgcctgctctcagtgtggccagcccctgttcgtgtacaagctggagcaggtgtctgagaagggcaaggcttacaccaactacttcggacggtgcaatgtggccgagcacgaaaagctgatcctgctggcccagctgaagcccgagaaggatagcgacgaagccgtgacatatagcctgggaaagtttgggcagagggccctggatttctacagcattcatgtgaccaaggagtccacccaccccgtgaagcccctggcccagatcgccggaaacagatacgcctccggacctgtgggaaaggccctgagcgacgcatgtatgggcacaatcgcctccttcctgtctaagtaccaggacatcatcatcgaacaccagaaggtggtgaagggcaaccagaagagactggagagcctgcgggagctggccggcaaggaaaacctggaataccctagcgtgaccctgccacctcagcctcacaccaaggagggcgttgatgcctacaacgaagtgatcgcccgggtgcgaatgtgggtgaacctgaacctgtggcagaagctgaagctaagcagagatgatgccaagcctctgctgagactgaagggattcccttcctttcctctggtcgagagacaggccaacgaagtggactggtgggacatggtgtgtaacgtgaagaagctgatcaacgagaaaaaggaggatggcaaggtgttttggcagaatctggctggctacaagagacaggaagccctgagaccatacctgagcagcgaggaagatcggaagaagggaaagaaattcgctcggtaccagctgggcgacctgctgctgcacctggaaaagaagcacggcgaggactggggaaaggtgtacgacgaggcctgggagcggattgacaagaaagtggaaggcctgagcaagcacatcaagctggaagaggaacggagaagcgaggacgcccagagcaaggccgccctgaccgactggctgcgggctaaggccagcttcgtgatcgagggcctgaaggaggccgacaaggacgagttctgcagatgcgagctgaagctgcagaagtggtacggggacctgcggggaaagcccttcgccatcgaagccgagaacagcatcctggacatcagcggcttcagcaagcagtacaactgtgccttcatctggcagaaggacggcgtgaagaagctgaacctgtacctgatcatcaactacttcaagggcggcaagctgcggttcaagaagatcaaacctgaagccttcgaagccaacagattctacaccgtgatcaacaaaaagagcggcgagatcgtgcccatggaggtgaacttcaacttcgacgaccccaacctgatcatcctgcctctggcctttggcaagagacagggcagagaattcatctggaacgacctgctgtccctggaaaccggcagcctgaagctggccaacggaagagtgatcgagaagacactgtacaacagaagaacccggcaggatgagcctgccctgttcgtggccctgaccttcgagcggcgggaggtcctggactcctccaatatcaaaccaatgaacctgatcggcgtggcaagaggcgaaaacatccccgccgtgatcgccctgaccgaccccgagggctgcccactgagccggtttaaggatagcctgggaaacccaacccacatcctgagaatcggcgagagctataaggagaagcagcggaccatccaggccaagaaggaggtggagcagcggagagccggcggctacagccggaagtacgccagcaaagccaagaatctggcagacgatatggtgagaaacaccgctagagatctgctgtactacgccgtgacccaggatgccatgctgatcttcgccaacctgagccggggcttcggccggcagggcaagcggaccttcatggccgagagacagtacacacggatggaggactggctgaccgccaagctggcctacgagggcctgagcaagacctacctgtccaagacactggcccagtacacctccaagacatgcagcaactgtgggtttaccatcaccagcgccgactacgacagggtgctggagaagctgaagaagacagcaacaggctggatgaccacaattaacggcaaggagctgaaggtggagggccagattacctactacaacagatacaagagacagaacgtagtcaaggacctgtccgtcgagctggatagactgagcgaagaatctgtgaacaacgacatctcctcctggacaaagggcagaagcggagaagctctgagcctcctgaagaaaagattctcccatagacccgtgcaggagaagttcgtgtgcctgaactgcggcttcgagacacacgcagccgagcaagccgccctgaacatcgccagatcctggctgttcctgcggagccaggagtacaagaaataccagacaaacaagacaaccggcaacaccgataagagagccttcgtcgagacctggcagtccttttaccggaagaagcttaaggaggtgtggaaacctgccgtgcggtctggcggatctggcggaggctccaccagccccaagaaaaagagaaaagtctaagctgccttctgcggggcttgccttctggccatgcccttcttctctcccttgcacctgtacctcttggtctttgaataaagcctgagtaggaaggctagcaaaaaaaaaaaaaaaaaaaaaaaaaaaaaaaaaaaaaaaaaaaaaaaaaaaaaaaaaaaaaaaaaaaaaaaaaaaaaaaa

SEQ ID NO: 12812 - RNA, 5785 nt, synthetic construct
  source 1..5785: mol_type = other RNA
aggaaataagagagaaaagaagagtaagaagaaatataagagccaccatggcccctaagaagaagcgtaaagtgagccggatggaacgcctcgtctacgaggtgcggcagaagtgcagaaacatcgaggacatctgcatctcctgcggatctctgaacgtgaccctggagcacccactgttcatcggcggcatgtgccagaactgtaaaaactgttttctggagtgtgcctatcaatacgacgatgacggctaccagagctactgcaccatctgttgcggcggaagagaggtgctgatgtgtggaaataacaactgctgccggtgcttctgcgtggaatgcgtggacctgctggtgggccccggcgccgcccaggccgctattaaggaagatccttggaactgctacatgtgcggccacaagggcacatacggcctgctgagacggagagaggactggcctagcagactgcagatgttcttcgccaataaccacgaccaggagttcgacccccctaaggtgtaccctcccgtccccgccgagaagagaaagcccatccgggtcctgagcctgttcgatggcatcgccaccggtctgctggtgctgaaggacctgggcatccaggtggataggtacattgcctccgaggtgtgcgaggactccatcaccgtgggaatggtgcgtcatcagggcaagatcatgtacgtgggcgacgtgcggagcgtgacacagaagcatatccaggagtggggccctttcgacctggtgatcggcggcagcccttgcaatgacctgagcatcgtgaacccagcccggaagggcctgtacgagggaaccggcagactgttcttcgagttttacagactgctgcacgacgcccggcctaaggaaggcgacgaccggcccttcttttggctgttcgagaatgtggtggccatgggagtcagcgacaagcgggatattagccggttcctggagagcaaccccgtgatgatcgatgccaaggaagtgagcgccgcccaccgggccagatacttctggggcaatctgcctggcatgaacagacccctggccagcaccgtgaacgacaagctggagctgcaggagtgcctggagcacggccggatcgccaagttcagcaaggtgagaaccatcaccacccgaagcaacagcatcaaacaaggcaaggaccagcactttcctgtgttcatgaacgagaaggaggacatcctgtggtgtaccgagatggagagagtgttcgggttcccagtccactacacagatgtcagcaacatgtctagactggccagacagagactgctgggaagaagctggtccgtccctgtgatcagacacctgttcgcccctctgaaggagtacttcgcctgcgtgagcagcggcaacagcaacgccaacagccggggccccagcttctctagcggcctggtgccactgtccctgagagggagccacatgggccccatggagatctacaaaaccgtgagcgcctggaagcggcagcctgtgcgcgtgctgagcctgtttcggaatatcgataaagtcctgaaaagcctgggattcctggagagcggctctggctccggcggtggcaccctgaagtacgtggaggatgtgacaaacgtggtcagacgggatgtggagaagtggggccccttcgatctggtgtacggcagcacccaacccctgggcagctcttgtgaccggtgccctggctggtacatgtttcagttccaccggatcctgcagtacgccctgccgagacaggagtcccagcggccattcttttggattttcatggacaacttgctgctgaccgaggatgaccaggaaactaccactcggttcctgcagaccgaagccgtgaccctgcaggacgtgagaggccgggactaccagaacgccatgcgggtgtggtccaacatccctggactgaaaagcaagcacgcacctctgacccctaaagaagaggagtacctgcaggcccaggtgcggagcagaagcaagctggacgcccctaaggtggatctgctggtgaagaattgcctcctgcccctgagagagtacttcaagtatttcagccagaatagtctgcccctgggaggcagcggcggcggcgcccagggcagcctgaccctgaaggacgtggccgtggacttcacctgggaggagtggcagctgctggaccccgaccagaaggacctgtacagggacgtgatgctggagaactacagcaacctggtgagcgtgggctaccaggtgaacaagcccgacatcctgagcatgctggagcagggcgagcccccctggaccctggaggacgaggtgcacagccacccccaccccgagaccgacaaggtgggcggcccaagcagcggcgcccctcctcccagcggcggcagcccagccggctccccaacctctaccgaggagggcacctctgagtccgccacccccgagagcggccctggcacctccaccgagcccagcgagggcagcgcacccggcagccctgccggcagccccacctccacagaggagggaaccagcaccgagcccagcgaaggcagcgccccaggcaccagcaccgagcctagtgagcaggagattaaacggatcaacaagatcagaagaagacttgtgaaagacagcaacaccaagaaggccggcaagacaggccccatgaaaaccctgctggttagagtgatgacacccgatctgagagagcggctggaaaacctgagaaagaagcctgaaaatatcccccagcccatcagcaatacatctagagccaacctgaataagctgctgaccgattacaccgaaatgaagaaggcgatcctgcatgtgtactgggaagagttccagaaggaccctgtgggcctgatgagccgggtggcccagcctgccagcaagaagatcgatcagaacaagctgaaacctgagatggacgagaagggcaacctgaccaccgccggctttgcctgctctcagtgtggccagcccctgttcgtgtacaagctggagcaggtgtctgagaagggcaaggcttacaccaactacttcggacggtgcaatgtggccgagcacgaaaagctgatcctgctggcccagctgaagcccgagaaggatagcgacgaagccgtgacatatagcctgggaaagtttgggcagagggccctggatttctacagcattcatgtgaccaaggagtccacccaccccgtgaagcccctggcccagatcgccggaaacagatacgcctccggacctgtgggaaaggccctgagcgacgcatgtatgggcacaatcgcctccttcctgtctaagtaccaggacatcatcatcgaacaccagaaggtggtgaagggcaaccagaagagactggagagcctgcgggagctggccggcaaggaaaacctggaataccctagcgtgaccctgccacctcagcctcacaccaaggagggcgttgatgcctacaacgaagtgatcgcccgggtgcgaatgtgggtgaacctgaacctgtggcagaagctgaagctaagcagagatgatgccaagcctctgctgagactgaagggattcccttcctttcctctggtcgagagacaggccaacgaagtggactggtgggacatggtgtgtaacgtgaagaagctgatcaacgagaaaaaggaggatggcaaggtgttttggcagaatctggctggctacaagagacaggaagccctgagaccatacctgagcagcgaggaagatcggaagaagggaaagaaattcgctcggtaccagctgggcgacctgctgctgcacctggaaaagaagcacggcgaggactggggaaaggtgtacgacgaggcctgggagcggattgacaagaaagtggaaggcctgagcaagcacatcaagctggaagaggaacggagaagcgaggacgcccagagcaaggccgccctgaccgactggctgcgggctaaggccagcttcgtgatcgagggcctgaaggaggccgacaaggacgagttctgcagatgcgagctgaagctgcagaagtggtacggggacctgcggggaaagcccttcgccatcgaagccgagaacagcatcctggacatcagcggcttcagcaagcagtacaactgtgccttcatctggcagaaggacggcgtgaagaagctgaacctgtacctgatcatcaactacttcaagggcggcaagctgcggttcaagaagatcaaacctgaagccttcgaagccaacagattctacaccgtgatcaacaaaaagagcggcgagatcgtgcccatggaggtgaacttcaacttcgacgaccccaacctgatcatcctgcctctggcctttggcaagagacagggcagagaattcatctggaacgacctgctgtccctggaaaccggcagcctgaagctggccaacggaagagtgatcgagaagacactgtacaacagaagaacccggcaggatgagcctgccctgttcgtggccctgaccttcgagcggcgggaggtcctggactcctccaatatcaaaccaatgaacctgatcggcgtggcaagaggcgaaaacatccccgccgtgatcgccctgaccgaccccgagggctgcccactgagccggtttaaggatagcctgggaaacccaacccacatcctgagaatcggcgagagctataaggagaagcagcggaccatccaggccaagaaggaggtggagcagcggagagccggcggctacagccggaagtacgccagcaaagccaagaatctggcagacgatatggtgagaaacaccgctagagatctgctgtactacgccgtgacccaggatgccatgctgatcttcgccaacctgagccggggcttcggccggcagggcaagcggaccttcatggccgagagacagtacacacggatggaggactggctgaccgccaagctggcctacgagggcctgagcaagacctacctgtccaagacactggcccagtacacctccaagacatgcagcaactgtgggtttaccatcaccagcgccgactacgacagggtgctggagaagctgaagaagacagcaacaggctggatgaccacaattaacggcaaggagctgaaggtggagggccagattacctactacaacagatacaagagacagaacgtagtcaaggacctgtccgtcgagctggatagactgagcgaagaatctgtgaacaacgacatctcctcctggacaaagggcagaagcggagaagctctgagcctcctgaagaaaagattctcccatagacccgtgcaggagaagttcgtgtgcctgaactgcggcttcgagacacacgcagccgagcaagccgccctgaacatcgccagatcctggctgttcctgcggagccaggagtacaagaaataccagacaaacaagacaaccggcaacaccgataagagagccttcgtcgagacctggcagtccttttaccggaagaagcttaaggaggtgtggaaacctgccgtgcggtctggcggatctggcggaggctccaccagccccaagaaaaagagaaaagtctaagctgccttctgcggggcttgccttctggccatgcccttcttctctcccttgcacctgtacctcttggtctttgaataaagcctgagtaggaaggctagcaaaaaaaaaaaaaaaaaaaaaaaaaaaaaaaaaaaaaaaaaaaaaaaaaaaaaaaaaaaaaaaaaaaaaaaaaaaaaaaa

SEQ ID NO: 12813 - RNA, 5785 nt, synthetic construct
  source 1..5785: mol_type = other RNA
aggaaataagagagaaaagaagagtaagaagaaatataagagccaccatggcccctaagaagaagcgtaaagtgagccggatggaacgcctcgtctacgaggtgcggcagaagtgcagaaacatcgaggacatctgcatctcctgcggatctctgaacgtgaccctggagcacccactgttcatcggcggcatgtgccagaactgtaaaaactgttttctggagtgtgcctatcaatacgacgatgacggctaccagagctactgcaccatctgttgcggcggaagagaggtgctgatgtgtggaaataacaactgctgccggtgcttctgcgtggaatgcgtggacctgctggtgggccccggcgccgcccaggccgctattaaggaagatccttggaactgctacatgtgcggccacaagggcacatacggcctgctgagacggagagaggactggcctagcagactgcagatgttcttcgccaataaccacgaccaggagttcgacccccctaaggtgtaccctcccgtccccgccgagaagagaaagcccatccgggtcctgagcctgttcgatggcatcgccaccggtctgctggtgctgaaggacctgggcatccaggtggataggtacattgcctccgaggtgtgcgaggactccatcaccgtgggaatggtgcgtcatcagggcaagatcatgtacgtgggcgacgtgcggagcgtgacacagaagcatatccaggagtggggccctttcgacctggtgatcggcggcagcccttgcaatgacctgagcatcgtgaacccagcccggaagggcctgtacgagggaaccggcagactgttcttcgagttttacagactgctgcacgacgcccggcctaaggaaggcgacgaccggcccttcttttggctgttcgagaatgtggtggccatgggagtcagcgacaagcgggatattagccggttcctggagagcaaccccgtgatgatcgatgccaaggaagtgagcgccgcccaccgggccagatacttctggggcaatctgcctggcatgaacagacccctggccagcaccgtgaacgacaagctggagctgcaggagtgcctggagcacggccggatcgccaagttcagcaaggtgagaaccatcaccacccgaagcaacagcatcaaacaaggcaaggaccagcactttcctgtgttcatgaacgagaaggaggacatcctgtggtgtaccgagatggagagagtgttcgggttcccagtccactacacagatgtcagcaacatgtctagactggccagacagagactgctgggaagaagctggtccgtccctgtgatcagacacctgttcgcccctctgaaggagtacttcgcctgcgtgagcagcggcaacagcaacgccaacagccggggccccagcttctctagcggcctggtgccactgtccctgagagggagccacatgggccccatggagatctacaaaaccgtgagcgcctggaagcggcagcctgtgcgcgtgctgagcctgtttcggaatatcgataaagtcctgaaaagcctgggattcctggagagcggctctggctccggcggtggcaccctgaagtacgtggaggatgtgacaaacgtggtcagacgggatgtggagaagtggggccccttcgatctggtgtacggcagcacccaacccctgggcagctcttgtgaccggtgccctggctggtacatgtttcagttccaccggatcctgcagtacgccctgccgagacaggagtcccagcggccattcttttggattttcatggacaacttgctgctgaccgaggatgaccaggaaactaccactcggttcctgcagaccgaagccgtgaccctgcaggacgtgagaggccgggactaccagaacgccatgcgggtgtggtccaacatccctggactgaaaagcaagcacgcacctctgacccctaaagaagaggagtacctgcaggcccaggtgcggagcagaagcaagctggacgcccctaaggtggatctgctggtgaagaattgcctcctgcccctgagagagtacttcaagtatttcagccagaatagtctgcccctgggaggcagcggcggcggcatgttccaggacagcgtggccttcgaggacgtggccgtgaccttcacccaggaggagtgggccctgctggaccccagccagaagaccctgtacagggacgtgatgcaggagaacttcaggaacctggccagcgtgggcaagaagtggaaggcccagaacatctacgtggagtacaagaacctgaggaggaacctgaggaacctgatgggcaagaggctgttcgagagcaaggaggaccaccagggcggcccaagcagcggcgcccctcctcccagcggcggcagcccagccggctccccaacctctaccgaggagggcacctctgagtccgccacccccgagagcggccctggcacctccaccgagcccagcgagggcagcgcacccggcagccctgccggcagccccacctccacagaggagggaaccagcaccgagcccagcgaaggcagcgccccaggcaccagcaccgagcctagtgagcaggagattaaacggatcaacaagatcagaagaagacttgtgaaagacagcaacaccaagaaggccggcaagacaggccccatgaaaaccctgctggttagagtgatgacacccgatctgagagagcggctggaaaacctgagaaagaagcctgaaaatatcccccagcccatcagcaatacatctagagccaacctgaataagctgctgaccgattacaccgaaatgaagaaggcgatcctgcatgtgtactgggaagagttccagaaggaccctgtgggcctgatgagccgggtggcccagcctgccagcaagaagatcgatcagaacaagctgaaacctgagatggacgagaagggcaacctgaccaccgccggctttgcctgctctcagtgtggccagcccctgttcgtgtacaagctggagcaggtgtctgagaagggcaaggcttacaccaactacttcggacggtgcaatgtggccgagcacgaaaagctgatcctgctggcccagctgaagcccgagaaggatagcgacgaagccgtgacatatagcctgggaaagtttgggcagagggccctggatttctacagcattcatgtgaccaaggagtccacccaccccgtgaagcccctggcccagatcgccggaaacagatacgcctccggacctgtgggaaaggccctgagcgacgcatgtatgggcacaatcgcctccttcctgtctaagtaccaggacatcatcatcgaacaccagaaggtggtgaagggcaaccagaagagactggagagcctgcgggagctggccggcaaggaaaacctggaataccctagcgtgaccctgccacctcagcctcacaccaaggagggcgttgatgcctacaacgaagtgatcgcccgggtgcgaatgtgggtgaacctgaacctgtggcagaagctgaagctaagcagagatgatgccaagcctctgctgagactgaagggattcccttcctttcctctggtcgagagacaggccaacgaagtggactggtgggacatggtgtgtaacgtgaagaagctgatcaacgagaaaaaggaggatggcaaggtgttttggcagaatctggctggctacaagagacaggaagccctgagaccatacctgagcagcgaggaagatcggaagaagggaaagaaattcgctcggtaccagctgggcgacctgctgctgcacctggaaaagaagcacggcgaggactggggaaaggtgtacgacgaggcctgggagcggattgacaagaaagtggaaggcctgagcaagcacatcaagctggaagaggaacggagaagcgaggacgcccagagcaaggccgccctgaccgactggctgcgggctaaggccagcttcgtgatcgagggcctgaaggaggccgacaaggacgagttctgcagatgcgagctgaagctgcagaagtggtacggggacctgcggggaaagcccttcgccatcgaagccgagaacagcatcctggacatcagcggcttcagcaagcagtacaactgtgccttcatctggcagaaggacggcgtgaagaagctgaacctgtacctgatcatcaactacttcaagggcggcaagctgcggttcaagaagatcaaacctgaagccttcgaagccaacagattctacaccgtgatcaacaaaaagagcggcgagatcgtgcccatggaggtgaacttcaacttcgacgaccccaacctgatcatcctgcctctggcctttggcaagagacagggcagagaattcatctggaacgacctgctgtccctggaaaccggcagcctgaagctggccaacggaagagtgatcgagaagacactgtacaacagaagaacccggcaggatgagcctgccctgttcgtggccctgaccttcgagcggcgggaggtcctggactcctccaatatcaaaccaatgaacctgatcggcgtggcaagaggcgaaaacatccccgccgtgatcgccctgaccgaccccgagggctgcccactgagccggtttaaggatagcctgggaaacccaacccacatcctgagaatcggcgagagctataaggagaagcagcggaccatccaggccaagaaggaggtggagcagcggagagccggcggctacagccggaagtacgccagcaaagccaagaatctggcagacgatatggtgagaaacaccgctagagatctgctgtactacgccgtgacccaggatgccatgctgatcttcgccaacctgagccggggcttcggccggcagggcaagcggaccttcatggccgagagacagtacacacggatggaggactggctgaccgccaagctggcctacgagggcctgagcaagacctacctgtccaagacactggcccagtacacctccaagacatgcagcaactgtgggtttaccatcaccagcgccgactacgacagggtgctggagaagctgaagaagacagcaacaggctggatgaccacaattaacggcaaggagctgaaggtggagggccagattacctactacaacagatacaagagacagaacgtagtcaaggacctgtccgtcgagctggatagactgagcgaagaatctgtgaacaacgacatctcctcctggacaaagggcagaagcggagaagctctgagcctcctgaagaaaagattctcccatagacccgtgcaggagaagttcgtgtgcctgaactgcggcttcgagacacacgcagccgagcaagccgccctgaacatcgccagatcctggctgttcctgcggagccaggagtacaagaaataccagacaaacaagacaaccggcaacaccgataagagagccttcgtcgagacctggcagtccttttaccggaagaagcttaaggaggtgtggaaacctgccgtgcggtctggcggatctggcggaggctccaccagccccaagaaaaagagaaaagtctaagctgccttctgcggggcttgccttctggccatgcccttcttctctcccttgcacctgtacctcttggtctttgaataaagcctgagtaggaaggctagcaaaaaaaaaaaaaaaaaaaaaaaaaaaaaaaaaaaaaaaaaaaaaaaaaaaaaaaaaaaaaaaaaaaaaaaaaaaaaaaa

SEQ ID NO: 12814 - RNA, 5785 nt, synthetic construct
  source 1..5785: mol_type = other RNA
aggaaataagagagaaaagaagagtaagaagaaatataagagccaccatggcccctaagaagaagcgtaaagtgagccggatggaacgcctcgtctacgaggtgcggcagaagtgcagaaacatcgaggacatctgcatctcctgcggatctctgaacgtgaccctggagcacccactgttcatcggcggcatgtgccagaactgtaaaaactgttttctggagtgtgcctatcaatacgacgatgacggctaccagagctactgcaccatctgttgcggcggaagagaggtgctgatgtgtggaaataacaactgctgccggtgcttctgcgtggaatgcgtggacctgctggtgggccccggcgccgcccaggccgctattaaggaagatccttggaactgctacatgtgcggccacaagggcacatacggcctgctgagacggagagaggactggcctagcagactgcagatgttcttcgccaataaccacgaccaggagttcgacccccctaaggtgtaccctcccgtccccgccgagaagagaaagcccatccgggtcctgagcctgttcgatggcatcgccaccggtctgctggtgctgaaggacctgggcatccaggtggataggtacattgcctccgaggtgtgcgaggactccatcaccgtgggaatggtgcgtcatcagggcaagatcatgtacgtgggcgacgtgcggagcgtgacacagaagcatatccaggagtggggccctttcgacctggtgatcggcggcagcccttgcaatgacctgagcatcgtgaacccagcccggaagggcctgtacgagggaaccggcagactgttcttcgagttttacagactgctgcacgacgcccggcctaaggaaggcgacgaccggcccttcttttggctgttcgagaatgtggtggccatgggagtcagcgacaagcgggatattagccggttcctggagagcaaccccgtgatgatcgatgccaaggaagtgagcgccgcccaccgggccagatacttctggggcaatctgcctggcatgaacagacccctggccagcaccgtgaacgacaagctggagctgcaggagtgcctggagcacggccggatcgccaagttcagcaaggtgagaaccatcaccacccgaagcaacagcatcaaacaaggcaaggaccagcactttcctgtgttcatgaacgagaaggaggacatcctgtggtgtaccgagatggagagagtgttcgggttcccagtccactacacagatgtcagcaacatgtctagactggccagacagagactgctgggaagaagctggtccgtccctgtgatcagacacctgttcgcccctctgaaggagtacttcgcctgcgtgagcagcggcaacagcaacgccaacagccggggccccagcttctctagcggcctggtgccactgtccctgagagggagccacatgggccccatggagatctacaaaaccgtgagcgcctggaagcggcagcctgtgcgcgtgctgagcctgtttcggaatatcgataaagtcctgaaaagcctgggattcctggagagcggctctggctccggcggtggcaccctgaagtacgtggaggatgtgacaaacgtggtcagacgggatgtggagaagtggggccccttcgatctggtgtacggcagcacccaacccctgggcagctcttgtgaccggtgccctggctggtacatgtttcagttccaccggatcctgcagtacgccctgccgagacaggagtcccagcggccattcttttggattttcatggacaacttgctgctgaccgaggatgaccaggaaactaccactcggttcctgcagaccgaagccgtgaccctgcaggacgtgagaggccgggactaccagaacgccatgcgggtgtggtccaacatccctggactgaaaagcaagcacgcacctctgacccctaaagaagaggagtacctgcaggcccaggtgcggagcagaagcaagctggacgcccctaaggtggatctgctggtgaagaattgcctcctgcccctgagagagtacttcaagtatttcagccagaatagtctgcccctgggaggcagcggcggcggcttcctgctgggcctgctgaccttcagggacgtggccatcgagttcagccaggaggagtggggctgcctgaaccacacccagagggagctgtacagggacgtgatgctggagaactacggccacctgctgttcctgggcctgatcgtgagcaagcccgacctggtgagcttcctggagcagaagaaggagccctgggacgtgaagaggaagaagaccgtggccatccacaggggcaggtgggagggcggcccaagcagcggcgcccctcctcccagcggcggcagcccagccggctccccaacctctaccgaggagggcacctctgagtccgccacccccgagagcggccctggcacctccaccgagcccagcgagggcagcgcacccggcagccctgccggcagccccacctccacagaggagggaaccagcaccgagcccagcgaaggcagcgccccaggcaccagcaccgagcctagtgagcaggagattaaacggatcaacaagatcagaagaagacttgtgaaagacagcaacaccaagaaggccggcaagacaggccccatgaaaaccctgctggttagagtgatgacacccgatctgagagagcggctggaaaacctgagaaagaagcctgaaaatatcccccagcccatcagcaatacatctagagccaacctgaataagctgctgaccgattacaccgaaatgaagaaggcgatcctgcatgtgtactgggaagagttccagaaggaccctgtgggcctgatgagccgggtggcccagcctgccagcaagaagatcgatcagaacaagctgaaacctgagatggacgagaagggcaacctgaccaccgccggctttgcctgctctcagtgtggccagcccctgttcgtgtacaagctggagcaggtgtctgagaagggcaaggcttacaccaactacttcggacggtgcaatgtggccgagcacgaaaagctgatcctgctggcccagctgaagcccgagaaggatagcgacgaagccgtgacatatagcctgggaaagtttgggcagagggccctggatttctacagcattcatgtgaccaaggagtccacccaccccgtgaagcccctggcccagatcgccggaaacagatacgcctccggacctgtgggaaaggccctgagcgacgcatgtatgggcacaatcgcctccttcctgtctaagtaccaggacatcatcatcgaacaccagaaggtggtgaagggcaaccagaagagactggagagcctgcgggagctggccggcaaggaaaacctggaataccctagcgtgaccctgccacctcagcctcacaccaaggagggcgttgatgcctacaacgaagtgatcgcccgggtgcgaatgtgggtgaacctgaacctgtggcagaagctgaagctaagcagagatgatgccaagcctctgctgagactgaagggattcccttcctttcctctggtcgagagacaggccaacgaagtggactggtgggacatggtgtgtaacgtgaagaagctgatcaacgagaaaaaggaggatggcaaggtgttttggcagaatctggctggctacaagagacaggaagccctgagaccatacctgagcagcgaggaagatcggaagaagggaaagaaattcgctcggtaccagctgggcgacctgctgctgcacctggaaaagaagcacggcgaggactggggaaaggtgtacgacgaggcctgggagcggattgacaagaaagtggaaggcctgagcaagcacatcaagctggaagaggaacggagaagcgaggacgcccagagcaaggccgccctgaccgactggctgcgggctaaggccagcttcgtgatcgagggcctgaaggaggccgacaaggacgagttctgcagatgcgagctgaagctgcagaagtggtacggggacctgcggggaaagcccttcgccatcgaagccgagaacagcatcctggacatcagcggcttcagcaagcagtacaactgtgccttcatctggcagaaggacggcgtgaagaagctgaacctgtacctgatcatcaactacttcaagggcggcaagctgcggttcaagaagatcaaacctgaagccttcgaagccaacagattctacaccgtgatcaacaaaaagagcggcgagatcgtgcccatggaggtgaacttcaacttcgacgaccccaacctgatcatcctgcctctggcctttggcaagagacagggcagagaattcatctggaacgacctgctgtccctggaaaccggcagcctgaagctggccaacggaagagtgatcgagaagacactgtacaacagaagaacccggcaggatgagcctgccctgttcgtggccctgaccttcgagcggcgggaggtcctggactcctccaatatcaaaccaatgaacctgatcggcgtggcaagaggcgaaaacatccccgccgtgatcgccctgaccgaccccgagggctgcccactgagccggtttaaggatagcctgggaaacccaacccacatcctgagaatcggcgagagctataaggagaagcagcggaccatccaggccaagaaggaggtggagcagcggagagccggcggctacagccggaagtacgccagcaaagccaagaatctggcagacgatatggtgagaaacaccgctagagatctgctgtactacgccgtgacccaggatgccatgctgatcttcgccaacctgagccggggcttcggccggcagggcaagcggaccttcatggccgagagacagtacacacggatggaggactggctgaccgccaagctggcctacgagggcctgagcaagacctacctgtccaagacactggcccagtacacctccaagacatgcagcaactgtgggtttaccatcaccagcgccgactacgacagggtgctggagaagctgaagaagacagcaacaggctggatgaccacaattaacggcaaggagctgaaggtggagggccagattacctactacaacagatacaagagacagaacgtagtcaaggacctgtccgtcgagctggatagactgagcgaagaatctgtgaacaacgacatctcctcctggacaaagggcagaagcggagaagctctgagcctcctgaagaaaagattctcccatagacccgtgcaggagaagttcgtgtgcctgaactgcggcttcgagacacacgcagccgagcaagccgccctgaacatcgccagatcctggctgttcctgcggagccaggagtacaagaaataccagacaaacaagacaaccggcaacaccgataagagagccttcgtcgagacctggcagtccttttaccggaagaagcttaaggaggtgtggaaacctgccgtgcggtctggcggatctggcggaggctccaccagccccaagaaaaagagaaaagtctaagctgccttctgcggggcttgccttctggccatgcccttcttctctcccttgcacctgtacctcttggtctttgaataaagcctgagtaggaaggctagcaaaaaaaaaaaaaaaaaaaaaaaaaaaaaaaaaaaaaaaaaaaaaaaaaaaaaaaaaaaaaaaaaaaaaaaaaaaaaaaa

SEQ ID NO: 12815 - RNA, 5785 nt, synthetic construct
  source 1..5785: mol_type = other RNA
aggaaataagagagaaaagaagagtaagaagaaatataagagccaccatggcccctaagaagaagcgtaaagtgagccggatggaacgcctcgtctacgaggtgcggcagaagtgcagaaacatcgaggacatctgcatctcctgcggatctctgaacgtgaccctggagcacccactgttcatcggcggcatgtgccagaactgtaaaaactgttttctggagtgtgcctatcaatacgacgatgacggctaccagagctactgcaccatctgttgcggcggaagagaggtgctgatgtgtggaaataacaactgctgccggtgcttctgcgtggaatgcgtggacctgctggtgggccccggcgccgcccaggccgctattaaggaagatccttggaactgctacatgtgcggccacaagggcacatacggcctgctgagacggagagaggactggcctagcagactgcagatgttcttcgccaataaccacgaccaggagttcgacccccctaaggtgtaccctcccgtccccgccgagaagagaaagcccatccgggtcctgagcctgttcgatggcatcgccaccggtctgctggtgctgaaggacctgggcatccaggtggataggtacattgcctccgaggtgtgcgaggactccatcaccgtgggaatggtgcgtcatcagggcaagatcatgtacgtgggcgacgtgcggagcgtgacacagaagcatatccaggagtggggccctttcgacctggtgatcggcggcagcccttgcaatgacctgagcatcgtgaacccagcccggaagggcctgtacgagggaaccggcagactgttcttcgagttttacagactgctgcacgacgcccggcctaaggaaggcgacgaccggcccttcttttggctgttcgagaatgtggtggccatgggagtcagcgacaagcgggatattagccggttcctggagagcaaccccgtgatgatcgatgccaaggaagtgagcgccgcccaccgggccagatacttctggggcaatctgcctggcatgaacagacccctggccagcaccgtgaacgacaagctggagctgcaggagtgcctggagcacggccggatcgccaagttcagcaaggtgagaaccatcaccacccgaagcaacagcatcaaacaaggcaaggaccagcactttcctgtgttcatgaacgagaaggaggacatcctgtggtgtaccgagatggagagagtgttcgggttcccagtccactacacagatgtcagcaacatgtctagactggccagacagagactgctgggaagaagctggtccgtccctgtgatcagacacctgttcgcccctctgaaggagtacttcgcctgcgtgagcagcggcaacagcaacgccaacagccggggccccagcttctctagcggcctggtgccactgtccctgagagggagccacatgggccccatggagatctacaaaaccgtgagcgcctggaagcggcagcctgtgcgcgtgctgagcctgtttcggaatatcgataaagtcctgaaaagcctgggattcctggagagcggctctggctccggcggtggcaccctgaagtacgtggaggatgtgacaaacgtggtcagacgggatgtggagaagtggggccccttcgatctggtgtacggcagcacccaacccctgggcagctcttgtgaccggtgccctggctggtacatgtttcagttccaccggatcctgcagtacgccctgccgagacaggagtcccagcggccattcttttggattttcatggacaacttgctgctgaccgaggatgaccaggaaactaccactcggttcctgcagaccgaagccgtgaccctgcaggacgtgagaggccgggactaccagaacgccatgcgggtgtggtccaacatccctggactgaaaagcaagcacgcacctctgacccctaaagaagaggagtacctgcaggcccaggtgcggagcagaagcaagctggacgcccctaaggtggatctgctggtgaagaattgcctcctgcccctgagagagtacttcaagtatttcagccagaatagtctgcccctgggaggcagcggcggcggcagcaaggcccccgtgaccttcggcgacctggccatctacttcagccaggaggagtgggagtggctgagccccatgcagaaggacctgtacgaggacgtgatgctggagaactaccacaacctggtgagcgtgggcctggcctgcaggaggcccaacatcatcgccctgctggagaagggcaaggccccctgggtgatcgagcccagcaggaggaggtggggccccgagagcggcagcaagtacggcggcccaagcagcggcgcccctcctcccagcggcggcagcccagccggctccccaacctctaccgaggagggcacctctgagtccgccacccccgagagcggccctggcacctccaccgagcccagcgagggcagcgcacccggcagccctgccggcagccccacctccacagaggagggaaccagcaccgagcccagcgaaggcagcgccccaggcaccagcaccgagcctagtgagcaggagattaaacggatcaacaagatcagaagaagacttgtgaaagacagcaacaccaagaaggccggcaagacaggccccatgaaaaccctgctggttagagtgatgacacccgatctgagagagcggctggaaaacctgagaaagaagcctgaaaatatcccccagcccatcagcaatacatctagagccaacctgaataagctgctgaccgattacaccgaaatgaagaaggcgatcctgcatgtgtactgggaagagttccagaaggaccctgtgggcctgatgagccgggtggcccagcctgccagcaagaagatcgatcagaacaagctgaaacctgagatggacgagaagggcaacctgaccaccgccggctttgcctgctctcagtgtggccagcccctgttcgtgtacaagctggagcaggtgtctgagaagggcaaggcttacaccaactacttcggacggtgcaatgtggccgagcacgaaaagctgatcctgctggcccagctgaagcccgagaaggatagcgacgaagccgtgacatatagcctgggaaagtttgggcagagggccctggatttctacagcattcatgtgaccaaggagtccacccaccccgtgaagcccctggcccagatcgccggaaacagatacgcctccggacctgtgggaaaggccctgagcgacgcatgtatgggcacaatcgcctccttcctgtctaagtaccaggacatcatcatcgaacaccagaaggtggtgaagggcaaccagaagagactggagagcctgcgggagctggccggcaaggaaaacctggaataccctagcgtgaccctgccacctcagcctcacaccaaggagggcgttgatgcctacaacgaagtgatcgcccgggtgcgaatgtgggtgaacctgaacctgtggcagaagctgaagctaagcagagatgatgccaagcctctgctgagactgaagggattcccttcctttcctctggtcgagagacaggccaacgaagtggactggtgggacatggtgtgtaacgtgaagaagctgatcaacgagaaaaaggaggatggcaaggtgttttggcagaatctggctggctacaagagacaggaagccctgagaccatacctgagcagcgaggaagatcggaagaagggaaagaaattcgctcggtaccagctgggcgacctgctgctgcacctggaaaagaagcacggcgaggactggggaaaggtgtacgacgaggcctgggagcggattgacaagaaagtggaaggcctgagcaagcacatcaagctggaagaggaacggagaagcgaggacgcccagagcaaggccgccctgaccgactggctgcgggctaaggccagcttcgtgatcgagggcctgaaggaggccgacaaggacgagttctgcagatgcgagctgaagctgcagaagtggtacggggacctgcggggaaagcccttcgccatcgaagccgagaacagcatcctggacatcagcggcttcagcaagcagtacaactgtgccttcatctggcagaaggacggcgtgaagaagctgaacctgtacctgatcatcaactacttcaagggcggcaagctgcggttcaagaagatcaaacctgaagccttcgaagccaacagattctacaccgtgatcaacaaaaagagcggcgagatcgtgcccatggaggtgaacttcaacttcgacgaccccaacctgatcatcctgcctctggcctttggcaagagacagggcagagaattcatctggaacgacctgctgtccctggaaaccggcagcctgaagctggccaacggaagagtgatcgagaagacactgtacaacagaagaacccggcaggatgagcctgccctgttcgtggccctgaccttcgagcggcgggaggtcctggactcctccaatatcaaaccaatgaacctgatcggcgtggcaagaggcgaaaacatccccgccgtgatcgccctgaccgaccccgagggctgcccactgagccggtttaaggatagcctgggaaacccaacccacatcctgagaatcggcgagagctataaggagaagcagcggaccatccaggccaagaaggaggtggagcagcggagagccggcggctacagccggaagtacgccagcaaagccaagaatctggcagacgatatggtgagaaacaccgctagagatctgctgtactacgccgtgacccaggatgccatgctgatcttcgccaacctgagccggggcttcggccggcagggcaagcggaccttcatggccgagagacagtacacacggatggaggactggctgaccgccaagctggcctacgagggcctgagcaagacctacctgtccaagacactggcccagtacacctccaagacatgcagcaactgtgggtttaccatcaccagcgccgactacgacagggtgctggagaagctgaagaagacagcaacaggctggatgaccacaattaacggcaaggagctgaaggtggagggccagattacctactacaacagatacaagagacagaacgtagtcaaggacctgtccgtcgagctggatagactgagcgaagaatctgtgaacaacgacatctcctcctggacaaagggcagaagcggagaagctctgagcctcctgaagaaaagattctcccatagacccgtgcaggagaagttcgtgtgcctgaactgcggcttcgagacacacgcagccgagcaagccgccctgaacatcgccagatcctggctgttcctgcggagccaggagtacaagaaataccagacaaacaagacaaccggcaacaccgataagagagccttcgtcgagacctggcagtccttttaccggaagaagcttaaggaggtgtggaaacctgccgtgcggtctggcggatctggcggaggctccaccagccccaagaaaaagagaaaagtctaagctgccttctgcggggcttgccttctggccatgcccttcttctctcccttgcacctgtacctcttggtctttgaataaagcctgagtaggaaggctagcaaaaaaaaaaaaaaaaaaaaaaaaaaaaaaaaaaaaaaaaaaaaaaaaaaaaaaaaaaaaaaaaaaaaaaaaaaaaaaaa

SEQ ID NO: 12816 - RNA, 5785 nt, synthetic construct
  source 1..5785: mol_type = other RNA
aggaaataagagagaaaagaagagtaagaagaaatataagagccaccatggcccctaagaagaagcgtaaagtgagccggatggaacgcctcgtctacgaggtgcggcagaagtgcagaaacatcgaggacatctgcatctcctgcggatctctgaacgtgaccctggagcacccactgttcatcggcggcatgtgccagaactgtaaaaactgttttctggagtgtgcctatcaatacgacgatgacggctaccagagctactgcaccatctgttgcggcggaagagaggtgctgatgtgtggaaataacaactgctgccggtgcttctgcgtggaatgcgtggacctgctggtgggccccggcgccgcccaggccgctattaaggaagatccttggaactgctacatgtgcggccacaagggcacatacggcctgctgagacggagagaggactggcctagcagactgcagatgttcttcgccaataaccacgaccaggagttcgacccccctaaggtgtaccctcccgtccccgccgagaagagaaagcccatccgggtcctgagcctgttcgatggcatcgccaccggtctgctggtgctgaaggacctgggcatccaggtggataggtacattgcctccgaggtgtgcgaggactccatcaccgtgggaatggtgcgtcatcagggcaagatcatgtacgtgggcgacgtgcggagcgtgacacagaagcatatccaggagtggggccctttcgacctggtgatcggcggcagcccttgcaatgacctgagcatcgtgaacccagcccggaagggcctgtacgagggaaccggcagactgttcttcgagttttacagactgctgcacgacgcccggcctaaggaaggcgacgaccggcccttcttttggctgttcgagaatgtggtggccatgggagtcagcgacaagcgggatattagccggttcctggagagcaaccccgtgatgatcgatgccaaggaagtgagcgccgcccaccgggccagatacttctggggcaatctgcctggcatgaacagacccctggccagcaccgtgaacgacaagctggagctgcaggagtgcctggagcacggccggatcgccaagttcagcaaggtgagaaccatcaccacccgaagcaacagcatcaaacaaggcaaggaccagcactttcctgtgttcatgaacgagaaggaggacatcctgtggtgtaccgagatggagagagtgttcgggttcccagtccactacacagatgtcagcaacatgtctagactggccagacagagactgctgggaagaagctggtccgtccctgtgatcagacacctgttcgcccctctgaaggagtacttcgcctgcgtgagcagcggcaacagcaacgccaacagccggggccccagcttctctagcggcctggtgccactgtccctgagagggagccacatgggccccatggagatctacaaaaccgtgagcgcctggaagcggcagcctgtgcgcgtgctgagcctgtttcggaatatcgataaagtcctgaaaagcctgggattcctggagagcggctctggctccggcggtggcaccctgaagtacgtggaggatgtgacaaacgtggtcagacgggatgtggagaagtggggccccttcgatctggtgtacggcagcacccaacccctgggcagctcttgtgaccggtgccctggctggtacatgtttcagttccaccggatcctgcagtacgccctgccgagacaggagtcccagcggccattcttttggattttcatggacaacttgctgctgaccgaggatgaccaggaaactaccactcggttcctgcagaccgaagccgtgaccctgcaggacgtgagaggccgggactaccagaacgccatgcgggtgtggtccaacatccctggactgaaaagcaagcacgcacctctgacccctaaagaagaggagtacctgcaggcccaggtgcggagcagaagcaagctggacgcccctaaggtggatctgctggtgaagaattgcctcctgcccctgagagagtacttcaagtatttcagccagaatagtctgcccctgggaggcagcggcggcggcatgatgaccgccgtgagcctgaccaccaggagccaggagagcgtggccttcgaggacgtggccgtgtacttcaccaccaaggagtgggccatcatggtgcccgccgagagggccctgtacagggacgtgatgctggagaactacgaggccgtggccttcgtggtgccccccaccagcaagcccgccctggtgagccacctggagcagggcaaggagagctgcttcatcaggccccagggcgtgggcggcccaagcagcggcgcccctcctcccagcggcggcagcccagccggctccccaacctctaccgaggagggcacctctgagtccgccacccccgagagcggccctggcacctccaccgagcccagcgagggcagcgcacccggcagccctgccggcagccccacctccacagaggagggaaccagcaccgagcccagcgaaggcagcgccccaggcaccagcaccgagcctagtgagcaggagattaaacggatcaacaagatcagaagaagacttgtgaaagacagcaacaccaagaaggccggcaagacaggccccatgaaaaccctgctggttagagtgatgacacccgatctgagagagcggctggaaaacctgagaaagaagcctgaaaatatcccccagcccatcagcaatacatctagagccaacctgaataagctgctgaccgattacaccgaaatgaagaaggcgatcctgcatgtgtactgggaagagttccagaaggaccctgtgggcctgatgagccgggtggcccagcctgccagcaagaagatcgatcagaacaagctgaaacctgagatggacgagaagggcaacctgaccaccgccggctttgcctgctctcagtgtggccagcccctgttcgtgtacaagctggagcaggtgtctgagaagggcaaggcttacaccaactacttcggacggtgcaatgtggccgagcacgaaaagctgatcctgctggcccagctgaagcccgagaaggatagcgacgaagccgtgacatatagcctgggaaagtttgggcagagggccctggatttctacagcattcatgtgaccaaggagtccacccaccccgtgaagcccctggcccagatcgccggaaacagatacgcctccggacctgtgggaaaggccctgagcgacgcatgtatgggcacaatcgcctccttcctgtctaagtaccaggacatcatcatcgaacaccagaaggtggtgaagggcaaccagaagagactggagagcctgcgggagctggccggcaaggaaaacctggaataccctagcgtgaccctgccacctcagcctcacaccaaggagggcgttgatgcctacaacgaagtgatcgcccgggtgcgaatgtgggtgaacctgaacctgtggcagaagctgaagctaagcagagatgatgccaagcctctgctgagactgaagggattcccttcctttcctctggtcgagagacaggccaacgaagtggactggtgggacatggtgtgtaacgtgaagaagctgatcaacgagaaaaaggaggatggcaaggtgttttggcagaatctggctggctacaagagacaggaagccctgagaccatacctgagcagcgaggaagatcggaagaagggaaagaaattcgctcggtaccagctgggcgacctgctgctgcacctggaaaagaagcacggcgaggactggggaaaggtgtacgacgaggcctgggagcggattgacaagaaagtggaaggcctgagcaagcacatcaagctggaagaggaacggagaagcgaggacgcccagagcaaggccgccctgaccgactggctgcgggctaaggccagcttcgtgatcgagggcctgaaggaggccgacaaggacgagttctgcagatgcgagctgaagctgcagaagtggtacggggacctgcggggaaagcccttcgccatcgaagccgagaacagcatcctggacatcagcggcttcagcaagcagtacaactgtgccttcatctggcagaaggacggcgtgaagaagctgaacctgtacctgatcatcaactacttcaagggcggcaagctgcggttcaagaagatcaaacctgaagccttcgaagccaacagattctacaccgtgatcaacaaaaagagcggcgagatcgtgcccatggaggtgaacttcaacttcgacgaccccaacctgatcatcctgcctctggcctttggcaagagacagggcagagaattcatctggaacgacctgctgtccctggaaaccggcagcctgaagctggccaacggaagagtgatcgagaagacactgtacaacagaagaacccggcaggatgagcctgccctgttcgtggccctgaccttcgagcggcgggaggtcctggactcctccaatatcaaaccaatgaacctgatcggcgtggcaagaggcgaaaacatccccgccgtgatcgccctgaccgaccccgagggctgcccactgagccggtttaaggatagcctgggaaacccaacccacatcctgagaatcggcgagagctataaggagaagcagcggaccatccaggccaagaaggaggtggagcagcggagagccggcggctacagccggaagtacgccagcaaagccaagaatctggcagacgatatggtgagaaacaccgctagagatctgctgtactacgccgtgacccaggatgccatgctgatcttcgccaacctgagccggggcttcggccggcagggcaagcggaccttcatggccgagagacagtacacacggatggaggactggctgaccgccaagctggcctacgagggcctgagcaagacctacctgtccaagacactggcccagtacacctccaagacatgcagcaactgtgggtttaccatcaccagcgccgactacgacagggtgctggagaagctgaagaagacagcaacaggctggatgaccacaattaacggcaaggagctgaaggtggagggccagattacctactacaacagatacaagagacagaacgtagtcaaggacctgtccgtcgagctggatagactgagcgaagaatctgtgaacaacgacatctcctcctggacaaagggcagaagcggagaagctctgagcctcctgaagaaaagattctcccatagacccgtgcaggagaagttcgtgtgcctgaactgcggcttcgagacacacgcagccgagcaagccgccctgaacatcgccagatcctggctgttcctgcggagccaggagtacaagaaataccagacaaacaagacaaccggcaacaccgataagagagccttcgtcgagacctggcagtccttttaccggaagaagcttaaggaggtgtggaaacctgccgtgcggtctggcggatctggcggaggctccaccagccccaagaaaaagagaaaagtctaagctgccttctgcggggcttgccttctggccatgcccttcttctctcccttgcacctgtacctcttggtctttgaataaagcctgagtaggaaggctagcaaaaaaaaaaaaaaaaaaaaaaaaaaaaaaaaaaaaaaaaaaaaaaaaaaaaaaaaaaaaaaaaaaaaaaaaaaaaaaaa

SEQ ID NO: 12817 - RNA, 5785 nt, synthetic construct
  source 1..5785: mol_type = other RNA
aggaaataagagagaaaagaagagtaagaagaaatataagagccaccatggcccctaagaagaagcgtaaagtgagccggatggaacgcctcgtctacgaggtgcggcagaagtgcagaaacatcgaggacatctgcatctcctgcggatctctgaacgtgaccctggagcacccactgttcatcggcggcatgtgccagaactgtaaaaactgttttctggagtgtgcctatcaatacgacgatgacggctaccagagctactgcaccatctgttgcggcggaagagaggtgctgatgtgtggaaataacaactgctgccggtgcttctgcgtggaatgcgtggacctgctggtgggccccggcgccgcccaggccgctattaaggaagatccttggaactgctacatgtgcggccacaagggcacatacggcctgctgagacggagagaggactggcctagcagactgcagatgttcttcgccaataaccacgaccaggagttcgacccccctaaggtgtaccctcccgtccccgccgagaagagaaagcccatccgggtcctgagcctgttcgatggcatcgccaccggtctgctggtgctgaaggacctgggcatccaggtggataggtacattgcctccgaggtgtgcgaggactccatcaccgtgggaatggtgcgtcatcagggcaagatcatgtacgtgggcgacgtgcggagcgtgacacagaagcatatccaggagtggggccctttcgacctggtgatcggcggcagcccttgcaatgacctgagcatcgtgaacccagcccggaagggcctgtacgagggaaccggcagactgttcttcgagttttacagactgctgcacgacgcccggcctaaggaaggcgacgaccggcccttcttttggctgttcgagaatgtggtggccatgggagtcagcgacaagcgggatattagccggttcctggagagcaaccccgtgatgatcgatgccaaggaagtgagcgccgcccaccgggccagatacttctggggcaatctgcctggcatgaacagacccctggccagcaccgtgaacgacaagctggagctgcaggagtgcctggagcacggccggatcgccaagttcagcaaggtgagaaccatcaccacccgaagcaacagcatcaaacaaggcaaggaccagcactttcctgtgttcatgaacgagaaggaggacatcctgtggtgtaccgagatggagagagtgttcgggttcccagtccactacacagatgtcagcaacatgtctagactggccagacagagactgctgggaagaagctggtccgtccctgtgatcagacacctgttcgcccctctgaaggagtacttcgcctgcgtgagcagcggcaacagcaacgccaacagccggggccccagcttctctagcggcctggtgccactgtccctgagagggagccacatgggccccatggagatctacaaaaccgtgagcgcctggaagcggcagcctgtgcgcgtgctgagcctgtttcggaatatcgataaagtcctgaaaagcctgggattcctggagagcggctctggctccggcggtggcaccctgaagtacgtggaggatgtgacaaacgtggtcagacgggatgtggagaagtggggccccttcgatctggtgtacggcagcacccaacccctgggcagctcttgtgaccggtgccctggctggtacatgtttcagttccaccggatcctgcagtacgccctgccgagacaggagtcccagcggccattcttttggattttcatggacaacttgctgctgaccgaggatgaccaggaaactaccactcggttcctgcagaccgaagccgtgaccctgcaggacgtgagaggccgggactaccagaacgccatgcgggtgtggtccaacatccctggactgaaaagcaagcacgcacctctgacccctaaagaagaggagtacctgcaggcccaggtgcggagcagaagcaagctggacgcccctaaggtggatctgctggtgaagaattgcctcctgcccctgagagagtacttcaagtatttcagccagaatagtctgcccctgggaggcagcggcggcggcctgctgaccttcgaggacgtggccatcagcttcagcgaggaggagtggaagctgatggaccccgcccagaagatgctgtacagcgacgtgatgcaggagaactacgagaccgtgatcagcctgggcctgaagctgaagaaggacaccggcaacgaccagcccatcagcaccagcaccctggagatccaggccagcggctgcaaggtgctgaggaaggccaggatgaaggtggcccagaagaccggcggcccaagcagcggcgcccctcctcccagcggcggcagcccagccggctccccaacctctaccgaggagggcacctctgagtccgccacccccgagagcggccctggcacctccaccgagcccagcgagggcagcgcacccggcagccctgccggcagccccacctccacagaggagggaaccagcaccgagcccagcgaaggcagcgccccaggcaccagcaccgagcctagtgagcaggagattaaacggatcaacaagatcagaagaagacttgtgaaagacagcaacaccaagaaggccggcaagacaggccccatgaaaaccctgctggttagagtgatgacacccgatctgagagagcggctggaaaacctgagaaagaagcctgaaaatatcccccagcccatcagcaatacatctagagccaacctgaataagctgctgaccgattacaccgaaatgaagaaggcgatcctgcatgtgtactgggaagagttccagaaggaccctgtgggcctgatgagccgggtggcccagcctgccagcaagaagatcgatcagaacaagctgaaacctgagatggacgagaagggcaacctgaccaccgccggctttgcctgctctcagtgtggccagcccctgttcgtgtacaagctggagcaggtgtctgagaagggcaaggcttacaccaactacttcggacggtgcaatgtggccgagcacgaaaagctgatcctgctggcccagctgaagcccgagaaggatagcgacgaagccgtgacatatagcctgggaaagtttgggcagagggccctggatttctacagcattcatgtgaccaaggagtccacccaccccgtgaagcccctggcccagatcgccggaaacagatacgcctccggacctgtgggaaaggccctgagcgacgcatgtatgggcacaatcgcctccttcctgtctaagtaccaggacatcatcatcgaacaccagaaggtggtgaagggcaaccagaagagactggagagcctgcgggagctggccggcaaggaaaacctggaataccctagcgtgaccctgccacctcagcctcacaccaaggagggcgttgatgcctacaacgaagtgatcgcccgggtgcgaatgtgggtgaacctgaacctgtggcagaagctgaagctaagcagagatgatgccaagcctctgctgagactgaagggattcccttcctttcctctggtcgagagacaggccaacgaagtggactggtgggacatggtgtgtaacgtgaagaagctgatcaacgagaaaaaggaggatggcaaggtgttttggcagaatctggctggctacaagagacaggaagccctgagaccatacctgagcagcgaggaagatcggaagaagggaaagaaattcgctcggtaccagctgggcgacctgctgctgcacctggaaaagaagcacggcgaggactggggaaaggtgtacgacgaggcctgggagcggattgacaagaaagtggaaggcctgagcaagcacatcaagctggaagaggaacggagaagcgaggacgcccagagcaaggccgccctgaccgactggctgcgggctaaggccagcttcgtgatcgagggcctgaaggaggccgacaaggacgagttctgcagatgcgagctgaagctgcagaagtggtacggggacctgcggggaaagcccttcgccatcgaagccgagaacagcatcctggacatcagcggcttcagcaagcagtacaactgtgccttcatctggcagaaggacggcgtgaagaagctgaacctgtacctgatcatcaactacttcaagggcggcaagctgcggttcaagaagatcaaacctgaagccttcgaagccaacagattctacaccgtgatcaacaaaaagagcggcgagatcgtgcccatggaggtgaacttcaacttcgacgaccccaacctgatcatcctgcctctggcctttggcaagagacagggcagagaattcatctggaacgacctgctgtccctggaaaccggcagcctgaagctggccaacggaagagtgatcgagaagacactgtacaacagaagaacccggcaggatgagcctgccctgttcgtggccctgaccttcgagcggcgggaggtcctggactcctccaatatcaaaccaatgaacctgatcggcgtggcaagaggcgaaaacatccccgccgtgatcgccctgaccgaccccgagggctgcccactgagccggtttaaggatagcctgggaaacccaacccacatcctgagaatcggcgagagctataaggagaagcagcggaccatccaggccaagaaggaggtggagcagcggagagccggcggctacagccggaagtacgccagcaaagccaagaatctggcagacgatatggtgagaaacaccgctagagatctgctgtactacgccgtgacccaggatgccatgctgatcttcgccaacctgagccggggcttcggccggcagggcaagcggaccttcatggccgagagacagtacacacggatggaggactggctgaccgccaagctggcctacgagggcctgagcaagacctacctgtccaagacactggcccagtacacctccaagacatgcagcaactgtgggtttaccatcaccagcgccgactacgacagggtgctggagaagctgaagaagacagcaacaggctggatgaccacaattaacggcaaggagctgaaggtggagggccagattacctactacaacagatacaagagacagaacgtagtcaaggacctgtccgtcgagctggatagactgagcgaagaatctgtgaacaacgacatctcctcctggacaaagggcagaagcggagaagctctgagcctcctgaagaaaagattctcccatagacccgtgcaggagaagttcgtgtgcctgaactgcggcttcgagacacacgcagccgagcaagccgccctgaacatcgccagatcctggctgttcctgcggagccaggagtacaagaaataccagacaaacaagacaaccggcaacaccgataagagagccttcgtcgagacctggcagtccttttaccggaagaagcttaaggaggtgtggaaacctgccgtgcggtctggcggatctggcggaggctccaccagccccaagaaaaagagaaaagtctaagctgccttctgcggggcttgccttctggccatgcccttcttctctcccttgcacctgtacctcttggtctttgaataaagcctgagtaggaaggctagcaaaaaaaaaaaaaaaaaaaaaaaaaaaaaaaaaaaaaaaaaaaaaaaaaaaaaaaaaaaaaaaaaaaaaaaaaaaaaaaa

SEQ ID NO: 12818 - RNA, 5785 nt, synthetic construct
  source 1..5785: mol_type = other RNA
aggaaataagagagaaaagaagagtaagaagaaatataagagccaccatggcccctaagaagaagcgtaaagtgagccggatggaacgcctcgtctacgaggtgcggcagaagtgcagaaacatcgaggacatctgcatctcctgcggatctctgaacgtgaccctggagcacccactgttcatcggcggcatgtgccagaactgtaaaaactgttttctggagtgtgcctatcaatacgacgatgacggctaccagagctactgcaccatctgttgcggcggaagagaggtgctgatgtgtggaaataacaactgctgccggtgcttctgcgtggaatgcgtggacctgctggtgggccccggcgccgcccaggccgctattaaggaagatccttggaactgctacatgtgcggccacaagggcacatacggcctgctgagacggagagaggactggcctagcagactgcagatgttcttcgccaataaccacgaccaggagttcgacccccctaaggtgtaccctcccgtccccgccgagaagagaaagcccatccgggtcctgagcctgttcgatggcatcgccaccggtctgctggtgctgaaggacctgggcatccaggtggataggtacattgcctccgaggtgtgcgaggactccatcaccgtgggaatggtgcgtcatcagggcaagatcatgtacgtgggcgacgtgcggagcgtgacacagaagcatatccaggagtggggccctttcgacctggtgatcggcggcagcccttgcaatgacctgagcatcgtgaacccagcccggaagggcctgtacgagggaaccggcagactgttcttcgagttttacagactgctgcacgacgcccggcctaaggaaggcgacgaccggcccttcttttggctgttcgagaatgtggtggccatgggagtcagcgacaagcgggatattagccggttcctggagagcaaccccgtgatgatcgatgccaaggaagtgagcgccgcccaccgggccagatacttctggggcaatctgcctggcatgaacagacccctggccagcaccgtgaacgacaagctggagctgcaggagtgcctggagcacggccggatcgccaagttcagcaaggtgagaaccatcaccacccgaagcaacagcatcaaacaaggcaaggaccagcactttcctgtgttcatgaacgagaaggaggacatcctgtggtgtaccgagatggagagagtgttcgggttcccagtccactacacagatgtcagcaacatgtctagactggccagacagagactgctgggaagaagctggtccgtccctgtgatcagacacctgttcgcccctctgaaggagtacttcgcctgcgtgagcagcggcaacagcaacgccaacagccggggccccagcttctctagcggcctggtgccactgtccctgagagggagccacatgggccccatggagatctacaaaaccgtgagcgcctggaagcggcagcctgtgcgcgtgctgagcctgtttcggaatatcgataaagtcctgaaaagcctgggattcctggagagcggctctggctccggcggtggcaccctgaagtacgtggaggatgtgacaaacgtggtcagacgggatgtggagaagtggggccccttcgatctggtgtacggcagcacccaacccctgggcagctcttgtgaccggtgccctggctggtacatgtttcagttccaccggatcctgcagtacgccctgccgagacaggagtcccagcggccattcttttggattttcatggacaacttgctgctgaccgaggatgaccaggaaactaccactcggttcctgcagaccgaagccgtgaccctgcaggacgtgagaggccgggactaccagaacgccatgcgggtgtggtccaacatccctggactgaaaagcaagcacgcacctctgacccctaaagaagaggagtacctgcaggcccaggtgcggagcagaagcaagctggacgcccctaaggtggatctgctggtgaagaattgcctcctgcccctgagagagtacttcaagtatttcagccagaatagtctgcccctgggaggcagcggcggcggcagggtggtgttcgaggacgtggccgtgtacttcagccaggaggagtggggcctgctggacgaggcccagaggcacctgtaccacgccgtgatgaccgagaacttcgccctggtgaccagcctgggctgctggcacggcgcccagtacgaggaggcccccagcgagcagagcgtgagcgtgggcatgagcgaggtgggcacccccaagcccgaccccagcaccaagaaggcccagccctacgagggcggcccaagcagcggcgcccctcctcccagcggcggcagcccagccggctccccaacctctaccgaggagggcacctctgagtccgccacccccgagagcggccctggcacctccaccgagcccagcgagggcagcgcacccggcagccctgccggcagccccacctccacagaggagggaaccagcaccgagcccagcgaaggcagcgccccaggcaccagcaccgagcctagtgagcaggagattaaacggatcaacaagatcagaagaagacttgtgaaagacagcaacaccaagaaggccggcaagacaggccccatgaaaaccctgctggttagagtgatgacacccgatctgagagagcggctggaaaacctgagaaagaagcctgaaaatatcccccagcccatcagcaatacatctagagccaacctgaataagctgctgaccgattacaccgaaatgaagaaggcgatcctgcatgtgtactgggaagagttccagaaggaccctgtgggcctgatgagccgggtggcccagcctgccagcaagaagatcgatcagaacaagctgaaacctgagatggacgagaagggcaacctgaccaccgccggctttgcctgctctcagtgtggccagcccctgttcgtgtacaagctggagcaggtgtctgagaagggcaaggcttacaccaactacttcggacggtgcaatgtggccgagcacgaaaagctgatcctgctggcccagctgaagcccgagaaggatagcgacgaagccgtgacatatagcctgggaaagtttgggcagagggccctggatttctacagcattcatgtgaccaaggagtccacccaccccgtgaagcccctggcccagatcgccggaaacagatacgcctccggacctgtgggaaaggccctgagcgacgcatgtatgggcacaatcgcctccttcctgtctaagtaccaggacatcatcatcgaacaccagaaggtggtgaagggcaaccagaagagactggagagcctgcgggagctggccggcaaggaaaacctggaataccctagcgtgaccctgccacctcagcctcacaccaaggagggcgttgatgcctacaacgaagtgatcgcccgggtgcgaatgtgggtgaacctgaacctgtggcagaagctgaagctaagcagagatgatgccaagcctctgctgagactgaagggattcccttcctttcctctggtcgagagacaggccaacgaagtggactggtgggacatggtgtgtaacgtgaagaagctgatcaacgagaaaaaggaggatggcaaggtgttttggcagaatctggctggctacaagagacaggaagccctgagaccatacctgagcagcgaggaagatcggaagaagggaaagaaattcgctcggtaccagctgggcgacctgctgctgcacctggaaaagaagcacggcgaggactggggaaaggtgtacgacgaggcctgggagcggattgacaagaaagtggaaggcctgagcaagcacatcaagctggaagaggaacggagaagcgaggacgcccagagcaaggccgccctgaccgactggctgcgggctaaggccagcttcgtgatcgagggcctgaaggaggccgacaaggacgagttctgcagatgcgagctgaagctgcagaagtggtacggggacctgcggggaaagcccttcgccatcgaagccgagaacagcatcctggacatcagcggcttcagcaagcagtacaactgtgccttcatctggcagaaggacggcgtgaagaagctgaacctgtacctgatcatcaactacttcaagggcggcaagctgcggttcaagaagatcaaacctgaagccttcgaagccaacagattctacaccgtgatcaacaaaaagagcggcgagatcgtgcccatggaggtgaacttcaacttcgacgaccccaacctgatcatcctgcctctggcctttggcaagagacagggcagagaattcatctggaacgacctgctgtccctggaaaccggcagcctgaagctggccaacggaagagtgatcgagaagacactgtacaacagaagaacccggcaggatgagcctgccctgttcgtggccctgaccttcgagcggcgggaggtcctggactcctccaatatcaaaccaatgaacctgatcggcgtggcaagaggcgaaaacatccccgccgtgatcgccctgaccgaccccgagggctgcccactgagccggtttaaggatagcctgggaaacccaacccacatcctgagaatcggcgagagctataaggagaagcagcggaccatccaggccaagaaggaggtggagcagcggagagccggcggctacagccggaagtacgccagcaaagccaagaatctggcagacgatatggtgagaaacaccgctagagatctgctgtactacgccgtgacccaggatgccatgctgatcttcgccaacctgagccggggcttcggccggcagggcaagcggaccttcatggccgagagacagtacacacggatggaggactggctgaccgccaagctggcctacgagggcctgagcaagacctacctgtccaagacactggcccagtacacctccaagacatgcagcaactgtgggtttaccatcaccagcgccgactacgacagggtgctggagaagctgaagaagacagcaacaggctggatgaccacaattaacggcaaggagctgaaggtggagggccagattacctactacaacagatacaagagacagaacgtagtcaaggacctgtccgtcgagctggatagactgagcgaagaatctgtgaacaacgacatctcctcctggacaaagggcagaagcggagaagctctgagcctcctgaagaaaagattctcccatagacccgtgcaggagaagttcgtgtgcctgaactgcggcttcgagacacacgcagccgagcaagccgccctgaacatcgccagatcctggctgttcctgcggagccaggagtacaagaaataccagacaaacaagacaaccggcaacaccgataagagagccttcgtcgagacctggcagtccttttaccggaagaagcttaaggaggtgtggaaacctgccgtgcggtctggcggatctggcggaggctccaccagccccaagaaaaagagaaaagtctaagctgccttctgcggggcttgccttctggccatgcccttcttctctcccttgcacctgtacctcttggtctttgaataaagcctgagtaggaaggctagcaaaaaaaaaaaaaaaaaaaaaaaaaaaaaaaaaaaaaaaaaaaaaaaaaaaaaaaaaaaaaaaaaaaaaaaaaaaaaaaa

SEQ ID NO: 12819 - RNA, 5785 nt, synthetic construct
  source 1..5785: mol_type = other RNA
aggaaataagagagaaaagaagagtaagaagaaatataagagccaccatggcccctaagaagaagcgtaaagtgagccggatggaacgcctcgtctacgaggtgcggcagaagtgcagaaacatcgaggacatctgcatctcctgcggatctctgaacgtgaccctggagcacccactgttcatcggcggcatgtgccagaactgtaaaaactgttttctggagtgtgcctatcaatacgacgatgacggctaccagagctactgcaccatctgttgcggcggaagagaggtgctgatgtgtggaaataacaactgctgccggtgcttctgcgtggaatgcgtggacctgctggtgggccccggcgccgcccaggccgctattaaggaagatccttggaactgctacatgtgcggccacaagggcacatacggcctgctgagacggagagaggactggcctagcagactgcagatgttcttcgccaataaccacgaccaggagttcgacccccctaaggtgtaccctcccgtccccgccgagaagagaaagcccatccgggtcctgagcctgttcgatggcatcgccaccggtctgctggtgctgaaggacctgggcatccaggtggataggtacattgcctccgaggtgtgcgaggactccatcaccgtgggaatggtgcgtcatcagggcaagatcatgtacgtgggcgacgtgcggagcgtgacacagaagcatatccaggagtggggccctttcgacctggtgatcggcggcagcccttgcaatgacctgagcatcgtgaacccagcccggaagggcctgtacgagggaaccggcagactgttcttcgagttttacagactgctgcacgacgcccggcctaaggaaggcgacgaccggcccttcttttggctgttcgagaatgtggtggccatgggagtcagcgacaagcgggatattagccggttcctggagagcaaccccgtgatgatcgatgccaaggaagtgagcgccgcccaccgggccagatacttctggggcaatctgcctggcatgaacagacccctggccagcaccgtgaacgacaagctggagctgcaggagtgcctggagcacggccggatcgccaagttcagcaaggtgagaaccatcaccacccgaagcaacagcatcaaacaaggcaaggaccagcactttcctgtgttcatgaacgagaaggaggacatcctgtggtgtaccgagatggagagagtgttcgggttcccagtccactacacagatgtcagcaacatgtctagactggccagacagagactgctgggaagaagctggtccgtccctgtgatcagacacctgttcgcccctctgaaggagtacttcgcctgcgtgagcagcggcaacagcaacgccaacagccggggccccagcttctctagcggcctggtgccactgtccctgagagggagccacatgggccccatggagatctacaaaaccgtgagcgcctggaagcggcagcctgtgcgcgtgctgagcctgtttcggaatatcgataaagtcctgaaaagcctgggattcctggagagcggctctggctccggcggtggcaccctgaagtacgtggaggatgtgacaaacgtggtcagacgggatgtggagaagtggggccccttcgatctggtgtacggcagcacccaacccctgggcagctcttgtgaccggtgccctggctggtacatgtttcagttccaccggatcctgcagtacgccctgccgagacaggagtcccagcggccattcttttggattttcatggacaacttgctgctgaccgaggatgaccaggaaactaccactcggttcctgcagaccgaagccgtgaccctgcaggacgtgagaggccgggactaccagaacgccatgcgggtgtggtccaacatccctggactgaaaagcaagcacgcacctctgacccctaaagaagaggagtacctgcaggcccaggtgcggagcagaagcaagctggacgcccctaaggtggatctgctggtgaagaattgcctcctgcccctgagagagtacttcaagtatttcagccagaatagtctgcccctgggaggcagcggcggcggcatggtgaccttcgaggacgtggccgtgcacttcaccaagaccgagtggaccggcctgagccccgcccagagggccctgtacaggagcgtgatgctggagaacttcggcaacctgaccgccctgggctaccccgtgcccaagcccgccctgatcagcctgctggagggcggcgacatggcctggggcctggaggcccaggacgacgcccccgccgagaggaccaagaacatctgcaagggcaggggcggcccaagcagcggcgcccctcctcccagcggcggcagcccagccggctccccaacctctaccgaggagggcacctctgagtccgccacccccgagagcggccctggcacctccaccgagcccagcgagggcagcgcacccggcagccctgccggcagccccacctccacagaggagggaaccagcaccgagcccagcgaaggcagcgccccaggcaccagcaccgagcctagtgagcaggagattaaacggatcaacaagatcagaagaagacttgtgaaagacagcaacaccaagaaggccggcaagacaggccccatgaaaaccctgctggttagagtgatgacacccgatctgagagagcggctggaaaacctgagaaagaagcctgaaaatatcccccagcccatcagcaatacatctagagccaacctgaataagctgctgaccgattacaccgaaatgaagaaggcgatcctgcatgtgtactgggaagagttccagaaggaccctgtgggcctgatgagccgggtggcccagcctgccagcaagaagatcgatcagaacaagctgaaacctgagatggacgagaagggcaacctgaccaccgccggctttgcctgctctcagtgtggccagcccctgttcgtgtacaagctggagcaggtgtctgagaagggcaaggcttacaccaactacttcggacggtgcaatgtggccgagcacgaaaagctgatcctgctggcccagctgaagcccgagaaggatagcgacgaagccgtgacatatagcctgggaaagtttgggcagagggccctggatttctacagcattcatgtgaccaaggagtccacccaccccgtgaagcccctggcccagatcgccggaaacagatacgcctccggacctgtgggaaaggccctgagcgacgcatgtatgggcacaatcgcctccttcctgtctaagtaccaggacatcatcatcgaacaccagaaggtggtgaagggcaaccagaagagactggagagcctgcgggagctggccggcaaggaaaacctggaataccctagcgtgaccctgccacctcagcctcacaccaaggagggcgttgatgcctacaacgaagtgatcgcccgggtgcgaatgtgggtgaacctgaacctgtggcagaagctgaagctaagcagagatgatgccaagcctctgctgagactgaagggattcccttcctttcctctggtcgagagacaggccaacgaagtggactggtgggacatggtgtgtaacgtgaagaagctgatcaacgagaaaaaggaggatggcaaggtgttttggcagaatctggctggctacaagagacaggaagccctgagaccatacctgagcagcgaggaagatcggaagaagggaaagaaattcgctcggtaccagctgggcgacctgctgctgcacctggaaaagaagcacggcgaggactggggaaaggtgtacgacgaggcctgggagcggattgacaagaaagtggaaggcctgagcaagcacatcaagctggaagaggaacggagaagcgaggacgcccagagcaaggccgccctgaccgactggctgcgggctaaggccagcttcgtgatcgagggcctgaaggaggccgacaaggacgagttctgcagatgcgagctgaagctgcagaagtggtacggggacctgcggggaaagcccttcgccatcgaagccgagaacagcatcctggacatcagcggcttcagcaagcagtacaactgtgccttcatctggcagaaggacggcgtgaagaagctgaacctgtacctgatcatcaactacttcaagggcggcaagctgcggttcaagaagatcaaacctgaagccttcgaagccaacagattctacaccgtgatcaacaaaaagagcggcgagatcgtgcccatggaggtgaacttcaacttcgacgaccccaacctgatcatcctgcctctggcctttggcaagagacagggcagagaattcatctggaacgacctgctgtccctggaaaccggcagcctgaagctggccaacggaagagtgatcgagaagacactgtacaacagaagaacccggcaggatgagcctgccctgttcgtggccctgaccttcgagcggcgggaggtcctggactcctccaatatcaaaccaatgaacctgatcggcgtggcaagaggcgaaaacatccccgccgtgatcgccctgaccgaccccgagggctgcccactgagccggtttaaggatagcctgggaaacccaacccacatcctgagaatcggcgagagctataaggagaagcagcggaccatccaggccaagaaggaggtggagcagcggagagccggcggctacagccggaagtacgccagcaaagccaagaatctggcagacgatatggtgagaaacaccgctagagatctgctgtactacgccgtgacccaggatgccatgctgatcttcgccaacctgagccggggcttcggccggcagggcaagcggaccttcatggccgagagacagtacacacggatggaggactggctgaccgccaagctggcctacgagggcctgagcaagacctacctgtccaagacactggcccagtacacctccaagacatgcagcaactgtgggtttaccatcaccagcgccgactacgacagggtgctggagaagctgaagaagacagcaacaggctggatgaccacaattaacggcaaggagctgaaggtggagggccagattacctactacaacagatacaagagacagaacgtagtcaaggacctgtccgtcgagctggatagactgagcgaagaatctgtgaacaacgacatctcctcctggacaaagggcagaagcggagaagctctgagcctcctgaagaaaagattctcccatagacccgtgcaggagaagttcgtgtgcctgaactgcggcttcgagacacacgcagccgagcaagccgccctgaacatcgccagatcctggctgttcctgcggagccaggagtacaagaaataccagacaaacaagacaaccggcaacaccgataagagagccttcgtcgagacctggcagtccttttaccggaagaagcttaaggaggtgtggaaacctgccgtgcggtctggcggatctggcggaggctccaccagccccaagaaaaagagaaaagtctaagctgccttctgcggggcttgccttctggccatgcccttcttctctcccttgcacctgtacctcttggtctttgaataaagcctgagtaggaaggctagcaaaaaaaaaaaaaaaaaaaaaaaaaaaaaaaaaaaaaaaaaaaaaaaaaaaaaaaaaaaaaaaaaaaaaaaaaaaaaaaa

SEQ ID NO: 12820 - RNA, 5785 nt, synthetic construct
  source 1..5785: mol_type = other RNA
aggaaataagagagaaaagaagagtaagaagaaatataagagccaccatggcccctaagaagaagcgtaaagtgagccggatggaacgcctcgtctacgaggtgcggcagaagtgcagaaacatcgaggacatctgcatctcctgcggatctctgaacgtgaccctggagcacccactgttcatcggcggcatgtgccagaactgtaaaaactgttttctggagtgtgcctatcaatacgacgatgacggctaccagagctactgcaccatctgttgcggcggaagagaggtgctgatgtgtggaaataacaactgctgccggtgcttctgcgtggaatgcgtggacctgctggtgggccccggcgccgcccaggccgctattaaggaagatccttggaactgctacatgtgcggccacaagggcacatacggcctgctgagacggagagaggactggcctagcagactgcagatgttcttcgccaataaccacgaccaggagttcgacccccctaaggtgtaccctcccgtccccgccgagaagagaaagcccatccgggtcctgagcctgttcgatggcatcgccaccggtctgctggtgctgaaggacctgggcatccaggtggataggtacattgcctccgaggtgtgcgaggactccatcaccgtgggaatggtgcgtcatcagggcaagatcatgtacgtgggcgacgtgcggagcgtgacacagaagcatatccaggagtggggccctttcgacctggtgatcggcggcagcccttgcaatgacctgagcatcgtgaacccagcccggaagggcctgtacgagggaaccggcagactgttcttcgagttttacagactgctgcacgacgcccggcctaaggaaggcgacgaccggcccttcttttggctgttcgagaatgtggtggccatgggagtcagcgacaagcgggatattagccggttcctggagagcaaccccgtgatgatcgatgccaaggaagtgagcgccgcccaccgggccagatacttctggggcaatctgcctggcatgaacagacccctggccagcaccgtgaacgacaagctggagctgcaggagtgcctggagcacggccggatcgccaagttcagcaaggtgagaaccatcaccacccgaagcaacagcatcaaacaaggcaaggaccagcactttcctgtgttcatgaacgagaaggaggacatcctgtggtgtaccgagatggagagagtgttcgggttcccagtccactacacagatgtcagcaacatgtctagactggccagacagagactgctgggaagaagctggtccgtccctgtgatcagacacctgttcgcccctctgaaggagtacttcgcctgcgtgagcagcggcaacagcaacgccaacagccggggccccagcttctctagcggcctggtgccactgtccctgagagggagccacatgggccccatggagatctacaaaaccgtgagcgcctggaagcggcagcctgtgcgcgtgctgagcctgtttcggaatatcgataaagtcctgaaaagcctgggattcctggagagcggctctggctccggcggtggcaccctgaagtacgtggaggatgtgacaaacgtggtcagacgggatgtggagaagtggggccccttcgatctggtgtacggcagcacccaacccctgggcagctcttgtgaccggtgccctggctggtacatgtttcagttccaccggatcctgcagtacgccctgccgagacaggagtcccagcggccattcttttggattttcatggacaacttgctgctgaccgaggatgaccaggaaactaccactcggttcctgcagaccgaagccgtgaccctgcaggacgtgagaggccgggactaccagaacgccatgcgggtgtggtccaacatccctggactgaaaagcaagcacgcacctctgacccctaaagaagaggagtacctgcaggcccaggtgcggagcagaagcaagctggacgcccctaaggtggatctgctggtgaagaattgcctcctgcccctgagagagtacttcaagtatttcagccagaatagtctgcccctgggaggcagcggcggcggcggcgagagcctggagagcagggtgaccctgggcagcctgaccgccgagagccaggagctgctgaccttcaaggacgtgagcgtggacttcacccaggaggagtggggccagctggcccccgcccacaggaacctgtacagggaggtgatgctggagaactacggcaacctggtgagcgtgggctaccagctgagcaagcccggcgtgatcagccagctggagaagggcgaggagccctggctgggcggcccaagcagcggcgcccctcctcccagcggcggcagcccagccggctccccaacctctaccgaggagggcacctctgagtccgccacccccgagagcggccctggcacctccaccgagcccagcgagggcagcgcacccggcagccctgccggcagccccacctccacagaggagggaaccagcaccgagcccagcgaaggcagcgccccaggcaccagcaccgagcctagtgagcaggagattaaacggatcaacaagatcagaagaagacttgtgaaagacagcaacaccaagaaggccggcaagacaggccccatgaaaaccctgctggttagagtgatgacacccgatctgagagagcggctggaaaacctgagaaagaagcctgaaaatatcccccagcccatcagcaatacatctagagccaacctgaataagctgctgaccgattacaccgaaatgaagaaggcgatcctgcatgtgtactgggaagagttccagaaggaccctgtgggcctgatgagccgggtggcccagcctgccagcaagaagatcgatcagaacaagctgaaacctgagatggacgagaagggcaacctgaccaccgccggctttgcctgctctcagtgtggccagcccctgttcgtgtacaagctggagcaggtgtctgagaagggcaaggcttacaccaactacttcggacggtgcaatgtggccgagcacgaaaagctgatcctgctggcccagctgaagcccgagaaggatagcgacgaagccgtgacatatagcctgggaaagtttgggcagagggccctggatttctacagcattcatgtgaccaaggagtccacccaccccgtgaagcccctggcccagatcgccggaaacagatacgcctccggacctgtgggaaaggccctgagcgacgcatgtatgggcacaatcgcctccttcctgtctaagtaccaggacatcatcatcgaacaccagaaggtggtgaagggcaaccagaagagactggagagcctgcgggagctggccggcaaggaaaacctggaataccctagcgtgaccctgccacctcagcctcacaccaaggagggcgttgatgcctacaacgaagtgatcgcccgggtgcgaatgtgggtgaacctgaacctgtggcagaagctgaagctaagcagagatgatgccaagcctctgctgagactgaagggattcccttcctttcctctggtcgagagacaggccaacgaagtggactggtgggacatggtgtgtaacgtgaagaagctgatcaacgagaaaaaggaggatggcaaggtgttttggcagaatctggctggctacaagagacaggaagccctgagaccatacctgagcagcgaggaagatcggaagaagggaaagaaattcgctcggtaccagctgggcgacctgctgctgcacctggaaaagaagcacggcgaggactggggaaaggtgtacgacgaggcctgggagcggattgacaagaaagtggaaggcctgagcaagcacatcaagctggaagaggaacggagaagcgaggacgcccagagcaaggccgccctgaccgactggctgcgggctaaggccagcttcgtgatcgagggcctgaaggaggccgacaaggacgagttctgcagatgcgagctgaagctgcagaagtggtacggggacctgcggggaaagcccttcgccatcgaagccgagaacagcatcctggacatcagcggcttcagcaagcagtacaactgtgccttcatctggcagaaggacggcgtgaagaagctgaacctgtacctgatcatcaactacttcaagggcggcaagctgcggttcaagaagatcaaacctgaagccttcgaagccaacagattctacaccgtgatcaacaaaaagagcggcgagatcgtgcccatggaggtgaacttcaacttcgacgaccccaacctgatcatcctgcctctggcctttggcaagagacagggcagagaattcatctggaacgacctgctgtccctggaaaccggcagcctgaagctggccaacggaagagtgatcgagaagacactgtacaacagaagaacccggcaggatgagcctgccctgttcgtggccctgaccttcgagcggcgggaggtcctggactcctccaatatcaaaccaatgaacctgatcggcgtggcaagaggcgaaaacatccccgccgtgatcgccctgaccgaccccgagggctgcccactgagccggtttaaggatagcctgggaaacccaacccacatcctgagaatcggcgagagctataaggagaagcagcggaccatccaggccaagaaggaggtggagcagcggagagccggcggctacagccggaagtacgccagcaaagccaagaatctggcagacgatatggtgagaaacaccgctagagatctgctgtactacgccgtgacccaggatgccatgctgatcttcgccaacctgagccggggcttcggccggcagggcaagcggaccttcatggccgagagacagtacacacggatggaggactggctgaccgccaagctggcctacgagggcctgagcaagacctacctgtccaagacactggcccagtacacctccaagacatgcagcaactgtgggtttaccatcaccagcgccgactacgacagggtgctggagaagctgaagaagacagcaacaggctggatgaccacaattaacggcaaggagctgaaggtggagggccagattacctactacaacagatacaagagacagaacgtagtcaaggacctgtccgtcgagctggatagactgagcgaagaatctgtgaacaacgacatctcctcctggacaaagggcagaagcggagaagctctgagcctcctgaagaaaagattctcccatagacccgtgcaggagaagttcgtgtgcctgaactgcggcttcgagacacacgcagccgagcaagccgccctgaacatcgccagatcctggctgttcctgcggagccaggagtacaagaaataccagacaaacaagacaaccggcaacaccgataagagagccttcgtcgagacctggcagtccttttaccggaagaagcttaaggaggtgtggaaacctgccgtgcggtctggcggatctggcggaggctccaccagccccaagaaaaagagaaaagtctaagctgccttctgcggggcttgccttctggccatgcccttcttctctcccttgcacctgtacctcttggtctttgaataaagcctgagtaggaaggctagcaaaaaaaaaaaaaaaaaaaaaaaaaaaaaaaaaaaaaaaaaaaaaaaaaaaaaaaaaaaaaaaaaaaaaaaaaaaaaaaa

SEQ ID NO: 12821 - RNA, 5785 nt, synthetic construct
  source 1..5785: mol_type = other RNA
aggaaataagagagaaaagaagagtaagaagaaatataagagccaccatggcccctaagaagaagcgtaaagtgagccggatggaacgcctcgtctacgaggtgcggcagaagtgcagaaacatcgaggacatctgcatctcctgcggatctctgaacgtgaccctggagcacccactgttcatcggcggcatgtgccagaactgtaaaaactgttttctggagtgtgcctatcaatacgacgatgacggctaccagagctactgcaccatctgttgcggcggaagagaggtgctgatgtgtggaaataacaactgctgccggtgcttctgcgtggaatgcgtggacctgctggtgggccccggcgccgcccaggccgctattaaggaagatccttggaactgctacatgtgcggccacaagggcacatacggcctgctgagacggagagaggactggcctagcagactgcagatgttcttcgccaataaccacgaccaggagttcgacccccctaaggtgtaccctcccgtccccgccgagaagagaaagcccatccgggtcctgagcctgttcgatggcatcgccaccggtctgctggtgctgaaggacctgggcatccaggtggataggtacattgcctccgaggtgtgcgaggactccatcaccgtgggaatggtgcgtcatcagggcaagatcatgtacgtgggcgacgtgcggagcgtgacacagaagcatatccaggagtggggccctttcgacctggtgatcggcggcagcccttgcaatgacctgagcatcgtgaacccagcccggaagggcctgtacgagggaaccggcagactgttcttcgagttttacagactgctgcacgacgcccggcctaaggaaggcgacgaccggcccttcttttggctgttcgagaatgtggtggccatgggagtcagcgacaagcgggatattagccggttcctggagagcaaccccgtgatgatcgatgccaaggaagtgagcgccgcccaccgggccagatacttctggggcaatctgcctggcatgaacagacccctggccagcaccgtgaacgacaagctggagctgcaggagtgcctggagcacggccggatcgccaagttcagcaaggtgagaaccatcaccacccgaagcaacagcatcaaacaaggcaaggaccagcactttcctgtgttcatgaacgagaaggaggacatcctgtggtgtaccgagatggagagagtgttcgggttcccagtccactacacagatgtcagcaacatgtctagactggccagacagagactgctgggaagaagctggtccgtccctgtgatcagacacctgttcgcccctctgaaggagtacttcgcctgcgtgagcagcggcaacagcaacgccaacagccggggccccagcttctctagcggcctggtgccactgtccctgagagggagccacatgggccccatggagatctacaaaaccgtgagcgcctggaagcggcagcctgtgcgcgtgctgagcctgtttcggaatatcgataaagtcctgaaaagcctgggattcctggagagcggctctggctccggcggtggcaccctgaagtacgtggaggatgtgacaaacgtggtcagacgggatgtggagaagtggggccccttcgatctggtgtacggcagcacccaacccctgggcagctcttgtgaccggtgccctggctggtacatgtttcagttccaccggatcctgcagtacgccctgccgagacaggagtcccagcggccattcttttggattttcatggacaacttgctgctgaccgaggatgaccaggaaactaccactcggttcctgcagaccgaagccgtgaccctgcaggacgtgagaggccgggactaccagaacgccatgcgggtgtggtccaacatccctggactgaaaagcaagcacgcacctctgacccctaaagaagaggagtacctgcaggcccaggtgcggagcagaagcaagctggacgcccctaaggtggatctgctggtgaagaattgcctcctgcccctgagagagtacttcaagtatttcagccagaatagtctgcccctgggaggcagcggcggcggcgccgccggcagggtgaccttcgaggacgtgaccgtgagcttcaccaagggcgagtggcagcagctgaaccccgagcagagggagctgtacagggacgtgatgctggagaactacggcaacctggtgagcgtgggcctggaggagaccagcaagcccagcgtgatcctgaggctggaggagggcaaggagccctggagcgaggaggaggtgctgaggggcggcaggcccgagaagaactgggacggcggcccaagcagcggcgcccctcctcccagcggcggcagcccagccggctccccaacctctaccgaggagggcacctctgagtccgccacccccgagagcggccctggcacctccaccgagcccagcgagggcagcgcacccggcagccctgccggcagccccacctccacagaggagggaaccagcaccgagcccagcgaaggcagcgccccaggcaccagcaccgagcctagtgagcaggagattaaacggatcaacaagatcagaagaagacttgtgaaagacagcaacaccaagaaggccggcaagacaggccccatgaaaaccctgctggttagagtgatgacacccgatctgagagagcggctggaaaacctgagaaagaagcctgaaaatatcccccagcccatcagcaatacatctagagccaacctgaataagctgctgaccgattacaccgaaatgaagaaggcgatcctgcatgtgtactgggaagagttccagaaggaccctgtgggcctgatgagccgggtggcccagcctgccagcaagaagatcgatcagaacaagctgaaacctgagatggacgagaagggcaacctgaccaccgccggctttgcctgctctcagtgtggccagcccctgttcgtgtacaagctggagcaggtgtctgagaagggcaaggcttacaccaactacttcggacggtgcaatgtggccgagcacgaaaagctgatcctgctggcccagctgaagcccgagaaggatagcgacgaagccgtgacatatagcctgggaaagtttgggcagagggccctggatttctacagcattcatgtgaccaaggagtccacccaccccgtgaagcccctggcccagatcgccggaaacagatacgcctccggacctgtgggaaaggccctgagcgacgcatgtatgggcacaatcgcctccttcctgtctaagtaccaggacatcatcatcgaacaccagaaggtggtgaagggcaaccagaagagactggagagcctgcgggagctggccggcaaggaaaacctggaataccctagcgtgaccctgccacctcagcctcacaccaaggagggcgttgatgcctacaacgaagtgatcgcccgggtgcgaatgtgggtgaacctgaacctgtggcagaagctgaagctaagcagagatgatgccaagcctctgctgagactgaagggattcccttcctttcctctggtcgagagacaggccaacgaagtggactggtgggacatggtgtgtaacgtgaagaagctgatcaacgagaaaaaggaggatggcaaggtgttttggcagaatctggctggctacaagagacaggaagccctgagaccatacctgagcagcgaggaagatcggaagaagggaaagaaattcgctcggtaccagctgggcgacctgctgctgcacctggaaaagaagcacggcgaggactggggaaaggtgtacgacgaggcctgggagcggattgacaagaaagtggaaggcctgagcaagcacatcaagctggaagaggaacggagaagcgaggacgcccagagcaaggccgccctgaccgactggctgcgggctaaggccagcttcgtgatcgagggcctgaaggaggccgacaaggacgagttctgcagatgcgagctgaagctgcagaagtggtacggggacctgcggggaaagcccttcgccatcgaagccgagaacagcatcctggacatcagcggcttcagcaagcagtacaactgtgccttcatctggcagaaggacggcgtgaagaagctgaacctgtacctgatcatcaactacttcaagggcggcaagctgcggttcaagaagatcaaacctgaagccttcgaagccaacagattctacaccgtgatcaacaaaaagagcggcgagatcgtgcccatggaggtgaacttcaacttcgacgaccccaacctgatcatcctgcctctggcctttggcaagagacagggcagagaattcatctggaacgacctgctgtccctggaaaccggcagcctgaagctggccaacggaagagtgatcgagaagacactgtacaacagaagaacccggcaggatgagcctgccctgttcgtggccctgaccttcgagcggcgggaggtcctggactcctccaatatcaaaccaatgaacctgatcggcgtggcaagaggcgaaaacatccccgccgtgatcgccctgaccgaccccgagggctgcccactgagccggtttaaggatagcctgggaaacccaacccacatcctgagaatcggcgagagctataaggagaagcagcggaccatccaggccaagaaggaggtggagcagcggagagccggcggctacagccggaagtacgccagcaaagccaagaatctggcagacgatatggtgagaaacaccgctagagatctgctgtactacgccgtgacccaggatgccatgctgatcttcgccaacctgagccggggcttcggccggcagggcaagcggaccttcatggccgagagacagtacacacggatggaggactggctgaccgccaagctggcctacgagggcctgagcaagacctacctgtccaagacactggcccagtacacctccaagacatgcagcaactgtgggtttaccatcaccagcgccgactacgacagggtgctggagaagctgaagaagacagcaacaggctggatgaccacaattaacggcaaggagctgaaggtggagggccagattacctactacaacagatacaagagacagaacgtagtcaaggacctgtccgtcgagctggatagactgagcgaagaatctgtgaacaacgacatctcctcctggacaaagggcagaagcggagaagctctgagcctcctgaagaaaagattctcccatagacccgtgcaggagaagttcgtgtgcctgaactgcggcttcgagacacacgcagccgagcaagccgccctgaacatcgccagatcctggctgttcctgcggagccaggagtacaagaaataccagacaaacaagacaaccggcaacaccgataagagagccttcgtcgagacctggcagtccttttaccggaagaagcttaaggaggtgtggaaacctgccgtgcggtctggcggatctggcggaggctccaccagccccaagaaaaagagaaaagtctaagctgccttctgcggggcttgccttctggccatgcccttcttctctcccttgcacctgtacctcttggtctttgaataaagcctgagtaggaaggctagcaaaaaaaaaaaaaaaaaaaaaaaaaaaaaaaaaaaaaaaaaaaaaaaaaaaaaaaaaaaaaaaaaaaaaaaaaaaaaaaa

SEQ ID NO: 12822 - RNA, 5785 nt, synthetic construct
  source 1..5785: mol_type = other RNA
aggaaataagagagaaaagaagagtaagaagaaatataagagccaccatggcccctaagaagaagcgtaaagtgagccggatggaacgcctcgtctacgaggtgcggcagaagtgcagaaacatcgaggacatctgcatctcctgcggatctctgaacgtgaccctggagcacccactgttcatcggcggcatgtgccagaactgtaaaaactgttttctggagtgtgcctatcaatacgacgatgacggctaccagagctactgcaccatctgttgcggcggaagagaggtgctgatgtgtggaaataacaactgctgccggtgcttctgcgtggaatgcgtggacctgctggtgggccccggcgccgcccaggccgctattaaggaagatccttggaactgctacatgtgcggccacaagggcacatacggcctgctgagacggagagaggactggcctagcagactgcagatgttcttcgccaataaccacgaccaggagttcgacccccctaaggtgtaccctcccgtccccgccgagaagagaaagcccatccgggtcctgagcctgttcgatggcatcgccaccggtctgctggtgctgaaggacctgggcatccaggtggataggtacattgcctccgaggtgtgcgaggactccatcaccgtgggaatggtgcgtcatcagggcaagatcatgtacgtgggcgacgtgcggagcgtgacacagaagcatatccaggagtggggccctttcgacctggtgatcggcggcagcccttgcaatgacctgagcatcgtgaacccagcccggaagggcctgtacgagggaaccggcagactgttcttcgagttttacagactgctgcacgacgcccggcctaaggaaggcgacgaccggcccttcttttggctgttcgagaatgtggtggccatgggagtcagcgacaagcgggatattagccggttcctggagagcaaccccgtgatgatcgatgccaaggaagtgagcgccgcccaccgggccagatacttctggggcaatctgcctggcatgaacagacccctggccagcaccgtgaacgacaagctggagctgcaggagtgcctggagcacggccggatcgccaagttcagcaaggtgagaaccatcaccacccgaagcaacagcatcaaacaaggcaaggaccagcactttcctgtgttcatgaacgagaaggaggacatcctgtggtgtaccgagatggagagagtgttcgggttcccagtccactacacagatgtcagcaacatgtctagactggccagacagagactgctgggaagaagctggtccgtccctgtgatcagacacctgttcgcccctctgaaggagtacttcgcctgcgtgagcagcggcaacagcaacgccaacagccggggccccagcttctctagcggcctggtgccactgtccctgagagggagccacatgggccccatggagatctacaaaaccgtgagcgcctggaagcggcagcctgtgcgcgtgctgagcctgtttcggaatatcgataaagtcctgaaaagcctgggattcctggagagcggctctggctccggcggtggcaccctgaagtacgtggaggatgtgacaaacgtggtcagacgggatgtggagaagtggggccccttcgatctggtgtacggcagcacccaacccctgggcagctcttgtgaccggtgccctggctggtacatgtttcagttccaccggatcctgcagtacgccctgccgagacaggagtcccagcggccattcttttggattttcatggacaacttgctgctgaccgaggatgaccaggaaactaccactcggttcctgcagaccgaagccgtgaccctgcaggacgtgagaggccgggactaccagaacgccatgcgggtgtggtccaacatccctggactgaaaagcaagcacgcacctctgacccctaaagaagaggagtacctgcaggcccaggtgcggagcagaagcaagctggacgcccctaaggtggatctgctggtgaagaattgcctcctgcccctgagagagtacttcaagtatttcagccagaatagtctgcccctgggaggcagcggcggcggcgcccacaggagcctgatgttcagcgacgtgagcatcgtgttcagccaggaggagtgggagtacctggacctggagcagagggacctgtacagggacgtgatgctggagaactacagcaacctggtgagcctgggctgcttcatcagcaagcccgacgtgatcagcctgctggagcagggcaaggagccctggaaggtggtgaggaagggcaggaggaggtacgccgacctggagaccaggtacggcggcccaagcagcggcgcccctcctcccagcggcggcagcccagccggctccccaacctctaccgaggagggcacctctgagtccgccacccccgagagcggccctggcacctccaccgagcccagcgagggcagcgcacccggcagccctgccggcagccccacctccacagaggagggaaccagcaccgagcccagcgaaggcagcgccccaggcaccagcaccgagcctagtgagcaggagattaaacggatcaacaagatcagaagaagacttgtgaaagacagcaacaccaagaaggccggcaagacaggccccatgaaaaccctgctggttagagtgatgacacccgatctgagagagcggctggaaaacctgagaaagaagcctgaaaatatcccccagcccatcagcaatacatctagagccaacctgaataagctgctgaccgattacaccgaaatgaagaaggcgatcctgcatgtgtactgggaagagttccagaaggaccctgtgggcctgatgagccgggtggcccagcctgccagcaagaagatcgatcagaacaagctgaaacctgagatggacgagaagggcaacctgaccaccgccggctttgcctgctctcagtgtggccagcccctgttcgtgtacaagctggagcaggtgtctgagaagggcaaggcttacaccaactacttcggacggtgcaatgtggccgagcacgaaaagctgatcctgctggcccagctgaagcccgagaaggatagcgacgaagccgtgacatatagcctgggaaagtttgggcagagggccctggatttctacagcattcatgtgaccaaggagtccacccaccccgtgaagcccctggcccagatcgccggaaacagatacgcctccggacctgtgggaaaggccctgagcgacgcatgtatgggcacaatcgcctccttcctgtctaagtaccaggacatcatcatcgaacaccagaaggtggtgaagggcaaccagaagagactggagagcctgcgggagctggccggcaaggaaaacctggaataccctagcgtgaccctgccacctcagcctcacaccaaggagggcgttgatgcctacaacgaagtgatcgcccgggtgcgaatgtgggtgaacctgaacctgtggcagaagctgaagctaagcagagatgatgccaagcctctgctgagactgaagggattcccttcctttcctctggtcgagagacaggccaacgaagtggactggtgggacatggtgtgtaacgtgaagaagctgatcaacgagaaaaaggaggatggcaaggtgttttggcagaatctggctggctacaagagacaggaagccctgagaccatacctgagcagcgaggaagatcggaagaagggaaagaaattcgctcggtaccagctgggcgacctgctgctgcacctggaaaagaagcacggcgaggactggggaaaggtgtacgacgaggcctgggagcggattgacaagaaagtggaaggcctgagcaagcacatcaagctggaagaggaacggagaagcgaggacgcccagagcaaggccgccctgaccgactggctgcgggctaaggccagcttcgtgatcgagggcctgaaggaggccgacaaggacgagttctgcagatgcgagctgaagctgcagaagtggtacggggacctgcggggaaagcccttcgccatcgaagccgagaacagcatcctggacatcagcggcttcagcaagcagtacaactgtgccttcatctggcagaaggacggcgtgaagaagctgaacctgtacctgatcatcaactacttcaagggcggcaagctgcggttcaagaagatcaaacctgaagccttcgaagccaacagattctacaccgtgatcaacaaaaagagcggcgagatcgtgcccatggaggtgaacttcaacttcgacgaccccaacctgatcatcctgcctctggcctttggcaagagacagggcagagaattcatctggaacgacctgctgtccctggaaaccggcagcctgaagctggccaacggaagagtgatcgagaagacactgtacaacagaagaacccggcaggatgagcctgccctgttcgtggccctgaccttcgagcggcgggaggtcctggactcctccaatatcaaaccaatgaacctgatcggcgtggcaagaggcgaaaacatccccgccgtgatcgccctgaccgaccccgagggctgcccactgagccggtttaaggatagcctgggaaacccaacccacatcctgagaatcggcgagagctataaggagaagcagcggaccatccaggccaagaaggaggtggagcagcggagagccggcggctacagccggaagtacgccagcaaagccaagaatctggcagacgatatggtgagaaacaccgctagagatctgctgtactacgccgtgacccaggatgccatgctgatcttcgccaacctgagccggggcttcggccggcagggcaagcggaccttcatggccgagagacagtacacacggatggaggactggctgaccgccaagctggcctacgagggcctgagcaagacctacctgtccaagacactggcccagtacacctccaagacatgcagcaactgtgggtttaccatcaccagcgccgactacgacagggtgctggagaagctgaagaagacagcaacaggctggatgaccacaattaacggcaaggagctgaaggtggagggccagattacctactacaacagatacaagagacagaacgtagtcaaggacctgtccgtcgagctggatagactgagcgaagaatctgtgaacaacgacatctcctcctggacaaagggcagaagcggagaagctctgagcctcctgaagaaaagattctcccatagacccgtgcaggagaagttcgtgtgcctgaactgcggcttcgagacacacgcagccgagcaagccgccctgaacatcgccagatcctggctgttcctgcggagccaggagtacaagaaataccagacaaacaagacaaccggcaacaccgataagagagccttcgtcgagacctggcagtccttttaccggaagaagcttaaggaggtgtggaaacctgccgtgcggtctggcggatctggcggaggctccaccagccccaagaaaaagagaaaagtctaagctgccttctgcggggcttgccttctggccatgcccttcttctctcccttgcacctgtacctcttggtctttgaataaagcctgagtaggaaggctagcaaaaaaaaaaaaaaaaaaaaaaaaaaaaaaaaaaaaaaaaaaaaaaaaaaaaaaaaaaaaaaaaaaaaaaaaaaaaaaaa

SEQ ID NO: 12823 - RNA, 5785 nt, synthetic construct
  source 1..5785: mol_type = other RNA
aggaaataagagagaaaagaagagtaagaagaaatataagagccaccatggcccctaagaagaagcgtaaagtgagccggatggaacgcctcgtctacgaggtgcggcagaagtgcagaaacatcgaggacatctgcatctcctgcggatctctgaacgtgaccctggagcacccactgttcatcggcggcatgtgccagaactgtaaaaactgttttctggagtgtgcctatcaatacgacgatgacggctaccagagctactgcaccatctgttgcggcggaagagaggtgctgatgtgtggaaataacaactgctgccggtgcttctgcgtggaatgcgtggacctgctggtgggccccggcgccgcccaggccgctattaaggaagatccttggaactgctacatgtgcggccacaagggcacatacggcctgctgagacggagagaggactggcctagcagactgcagatgttcttcgccaataaccacgaccaggagttcgacccccctaaggtgtaccctcccgtccccgccgagaagagaaagcccatccgggtcctgagcctgttcgatggcatcgccaccggtctgctggtgctgaaggacctgggcatccaggtggataggtacattgcctccgaggtgtgcgaggactccatcaccgtgggaatggtgcgtcatcagggcaagatcatgtacgtgggcgacgtgcggagcgtgacacagaagcatatccaggagtggggccctttcgacctggtgatcggcggcagcccttgcaatgacctgagcatcgtgaacccagcccggaagggcctgtacgagggaaccggcagactgttcttcgagttttacagactgctgcacgacgcccggcctaaggaaggcgacgaccggcccttcttttggctgttcgagaatgtggtggccatgggagtcagcgacaagcgggatattagccggttcctggagagcaaccccgtgatgatcgatgccaaggaagtgagcgccgcccaccgggccagatacttctggggcaatctgcctggcatgaacagacccctggccagcaccgtgaacgacaagctggagctgcaggagtgcctggagcacggccggatcgccaagttcagcaaggtgagaaccatcaccacccgaagcaacagcatcaaacaaggcaaggaccagcactttcctgtgttcatgaacgagaaggaggacatcctgtggtgtaccgagatggagagagtgttcgggttcccagtccactacacagatgtcagcaacatgtctagactggccagacagagactgctgggaagaagctggtccgtccctgtgatcagacacctgttcgcccctctgaaggagtacttcgcctgcgtgagcagcggcaacagcaacgccaacagccggggccccagcttctctagcggcctggtgccactgtccctgagagggagccacatgggccccatggagatctacaaaaccgtgagcgcctggaagcggcagcctgtgcgcgtgctgagcctgtttcggaatatcgataaagtcctgaaaagcctgggattcctggagagcggctctggctccggcggtggcaccctgaagtacgtggaggatgtgacaaacgtggtcagacgggatgtggagaagtggggccccttcgatctggtgtacggcagcacccaacccctgggcagctcttgtgaccggtgccctggctggtacatgtttcagttccaccggatcctgcagtacgccctgccgagacaggagtcccagcggccattcttttggattttcatggacaacttgctgctgaccgaggatgaccaggaaactaccactcggttcctgcagaccgaagccgtgaccctgcaggacgtgagaggccgggactaccagaacgccatgcgggtgtggtccaacatccctggactgaaaagcaagcacgcacctctgacccctaaagaagaggagtacctgcaggcccaggtgcggagcagaagcaagctggacgcccctaaggtggatctgctggtgaagaattgcctcctgcccctgagagagtacttcaagtatttcagccagaatagtctgcccctgggaggcagcggcggcggcatgaccaaggcccaggagagcctgaccctgaaggacgtggccgtggacttcacctgggaggagtggcagctgctgggccccgcccagaagaggctgtacagggacgtgatgctggagaactacagcaacctggtgagcgtgggctaccaggccagcaagcccgacgccctgaccaagctggagcagggcgagcccctgtggaccctggaggacgagatccacagccccgcccaccccgagatcggcggcccaagcagcggcgcccctcctcccagcggcggcagcccagccggctccccaacctctaccgaggagggcacctctgagtccgccacccccgagagcggccctggcacctccaccgagcccagcgagggcagcgcacccggcagccctgccggcagccccacctccacagaggagggaaccagcaccgagcccagcgaaggcagcgccccaggcaccagcaccgagcctagtgagcaggagattaaacggatcaacaagatcagaagaagacttgtgaaagacagcaacaccaagaaggccggcaagacaggccccatgaaaaccctgctggttagagtgatgacacccgatctgagagagcggctggaaaacctgagaaagaagcctgaaaatatcccccagcccatcagcaatacatctagagccaacctgaataagctgctgaccgattacaccgaaatgaagaaggcgatcctgcatgtgtactgggaagagttccagaaggaccctgtgggcctgatgagccgggtggcccagcctgccagcaagaagatcgatcagaacaagctgaaacctgagatggacgagaagggcaacctgaccaccgccggctttgcctgctctcagtgtggccagcccctgttcgtgtacaagctggagcaggtgtctgagaagggcaaggcttacaccaactacttcggacggtgcaatgtggccgagcacgaaaagctgatcctgctggcccagctgaagcccgagaaggatagcgacgaagccgtgacatatagcctgggaaagtttgggcagagggccctggatttctacagcattcatgtgaccaaggagtccacccaccccgtgaagcccctggcccagatcgccggaaacagatacgcctccggacctgtgggaaaggccctgagcgacgcatgtatgggcacaatcgcctccttcctgtctaagtaccaggacatcatcatcgaacaccagaaggtggtgaagggcaaccagaagagactggagagcctgcgggagctggccggcaaggaaaacctggaataccctagcgtgaccctgccacctcagcctcacaccaaggagggcgttgatgcctacaacgaagtgatcgcccgggtgcgaatgtgggtgaacctgaacctgtggcagaagctgaagctaagcagagatgatgccaagcctctgctgagactgaagggattcccttcctttcctctggtcgagagacaggccaacgaagtggactggtgggacatggtgtgtaacgtgaagaagctgatcaacgagaaaaaggaggatggcaaggtgttttggcagaatctggctggctacaagagacaggaagccctgagaccatacctgagcagcgaggaagatcggaagaagggaaagaaattcgctcggtaccagctgggcgacctgctgctgcacctggaaaagaagcacggcgaggactggggaaaggtgtacgacgaggcctgggagcggattgacaagaaagtggaaggcctgagcaagcacatcaagctggaagaggaacggagaagcgaggacgcccagagcaaggccgccctgaccgactggctgcgggctaaggccagcttcgtgatcgagggcctgaaggaggccgacaaggacgagttctgcagatgcgagctgaagctgcagaagtggtacggggacctgcggggaaagcccttcgccatcgaagccgagaacagcatcctggacatcagcggcttcagcaagcagtacaactgtgccttcatctggcagaaggacggcgtgaagaagctgaacctgtacctgatcatcaactacttcaagggcggcaagctgcggttcaagaagatcaaacctgaagccttcgaagccaacagattctacaccgtgatcaacaaaaagagcggcgagatcgtgcccatggaggtgaacttcaacttcgacgaccccaacctgatcatcctgcctctggcctttggcaagagacagggcagagaattcatctggaacgacctgctgtccctggaaaccggcagcctgaagctggccaacggaagagtgatcgagaagacactgtacaacagaagaacccggcaggatgagcctgccctgttcgtggccctgaccttcgagcggcgggaggtcctggactcctccaatatcaaaccaatgaacctgatcggcgtggcaagaggcgaaaacatccccgccgtgatcgccctgaccgaccccgagggctgcccactgagccggtttaaggatagcctgggaaacccaacccacatcctgagaatcggcgagagctataaggagaagcagcggaccatccaggccaagaaggaggtggagcagcggagagccggcggctacagccggaagtacgccagcaaagccaagaatctggcagacgatatggtgagaaacaccgctagagatctgctgtactacgccgtgacccaggatgccatgctgatcttcgccaacctgagccggggcttcggccggcagggcaagcggaccttcatggccgagagacagtacacacggatggaggactggctgaccgccaagctggcctacgagggcctgagcaagacctacctgtccaagacactggcccagtacacctccaagacatgcagcaactgtgggtttaccatcaccagcgccgactacgacagggtgctggagaagctgaagaagacagcaacaggctggatgaccacaattaacggcaaggagctgaaggtggagggccagattacctactacaacagatacaagagacagaacgtagtcaaggacctgtccgtcgagctggatagactgagcgaagaatctgtgaacaacgacatctcctcctggacaaagggcagaagcggagaagctctgagcctcctgaagaaaagattctcccatagacccgtgcaggagaagttcgtgtgcctgaactgcggcttcgagacacacgcagccgagcaagccgccctgaacatcgccagatcctggctgttcctgcggagccaggagtacaagaaataccagacaaacaagacaaccggcaacaccgataagagagccttcgtcgagacctggcagtccttttaccggaagaagcttaaggaggtgtggaaacctgccgtgcggtctggcggatctggcggaggctccaccagccccaagaaaaagagaaaagtctaagctgccttctgcggggcttgccttctggccatgcccttcttctctcccttgcacctgtacctcttggtctttgaataaagcctgagtaggaaggctagcaaaaaaaaaaaaaaaaaaaaaaaaaaaaaaaaaaaaaaaaaaaaaaaaaaaaaaaaaaaaaaaaaaaaaaaaaaaaaaaa

SEQ ID NO: 12824 - RNA, 5785 nt, synthetic construct
  source 1..5785: mol_type = other RNA
aggaaataagagagaaaagaagagtaagaagaaatataagagccaccatggcccctaagaagaagcgtaaagtgagccggatggaacgcctcgtctacgaggtgcggcagaagtgcagaaacatcgaggacatctgcatctcctgcggatctctgaacgtgaccctggagcacccactgttcatcggcggcatgtgccagaactgtaaaaactgttttctggagtgtgcctatcaatacgacgatgacggctaccagagctactgcaccatctgttgcggcggaagagaggtgctgatgtgtggaaataacaactgctgccggtgcttctgcgtggaatgcgtggacctgctggtgggccccggcgccgcccaggccgctattaaggaagatccttggaactgctacatgtgcggccacaagggcacatacggcctgctgagacggagagaggactggcctagcagactgcagatgttcttcgccaataaccacgaccaggagttcgacccccctaaggtgtaccctcccgtccccgccgagaagagaaagcccatccgggtcctgagcctgttcgatggcatcgccaccggtctgctggtgctgaaggacctgggcatccaggtggataggtacattgcctccgaggtgtgcgaggactccatcaccgtgggaatggtgcgtcatcagggcaagatcatgtacgtgggcgacgtgcggagcgtgacacagaagcatatccaggagtggggccctttcgacctggtgatcggcggcagcccttgcaatgacctgagcatcgtgaacccagcccggaagggcctgtacgagggaaccggcagactgttcttcgagttttacagactgctgcacgacgcccggcctaaggaaggcgacgaccggcccttcttttggctgttcgagaatgtggtggccatgggagtcagcgacaagcgggatattagccggttcctggagagcaaccccgtgatgatcgatgccaaggaagtgagcgccgcccaccgggccagatacttctggggcaatctgcctggcatgaacagacccctggccagcaccgtgaacgacaagctggagctgcaggagtgcctggagcacggccggatcgccaagttcagcaaggtgagaaccatcaccacccgaagcaacagcatcaaacaaggcaaggaccagcactttcctgtgttcatgaacgagaaggaggacatcctgtggtgtaccgagatggagagagtgttcgggttcccagtccactacacagatgtcagcaacatgtctagactggccagacagagactgctgggaagaagctggtccgtccctgtgatcagacacctgttcgcccctctgaaggagtacttcgcctgcgtgagcagcggcaacagcaacgccaacagccggggccccagcttctctagcggcctggtgccactgtccctgagagggagccacatgggccccatggagatctacaaaaccgtgagcgcctggaagcggcagcctgtgcgcgtgctgagcctgtttcggaatatcgataaagtcctgaaaagcctgggattcctggagagcggctctggctccggcggtggcaccctgaagtacgtggaggatgtgacaaacgtggtcagacgggatgtggagaagtggggccccttcgatctggtgtacggcagcacccaacccctgggcagctcttgtgaccggtgccctggctggtacatgtttcagttccaccggatcctgcagtacgccctgccgagacaggagtcccagcggccattcttttggattttcatggacaacttgctgctgaccgaggatgaccaggaaactaccactcggttcctgcagaccgaagccgtgaccctgcaggacgtgagaggccgggactaccagaacgccatgcgggtgtggtccaacatccctggactgaaaagcaagcacgcacctctgacccctaaagaagaggagtacctgcaggcccaggtgcggagcagaagcaagctggacgcccctaaggtggatctgctggtgaagaattgcctcctgcccctgagagagtacttcaagtatttcagccagaatagtctgcccctgggaggcagcggcggcggcatgatgaccgccgtgagcctgaccaccaggccccaggagagcgtggccttcgaggacgtggccgtgtacttcaccaccaaggagtgggccatcatggtgcccgccgagagggccctgtacagggacgtgatgctggagaactacgaggccgtggccttcgtggtgccccccaccagcaagcccgccctggtgagccacctggagcagggcaaggagagctgcttcacccagccccagggcgtgggcggcccaagcagcggcgcccctcctcccagcggcggcagcccagccggctccccaacctctaccgaggagggcacctctgagtccgccacccccgagagcggccctggcacctccaccgagcccagcgagggcagcgcacccggcagccctgccggcagccccacctccacagaggagggaaccagcaccgagcccagcgaaggcagcgccccaggcaccagcaccgagcctagtgagcaggagattaaacggatcaacaagatcagaagaagacttgtgaaagacagcaacaccaagaaggccggcaagacaggccccatgaaaaccctgctggttagagtgatgacacccgatctgagagagcggctggaaaacctgagaaagaagcctgaaaatatcccccagcccatcagcaatacatctagagccaacctgaataagctgctgaccgattacaccgaaatgaagaaggcgatcctgcatgtgtactgggaagagttccagaaggaccctgtgggcctgatgagccgggtggcccagcctgccagcaagaagatcgatcagaacaagctgaaacctgagatggacgagaagggcaacctgaccaccgccggctttgcctgctctcagtgtggccagcccctgttcgtgtacaagctggagcaggtgtctgagaagggcaaggcttacaccaactacttcggacggtgcaatgtggccgagcacgaaaagctgatcctgctggcccagctgaagcccgagaaggatagcgacgaagccgtgacatatagcctgggaaagtttgggcagagggccctggatttctacagcattcatgtgaccaaggagtccacccaccccgtgaagcccctggcccagatcgccggaaacagatacgcctccggacctgtgggaaaggccctgagcgacgcatgtatgggcacaatcgcctccttcctgtctaagtaccaggacatcatcatcgaacaccagaaggtggtgaagggcaaccagaagagactggagagcctgcgggagctggccggcaaggaaaacctggaataccctagcgtgaccctgccacctcagcctcacaccaaggagggcgttgatgcctacaacgaagtgatcgcccgggtgcgaatgtgggtgaacctgaacctgtggcagaagctgaagctaagcagagatgatgccaagcctctgctgagactgaagggattcccttcctttcctctggtcgagagacaggccaacgaagtggactggtgggacatggtgtgtaacgtgaagaagctgatcaacgagaaaaaggaggatggcaaggtgttttggcagaatctggctggctacaagagacaggaagccctgagaccatacctgagcagcgaggaagatcggaagaagggaaagaaattcgctcggtaccagctgggcgacctgctgctgcacctggaaaagaagcacggcgaggactggggaaaggtgtacgacgaggcctgggagcggattgacaagaaagtggaaggcctgagcaagcacatcaagctggaagaggaacggagaagcgaggacgcccagagcaaggccgccctgaccgactggctgcgggctaaggccagcttcgtgatcgagggcctgaaggaggccgacaaggacgagttctgcagatgcgagctgaagctgcagaagtggtacggggacctgcggggaaagcccttcgccatcgaagccgagaacagcatcctggacatcagcggcttcagcaagcagtacaactgtgccttcatctggcagaaggacggcgtgaagaagctgaacctgtacctgatcatcaactacttcaagggcggcaagctgcggttcaagaagatcaaacctgaagccttcgaagccaacagattctacaccgtgatcaacaaaaagagcggcgagatcgtgcccatggaggtgaacttcaacttcgacgaccccaacctgatcatcctgcctctggcctttggcaagagacagggcagagaattcatctggaacgacctgctgtccctggaaaccggcagcctgaagctggccaacggaagagtgatcgagaagacactgtacaacagaagaacccggcaggatgagcctgccctgttcgtggccctgaccttcgagcggcgggaggtcctggactcctccaatatcaaaccaatgaacctgatcggcgtggcaagaggcgaaaacatccccgccgtgatcgccctgaccgaccccgagggctgcccactgagccggtttaaggatagcctgggaaacccaacccacatcctgagaatcggcgagagctataaggagaagcagcggaccatccaggccaagaaggaggtggagcagcggagagccggcggctacagccggaagtacgccagcaaagccaagaatctggcagacgatatggtgagaaacaccgctagagatctgctgtactacgccgtgacccaggatgccatgctgatcttcgccaacctgagccggggcttcggccggcagggcaagcggaccttcatggccgagagacagtacacacggatggaggactggctgaccgccaagctggcctacgagggcctgagcaagacctacctgtccaagacactggcccagtacacctccaagacatgcagcaactgtgggtttaccatcaccagcgccgactacgacagggtgctggagaagctgaagaagacagcaacaggctggatgaccacaattaacggcaaggagctgaaggtggagggccagattacctactacaacagatacaagagacagaacgtagtcaaggacctgtccgtcgagctggatagactgagcgaagaatctgtgaacaacgacatctcctcctggacaaagggcagaagcggagaagctctgagcctcctgaagaaaagattctcccatagacccgtgcaggagaagttcgtgtgcctgaactgcggcttcgagacacacgcagccgagcaagccgccctgaacatcgccagatcctggctgttcctgcggagccaggagtacaagaaataccagacaaacaagacaaccggcaacaccgataagagagccttcgtcgagacctggcagtccttttaccggaagaagcttaaggaggtgtggaaacctgccgtgcggtctggcggatctggcggaggctccaccagccccaagaaaaagagaaaagtctaagctgccttctgcggggcttgccttctggccatgcccttcttctctcccttgcacctgtacctcttggtctttgaataaagcctgagtaggaaggctagcaaaaaaaaaaaaaaaaaaaaaaaaaaaaaaaaaaaaaaaaaaaaaaaaaaaaaaaaaaaaaaaaaaaaaaaaaaaaaaaa

SEQ ID NO: 12825 - RNA, 5785 nt, synthetic construct
  source 1..5785: mol_type = other RNA
aggaaataagagagaaaagaagagtaagaagaaatataagagccaccatggcccctaagaagaagcgtaaagtgagccggatggaacgcctcgtctacgaggtgcggcagaagtgcagaaacatcgaggacatctgcatctcctgcggatctctgaacgtgaccctggagcacccactgttcatcggcggcatgtgccagaactgtaaaaactgttttctggagtgtgcctatcaatacgacgatgacggctaccagagctactgcaccatctgttgcggcggaagagaggtgctgatgtgtggaaataacaactgctgccggtgcttctgcgtggaatgcgtggacctgctggtgggccccggcgccgcccaggccgctattaaggaagatccttggaactgctacatgtgcggccacaagggcacatacggcctgctgagacggagagaggactggcctagcagactgcagatgttcttcgccaataaccacgaccaggagttcgacccccctaaggtgtaccctcccgtccccgccgagaagagaaagcccatccgggtcctgagcctgttcgatggcatcgccaccggtctgctggtgctgaaggacctgggcatccaggtggataggtacattgcctccgaggtgtgcgaggactccatcaccgtgggaatggtgcgtcatcagggcaagatcatgtacgtgggcgacgtgcggagcgtgacacagaagcatatccaggagtggggccctttcgacctggtgatcggcggcagcccttgcaatgacctgagcatcgtgaacccagcccggaagggcctgtacgagggaaccggcagactgttcttcgagttttacagactgctgcacgacgcccggcctaaggaaggcgacgaccggcccttcttttggctgttcgagaatgtggtggccatgggagtcagcgacaagcgggatattagccggttcctggagagcaaccccgtgatgatcgatgccaaggaagtgagcgccgcccaccgggccagatacttctggggcaatctgcctggcatgaacagacccctggccagcaccgtgaacgacaagctggagctgcaggagtgcctggagcacggccggatcgccaagttcagcaaggtgagaaccatcaccacccgaagcaacagcatcaaacaaggcaaggaccagcactttcctgtgttcatgaacgagaaggaggacatcctgtggtgtaccgagatggagagagtgttcgggttcccagtccactacacagatgtcagcaacatgtctagactggccagacagagactgctgggaagaagctggtccgtccctgtgatcagacacctgttcgcccctctgaaggagtacttcgcctgcgtgagcagcggcaacagcaacgccaacagccggggccccagcttctctagcggcctggtgccactgtccctgagagggagccacatgggccccatggagatctacaaaaccgtgagcgcctggaagcggcagcctgtgcgcgtgctgagcctgtttcggaatatcgataaagtcctgaaaagcctgggattcctggagagcggctctggctccggcggtggcaccctgaagtacgtggaggatgtgacaaacgtggtcagacgggatgtggagaagtggggccccttcgatctggtgtacggcagcacccaacccctgggcagctcttgtgaccggtgccctggctggtacatgtttcagttccaccggatcctgcagtacgccctgccgagacaggagtcccagcggccattcttttggattttcatggacaacttgctgctgaccgaggatgaccaggaaactaccactcggttcctgcagaccgaagccgtgaccctgcaggacgtgagaggccgggactaccagaacgccatgcgggtgtggtccaacatccctggactgaaaagcaagcacgcacctctgacccctaaagaagaggagtacctgcaggcccaggtgcggagcagaagcaagctggacgcccctaaggtggatctgctggtgaagaattgcctcctgcccctgagagagtacttcaagtatttcagccagaatagtctgcccctgggaggcagcggcggcggccagatgcaggtgaagttcgaggacatcgccatcagcttcagccaggaggagtgggagtacctgaacgaggagcagaaggagctgtacagggaggtgatggaggagaactaccagaccctgctgagcctggccaccgacagccccaccttcacccccaagatcatcagctacatcaagaggggcgaggagccctacatcaggggcgagcccgacagcgaggagagggagagcggcaagagcagcggcggcccaagcagcggcgcccctcctcccagcggcggcagcccagccggctccccaacctctaccgaggagggcacctctgagtccgccacccccgagagcggccctggcacctccaccgagcccagcgagggcagcgcacccggcagccctgccggcagccccacctccacagaggagggaaccagcaccgagcccagcgaaggcagcgccccaggcaccagcaccgagcctagtgagcaggagattaaacggatcaacaagatcagaagaagacttgtgaaagacagcaacaccaagaaggccggcaagacaggccccatgaaaaccctgctggttagagtgatgacacccgatctgagagagcggctggaaaacctgagaaagaagcctgaaaatatcccccagcccatcagcaatacatctagagccaacctgaataagctgctgaccgattacaccgaaatgaagaaggcgatcctgcatgtgtactgggaagagttccagaaggaccctgtgggcctgatgagccgggtggcccagcctgccagcaagaagatcgatcagaacaagctgaaacctgagatggacgagaagggcaacctgaccaccgccggctttgcctgctctcagtgtggccagcccctgttcgtgtacaagctggagcaggtgtctgagaagggcaaggcttacaccaactacttcggacggtgcaatgtggccgagcacgaaaagctgatcctgctggcccagctgaagcccgagaaggatagcgacgaagccgtgacatatagcctgggaaagtttgggcagagggccctggatttctacagcattcatgtgaccaaggagtccacccaccccgtgaagcccctggcccagatcgccggaaacagatacgcctccggacctgtgggaaaggccctgagcgacgcatgtatgggcacaatcgcctccttcctgtctaagtaccaggacatcatcatcgaacaccagaaggtggtgaagggcaaccagaagagactggagagcctgcgggagctggccggcaaggaaaacctggaataccctagcgtgaccctgccacctcagcctcacaccaaggagggcgttgatgcctacaacgaagtgatcgcccgggtgcgaatgtgggtgaacctgaacctgtggcagaagctgaagctaagcagagatgatgccaagcctctgctgagactgaagggattcccttcctttcctctggtcgagagacaggccaacgaagtggactggtgggacatggtgtgtaacgtgaagaagctgatcaacgagaaaaaggaggatggcaaggtgttttggcagaatctggctggctacaagagacaggaagccctgagaccatacctgagcagcgaggaagatcggaagaagggaaagaaattcgctcggtaccagctgggcgacctgctgctgcacctggaaaagaagcacggcgaggactggggaaaggtgtacgacgaggcctgggagcggattgacaagaaagtggaaggcctgagcaagcacatcaagctggaagaggaacggagaagcgaggacgcccagagcaaggccgccctgaccgactggctgcgggctaaggccagcttcgtgatcgagggcctgaaggaggccgacaaggacgagttctgcagatgcgagctgaagctgcagaagtggtacggggacctgcggggaaagcccttcgccatcgaagccgagaacagcatcctggacatcagcggcttcagcaagcagtacaactgtgccttcatctggcagaaggacggcgtgaagaagctgaacctgtacctgatcatcaactacttcaagggcggcaagctgcggttcaagaagatcaaacctgaagccttcgaagccaacagattctacaccgtgatcaacaaaaagagcggcgagatcgtgcccatggaggtgaacttcaacttcgacgaccccaacctgatcatcctgcctctggcctttggcaagagacagggcagagaattcatctggaacgacctgctgtccctggaaaccggcagcctgaagctggccaacggaagagtgatcgagaagacactgtacaacagaagaacccggcaggatgagcctgccctgttcgtggccctgaccttcgagcggcgggaggtcctggactcctccaatatcaaaccaatgaacctgatcggcgtggcaagaggcgaaaacatccccgccgtgatcgccctgaccgaccccgagggctgcccactgagccggtttaaggatagcctgggaaacccaacccacatcctgagaatcggcgagagctataaggagaagcagcggaccatccaggccaagaaggaggtggagcagcggagagccggcggctacagccggaagtacgccagcaaagccaagaatctggcagacgatatggtgagaaacaccgctagagatctgctgtactacgccgtgacccaggatgccatgctgatcttcgccaacctgagccggggcttcggccggcagggcaagcggaccttcatggccgagagacagtacacacggatggaggactggctgaccgccaagctggcctacgagggcctgagcaagacctacctgtccaagacactggcccagtacacctccaagacatgcagcaactgtgggtttaccatcaccagcgccgactacgacagggtgctggagaagctgaagaagacagcaacaggctggatgaccacaattaacggcaaggagctgaaggtggagggccagattacctactacaacagatacaagagacagaacgtagtcaaggacctgtccgtcgagctggatagactgagcgaagaatctgtgaacaacgacatctcctcctggacaaagggcagaagcggagaagctctgagcctcctgaagaaaagattctcccatagacccgtgcaggagaagttcgtgtgcctgaactgcggcttcgagacacacgcagccgagcaagccgccctgaacatcgccagatcctggctgttcctgcggagccaggagtacaagaaataccagacaaacaagacaaccggcaacaccgataagagagccttcgtcgagacctggcagtccttttaccggaagaagcttaaggaggtgtggaaacctgccgtgcggtctggcggatctggcggaggctccaccagccccaagaaaaagagaaaagtctaagctgccttctgcggggcttgccttctggccatgcccttcttctctcccttgcacctgtacctcttggtctttgaataaagcctgagtaggaaggctagcaaaaaaaaaaaaaaaaaaaaaaaaaaaaaaaaaaaaaaaaaaaaaaaaaaaaaaaaaaaaaaaaaaaaaaaaaaaaaaaa

SEQ ID NO: 12826 - RNA, 5785 nt, synthetic construct
  source 1..5785: mol_type = other RNA
aggaaataagagagaaaagaagagtaagaagaaatataagagccaccatggcccctaagaagaagcgtaaagtgagccggatggaacgcctcgtctacgaggtgcggcagaagtgcagaaacatcgaggacatctgcatctcctgcggatctctgaacgtgaccctggagcacccactgttcatcggcggcatgtgccagaactgtaaaaactgttttctggagtgtgcctatcaatacgacgatgacggctaccagagctactgcaccatctgttgcggcggaagagaggtgctgatgtgtggaaataacaactgctgccggtgcttctgcgtggaatgcgtggacctgctggtgggccccggcgccgcccaggccgctattaaggaagatccttggaactgctacatgtgcggccacaagggcacatacggcctgctgagacggagagaggactggcctagcagactgcagatgttcttcgccaataaccacgaccaggagttcgacccccctaaggtgtaccctcccgtccccgccgagaagagaaagcccatccgggtcctgagcctgttcgatggcatcgccaccggtctgctggtgctgaaggacctgggcatccaggtggataggtacattgcctccgaggtgtgcgaggactccatcaccgtgggaatggtgcgtcatcagggcaagatcatgtacgtgggcgacgtgcggagcgtgacacagaagcatatccaggagtggggccctttcgacctggtgatcggcggcagcccttgcaatgacctgagcatcgtgaacccagcccggaagggcctgtacgagggaaccggcagactgttcttcgagttttacagactgctgcacgacgcccggcctaaggaaggcgacgaccggcccttcttttggctgttcgagaatgtggtggccatgggagtcagcgacaagcgggatattagccggttcctggagagcaaccccgtgatgatcgatgccaaggaagtgagcgccgcccaccgggccagatacttctggggcaatctgcctggcatgaacagacccctggccagcaccgtgaacgacaagctggagctgcaggagtgcctggagcacggccggatcgccaagttcagcaaggtgagaaccatcaccacccgaagcaacagcatcaaacaaggcaaggaccagcactttcctgtgttcatgaacgagaaggaggacatcctgtggtgtaccgagatggagagagtgttcgggttcccagtccactacacagatgtcagcaacatgtctagactggccagacagagactgctgggaagaagctggtccgtccctgtgatcagacacctgttcgcccctctgaaggagtacttcgcctgcgtgagcagcggcaacagcaacgccaacagccggggccccagcttctctagcggcctggtgccactgtccctgagagggagccacatgggccccatggagatctacaaaaccgtgagcgcctggaagcggcagcctgtgcgcgtgctgagcctgtttcggaatatcgataaagtcctgaaaagcctgggattcctggagagcggctctggctccggcggtggcaccctgaagtacgtggaggatgtgacaaacgtggtcagacgggatgtggagaagtggggccccttcgatctggtgtacggcagcacccaacccctgggcagctcttgtgaccggtgccctggctggtacatgtttcagttccaccggatcctgcagtacgccctgccgagacaggagtcccagcggccattcttttggattttcatggacaacttgctgctgaccgaggatgaccaggaaactaccactcggttcctgcagaccgaagccgtgaccctgcaggacgtgagaggccgggactaccagaacgccatgcgggtgtggtccaacatccctggactgaaaagcaagcacgcacctctgacccctaaagaagaggagtacctgcaggcccaggtgcggagcagaagcaagctggacgcccctaaggtggatctgctggtgaagaattgcctcctgcccctgagagagtacttcaagtatttcagccagaatagtctgcccctgggaggcagcggcggcggcgtgcaggccagcctgagcttcgaggacgtggccgtgcacttcacctgggaggagtggcagctgctggaccccagccagaaggacctgtacaggaacgtgatgtgggagaactactgcaacctggtgagcgtgggctaccagacccccaagcccgacagcttcttccagctggagcagggcgagcccccctggaccgtggagggcgccggccagagccagacctgccccggcaccagggccagcggcggcccaagcagcggcgcccctcctcccagcggcggcagcccagccggctccccaacctctaccgaggagggcacctctgagtccgccacccccgagagcggccctggcacctccaccgagcccagcgagggcagcgcacccggcagccctgccggcagccccacctccacagaggagggaaccagcaccgagcccagcgaaggcagcgccccaggcaccagcaccgagcctagtgagcaggagattaaacggatcaacaagatcagaagaagacttgtgaaagacagcaacaccaagaaggccggcaagacaggccccatgaaaaccctgctggttagagtgatgacacccgatctgagagagcggctggaaaacctgagaaagaagcctgaaaatatcccccagcccatcagcaatacatctagagccaacctgaataagctgctgaccgattacaccgaaatgaagaaggcgatcctgcatgtgtactgggaagagttccagaaggaccctgtgggcctgatgagccgggtggcccagcctgccagcaagaagatcgatcagaacaagctgaaacctgagatggacgagaagggcaacctgaccaccgccggctttgcctgctctcagtgtggccagcccctgttcgtgtacaagctggagcaggtgtctgagaagggcaaggcttacaccaactacttcggacggtgcaatgtggccgagcacgaaaagctgatcctgctggcccagctgaagcccgagaaggatagcgacgaagccgtgacatatagcctgggaaagtttgggcagagggccctggatttctacagcattcatgtgaccaaggagtccacccaccccgtgaagcccctggcccagatcgccggaaacagatacgcctccggacctgtgggaaaggccctgagcgacgcatgtatgggcacaatcgcctccttcctgtctaagtaccaggacatcatcatcgaacaccagaaggtggtgaagggcaaccagaagagactggagagcctgcgggagctggccggcaaggaaaacctggaataccctagcgtgaccctgccacctcagcctcacaccaaggagggcgttgatgcctacaacgaagtgatcgcccgggtgcgaatgtgggtgaacctgaacctgtggcagaagctgaagctaagcagagatgatgccaagcctctgctgagactgaagggattcccttcctttcctctggtcgagagacaggccaacgaagtggactggtgggacatggtgtgtaacgtgaagaagctgatcaacgagaaaaaggaggatggcaaggtgttttggcagaatctggctggctacaagagacaggaagccctgagaccatacctgagcagcgaggaagatcggaagaagggaaagaaattcgctcggtaccagctgggcgacctgctgctgcacctggaaaagaagcacggcgaggactggggaaaggtgtacgacgaggcctgggagcggattgacaagaaagtggaaggcctgagcaagcacatcaagctggaagaggaacggagaagcgaggacgcccagagcaaggccgccctgaccgactggctgcgggctaaggccagcttcgtgatcgagggcctgaaggaggccgacaaggacgagttctgcagatgcgagctgaagctgcagaagtggtacggggacctgcggggaaagcccttcgccatcgaagccgagaacagcatcctggacatcagcggcttcagcaagcagtacaactgtgccttcatctggcagaaggacggcgtgaagaagctgaacctgtacctgatcatcaactacttcaagggcggcaagctgcggttcaagaagatcaaacctgaagccttcgaagccaacagattctacaccgtgatcaacaaaaagagcggcgagatcgtgcccatggaggtgaacttcaacttcgacgaccccaacctgatcatcctgcctctggcctttggcaagagacagggcagagaattcatctggaacgacctgctgtccctggaaaccggcagcctgaagctggccaacggaagagtgatcgagaagacactgtacaacagaagaacccggcaggatgagcctgccctgttcgtggccctgaccttcgagcggcgggaggtcctggactcctccaatatcaaaccaatgaacctgatcggcgtggcaagaggcgaaaacatccccgccgtgatcgccctgaccgaccccgagggctgcccactgagccggtttaaggatagcctgggaaacccaacccacatcctgagaatcggcgagagctataaggagaagcagcggaccatccaggccaagaaggaggtggagcagcggagagccggcggctacagccggaagtacgccagcaaagccaagaatctggcagacgatatggtgagaaacaccgctagagatctgctgtactacgccgtgacccaggatgccatgctgatcttcgccaacctgagccggggcttcggccggcagggcaagcggaccttcatggccgagagacagtacacacggatggaggactggctgaccgccaagctggcctacgagggcctgagcaagacctacctgtccaagacactggcccagtacacctccaagacatgcagcaactgtgggtttaccatcaccagcgccgactacgacagggtgctggagaagctgaagaagacagcaacaggctggatgaccacaattaacggcaaggagctgaaggtggagggccagattacctactacaacagatacaagagacagaacgtagtcaaggacctgtccgtcgagctggatagactgagcgaagaatctgtgaacaacgacatctcctcctggacaaagggcagaagcggagaagctctgagcctcctgaagaaaagattctcccatagacccgtgcaggagaagttcgtgtgcctgaactgcggcttcgagacacacgcagccgagcaagccgccctgaacatcgccagatcctggctgttcctgcggagccaggagtacaagaaataccagacaaacaagacaaccggcaacaccgataagagagccttcgtcgagacctggcagtccttttaccggaagaagcttaaggaggtgtggaaacctgccgtgcggtctggcggatctggcggaggctccaccagccccaagaaaaagagaaaagtctaagctgccttctgcggggcttgccttctggccatgcccttcttctctcccttgcacctgtacctcttggtctttgaataaagcctgagtaggaaggctagcaaaaaaaaaaaaaaaaaaaaaaaaaaaaaaaaaaaaaaaaaaaaaaaaaaaaaaaaaaaaaaaaaaaaaaaaaaaaaaaa

SEQ ID NO: 12827 - RNA, 5785 nt, synthetic construct
  source 1..5785: mol_type = other RNA
aggaaataagagagaaaagaagagtaagaagaaatataagagccaccatggcccctaagaagaagcgtaaagtgagccggatggaacgcctcgtctacgaggtgcggcagaagtgcagaaacatcgaggacatctgcatctcctgcggatctctgaacgtgaccctggagcacccactgttcatcggcggcatgtgccagaactgtaaaaactgttttctggagtgtgcctatcaatacgacgatgacggctaccagagctactgcaccatctgttgcggcggaagagaggtgctgatgtgtggaaataacaactgctgccggtgcttctgcgtggaatgcgtggacctgctggtgggccccggcgccgcccaggccgctattaaggaagatccttggaactgctacatgtgcggccacaagggcacatacggcctgctgagacggagagaggactggcctagcagactgcagatgttcttcgccaataaccacgaccaggagttcgacccccctaaggtgtaccctcccgtccccgccgagaagagaaagcccatccgggtcctgagcctgttcgatggcatcgccaccggtctgctggtgctgaaggacctgggcatccaggtggataggtacattgcctccgaggtgtgcgaggactccatcaccgtgggaatggtgcgtcatcagggcaagatcatgtacgtgggcgacgtgcggagcgtgacacagaagcatatccaggagtggggccctttcgacctggtgatcggcggcagcccttgcaatgacctgagcatcgtgaacccagcccggaagggcctgtacgagggaaccggcagactgttcttcgagttttacagactgctgcacgacgcccggcctaaggaaggcgacgaccggcccttcttttggctgttcgagaatgtggtggccatgggagtcagcgacaagcgggatattagccggttcctggagagcaaccccgtgatgatcgatgccaaggaagtgagcgccgcccaccgggccagatacttctggggcaatctgcctggcatgaacagacccctggccagcaccgtgaacgacaagctggagctgcaggagtgcctggagcacggccggatcgccaagttcagcaaggtgagaaccatcaccacccgaagcaacagcatcaaacaaggcaaggaccagcactttcctgtgttcatgaacgagaaggaggacatcctgtggtgtaccgagatggagagagtgttcgggttcccagtccactacacagatgtcagcaacatgtctagactggccagacagagactgctgggaagaagctggtccgtccctgtgatcagacacctgttcgcccctctgaaggagtacttcgcctgcgtgagcagcggcaacagcaacgccaacagccggggccccagcttctctagcggcctggtgccactgtccctgagagggagccacatgggccccatggagatctacaaaaccgtgagcgcctggaagcggcagcctgtgcgcgtgctgagcctgtttcggaatatcgataaagtcctgaaaagcctgggattcctggagagcggctctggctccggcggtggcaccctgaagtacgtggaggatgtgacaaacgtggtcagacgggatgtggagaagtggggccccttcgatctggtgtacggcagcacccaacccctgggcagctcttgtgaccggtgccctggctggtacatgtttcagttccaccggatcctgcagtacgccctgccgagacaggagtcccagcggccattcttttggattttcatggacaacttgctgctgaccgaggatgaccaggaaactaccactcggttcctgcagaccgaagccgtgaccctgcaggacgtgagaggccgggactaccagaacgccatgcgggtgtggtccaacatccctggactgaaaagcaagcacgcacctctgacccctaaagaagaggagtacctgcaggcccaggtgcggagcagaagcaagctggacgcccctaaggtggatctgctggtgaagaattgcctcctgcccctgagagagtacttcaagtatttcagccagaatagtctgcccctgggaggcagcggcggcggcatgatgttccaggacagcgtggccttcgaggacgtggccgtgaccttcacccaggaggagtgggccctgctggaccccagccagaagaacctgtacagggacgtgatgcaggagaccttcaagaacctggccagcatcggcaagaagtggaaggcccagaacatctacgtggagtacaagaacctgaggaggaacctgaggatcgtgggcgagaggctgttcgagagcaaggagggccaccagggcggcccaagcagcggcgcccctcctcccagcggcggcagcccagccggctccccaacctctaccgaggagggcacctctgagtccgccacccccgagagcggccctggcacctccaccgagcccagcgagggcagcgcacccggcagccctgccggcagccccacctccacagaggagggaaccagcaccgagcccagcgaaggcagcgccccaggcaccagcaccgagcctagtgagcaggagattaaacggatcaacaagatcagaagaagacttgtgaaagacagcaacaccaagaaggccggcaagacaggccccatgaaaaccctgctggttagagtgatgacacccgatctgagagagcggctggaaaacctgagaaagaagcctgaaaatatcccccagcccatcagcaatacatctagagccaacctgaataagctgctgaccgattacaccgaaatgaagaaggcgatcctgcatgtgtactgggaagagttccagaaggaccctgtgggcctgatgagccgggtggcccagcctgccagcaagaagatcgatcagaacaagctgaaacctgagatggacgagaagggcaacctgaccaccgccggctttgcctgctctcagtgtggccagcccctgttcgtgtacaagctggagcaggtgtctgagaagggcaaggcttacaccaactacttcggacggtgcaatgtggccgagcacgaaaagctgatcctgctggcccagctgaagcccgagaaggatagcgacgaagccgtgacatatagcctgggaaagtttgggcagagggccctggatttctacagcattcatgtgaccaaggagtccacccaccccgtgaagcccctggcccagatcgccggaaacagatacgcctccggacctgtgggaaaggccctgagcgacgcatgtatgggcacaatcgcctccttcctgtctaagtaccaggacatcatcatcgaacaccagaaggtggtgaagggcaaccagaagagactggagagcctgcgggagctggccggcaaggaaaacctggaataccctagcgtgaccctgccacctcagcctcacaccaaggagggcgttgatgcctacaacgaagtgatcgcccgggtgcgaatgtgggtgaacctgaacctgtggcagaagctgaagctaagcagagatgatgccaagcctctgctgagactgaagggattcccttcctttcctctggtcgagagacaggccaacgaagtggactggtgggacatggtgtgtaacgtgaagaagctgatcaacgagaaaaaggaggatggcaaggtgttttggcagaatctggctggctacaagagacaggaagccctgagaccatacctgagcagcgaggaagatcggaagaagggaaagaaattcgctcggtaccagctgggcgacctgctgctgcacctggaaaagaagcacggcgaggactggggaaaggtgtacgacgaggcctgggagcggattgacaagaaagtggaaggcctgagcaagcacatcaagctggaagaggaacggagaagcgaggacgcccagagcaaggccgccctgaccgactggctgcgggctaaggccagcttcgtgatcgagggcctgaaggaggccgacaaggacgagttctgcagatgcgagctgaagctgcagaagtggtacggggacctgcggggaaagcccttcgccatcgaagccgagaacagcatcctggacatcagcggcttcagcaagcagtacaactgtgccttcatctggcagaaggacggcgtgaagaagctgaacctgtacctgatcatcaactacttcaagggcggcaagctgcggttcaagaagatcaaacctgaagccttcgaagccaacagattctacaccgtgatcaacaaaaagagcggcgagatcgtgcccatggaggtgaacttcaacttcgacgaccccaacctgatcatcctgcctctggcctttggcaagagacagggcagagaattcatctggaacgacctgctgtccctggaaaccggcagcctgaagctggccaacggaagagtgatcgagaagacactgtacaacagaagaacccggcaggatgagcctgccctgttcgtggccctgaccttcgagcggcgggaggtcctggactcctccaatatcaaaccaatgaacctgatcggcgtggcaagaggcgaaaacatccccgccgtgatcgccctgaccgaccccgagggctgcccactgagccggtttaaggatagcctgggaaacccaacccacatcctgagaatcggcgagagctataaggagaagcagcggaccatccaggccaagaaggaggtggagcagcggagagccggcggctacagccggaagtacgccagcaaagccaagaatctggcagacgatatggtgagaaacaccgctagagatctgctgtactacgccgtgacccaggatgccatgctgatcttcgccaacctgagccggggcttcggccggcagggcaagcggaccttcatggccgagagacagtacacacggatggaggactggctgaccgccaagctggcctacgagggcctgagcaagacctacctgtccaagacactggcccagtacacctccaagacatgcagcaactgtgggtttaccatcaccagcgccgactacgacagggtgctggagaagctgaagaagacagcaacaggctggatgaccacaattaacggcaaggagctgaaggtggagggccagattacctactacaacagatacaagagacagaacgtagtcaaggacctgtccgtcgagctggatagactgagcgaagaatctgtgaacaacgacatctcctcctggacaaagggcagaagcggagaagctctgagcctcctgaagaaaagattctcccatagacccgtgcaggagaagttcgtgtgcctgaactgcggcttcgagacacacgcagccgagcaagccgccctgaacatcgccagatcctggctgttcctgcggagccaggagtacaagaaataccagacaaacaagacaaccggcaacaccgataagagagccttcgtcgagacctggcagtccttttaccggaagaagcttaaggaggtgtggaaacctgccgtgcggtctggcggatctggcggaggctccaccagccccaagaaaaagagaaaagtctaagctgccttctgcggggcttgccttctggccatgcccttcttctctcccttgcacctgtacctcttggtctttgaataaagcctgagtaggaaggctagcaaaaaaaaaaaaaaaaaaaaaaaaaaaaaaaaaaaaaaaaaaaaaaaaaaaaaaaaaaaaaaaaaaaaaaaaaaaaaaaa

SEQ ID NO: 12828 - RNA, 5785 nt, synthetic construct
  source 1..5785: mol_type = other RNA
aggaaataagagagaaaagaagagtaagaagaaatataagagccaccatggcccctaagaagaagcgtaaagtgagccggatggaacgcctcgtctacgaggtgcggcagaagtgcagaaacatcgaggacatctgcatctcctgcggatctctgaacgtgaccctggagcacccactgttcatcggcggcatgtgccagaactgtaaaaactgttttctggagtgtgcctatcaatacgacgatgacggctaccagagctactgcaccatctgttgcggcggaagagaggtgctgatgtgtggaaataacaactgctgccggtgcttctgcgtggaatgcgtggacctgctggtgggccccggcgccgcccaggccgctattaaggaagatccttggaactgctacatgtgcggccacaagggcacatacggcctgctgagacggagagaggactggcctagcagactgcagatgttcttcgccaataaccacgaccaggagttcgacccccctaaggtgtaccctcccgtccccgccgagaagagaaagcccatccgggtcctgagcctgttcgatggcatcgccaccggtctgctggtgctgaaggacctgggcatccaggtggataggtacattgcctccgaggtgtgcgaggactccatcaccgtgggaatggtgcgtcatcagggcaagatcatgtacgtgggcgacgtgcggagcgtgacacagaagcatatccaggagtggggccctttcgacctggtgatcggcggcagcccttgcaatgacctgagcatcgtgaacccagcccggaagggcctgtacgagggaaccggcagactgttcttcgagttttacagactgctgcacgacgcccggcctaaggaaggcgacgaccggcccttcttttggctgttcgagaatgtggtggccatgggagtcagcgacaagcgggatattagccggttcctggagagcaaccccgtgatgatcgatgccaaggaagtgagcgccgcccaccgggccagatacttctggggcaatctgcctggcatgaacagacccctggccagcaccgtgaacgacaagctggagctgcaggagtgcctggagcacggccggatcgccaagttcagcaaggtgagaaccatcaccacccgaagcaacagcatcaaacaaggcaaggaccagcactttcctgtgttcatgaacgagaaggaggacatcctgtggtgtaccgagatggagagagtgttcgggttcccagtccactacacagatgtcagcaacatgtctagactggccagacagagactgctgggaagaagctggtccgtccctgtgatcagacacctgttcgcccctctgaaggagtacttcgcctgcgtgagcagcggcaacagcaacgccaacagccggggccccagcttctctagcggcctggtgccactgtccctgagagggagccacatgggccccatggagatctacaaaaccgtgagcgcctggaagcggcagcctgtgcgcgtgctgagcctgtttcggaatatcgataaagtcctgaaaagcctgggattcctggagagcggctctggctccggcggtggcaccctgaagtacgtggaggatgtgacaaacgtggtcagacgggatgtggagaagtggggccccttcgatctggtgtacggcagcacccaacccctgggcagctcttgtgaccggtgccctggctggtacatgtttcagttccaccggatcctgcagtacgccctgccgagacaggagtcccagcggccattcttttggattttcatggacaacttgctgctgaccgaggatgaccaggaaactaccactcggttcctgcagaccgaagccgtgaccctgcaggacgtgagaggccgggactaccagaacgccatgcgggtgtggtccaacatccctggactgaaaagcaagcacgcacctctgacccctaaagaagaggagtacctgcaggcccaggtgcggagcagaagcaagctggacgcccctaaggtggatctgctggtgaagaattgcctcctgcccctgagagagtacttcaagtatttcagccagaatagtctgcccctgggaggcagcggcggcggcggcctggtgatgttcaaggacgtggccatcgacgtgagccaggaggagtgggagtgcctgaaccccgcccagaggaacctgtacaaggacgtgatgctggagaactacagcaacctggtgagcctgggcctgagcgtgagcaagcccgccatgatcaccagcctggagcagggcaaggagccctggatggtgctgagggaggtgaccggcgagaggtgccccgacctggtgagcaagtgcgagggcggcccaagcagcggcgcccctcctcccagcggcggcagcccagccggctccccaacctctaccgaggagggcacctctgagtccgccacccccgagagcggccctggcacctccaccgagcccagcgagggcagcgcacccggcagccctgccggcagccccacctccacagaggagggaaccagcaccgagcccagcgaaggcagcgccccaggcaccagcaccgagcctagtgagcaggagattaaacggatcaacaagatcagaagaagacttgtgaaagacagcaacaccaagaaggccggcaagacaggccccatgaaaaccctgctggttagagtgatgacacccgatctgagagagcggctggaaaacctgagaaagaagcctgaaaatatcccccagcccatcagcaatacatctagagccaacctgaataagctgctgaccgattacaccgaaatgaagaaggcgatcctgcatgtgtactgggaagagttccagaaggaccctgtgggcctgatgagccgggtggcccagcctgccagcaagaagatcgatcagaacaagctgaaacctgagatggacgagaagggcaacctgaccaccgccggctttgcctgctctcagtgtggccagcccctgttcgtgtacaagctggagcaggtgtctgagaagggcaaggcttacaccaactacttcggacggtgcaatgtggccgagcacgaaaagctgatcctgctggcccagctgaagcccgagaaggatagcgacgaagccgtgacatatagcctgggaaagtttgggcagagggccctggatttctacagcattcatgtgaccaaggagtccacccaccccgtgaagcccctggcccagatcgccggaaacagatacgcctccggacctgtgggaaaggccctgagcgacgcatgtatgggcacaatcgcctccttcctgtctaagtaccaggacatcatcatcgaacaccagaaggtggtgaagggcaaccagaagagactggagagcctgcgggagctggccggcaaggaaaacctggaataccctagcgtgaccctgccacctcagcctcacaccaaggagggcgttgatgcctacaacgaagtgatcgcccgggtgcgaatgtgggtgaacctgaacctgtggcagaagctgaagctaagcagagatgatgccaagcctctgctgagactgaagggattcccttcctttcctctggtcgagagacaggccaacgaagtggactggtgggacatggtgtgtaacgtgaagaagctgatcaacgagaaaaaggaggatggcaaggtgttttggcagaatctggctggctacaagagacaggaagccctgagaccatacctgagcagcgaggaagatcggaagaagggaaagaaattcgctcggtaccagctgggcgacctgctgctgcacctggaaaagaagcacggcgaggactggggaaaggtgtacgacgaggcctgggagcggattgacaagaaagtggaaggcctgagcaagcacatcaagctggaagaggaacggagaagcgaggacgcccagagcaaggccgccctgaccgactggctgcgggctaaggccagcttcgtgatcgagggcctgaaggaggccgacaaggacgagttctgcagatgcgagctgaagctgcagaagtggtacggggacctgcggggaaagcccttcgccatcgaagccgagaacagcatcctggacatcagcggcttcagcaagcagtacaactgtgccttcatctggcagaaggacggcgtgaagaagctgaacctgtacctgatcatcaactacttcaagggcggcaagctgcggttcaagaagatcaaacctgaagccttcgaagccaacagattctacaccgtgatcaacaaaaagagcggcgagatcgtgcccatggaggtgaacttcaacttcgacgaccccaacctgatcatcctgcctctggcctttggcaagagacagggcagagaattcatctggaacgacctgctgtccctggaaaccggcagcctgaagctggccaacggaagagtgatcgagaagacactgtacaacagaagaacccggcaggatgagcctgccctgttcgtggccctgaccttcgagcggcgggaggtcctggactcctccaatatcaaaccaatgaacctgatcggcgtggcaagaggcgaaaacatccccgccgtgatcgccctgaccgaccccgagggctgcccactgagccggtttaaggatagcctgggaaacccaacccacatcctgagaatcggcgagagctataaggagaagcagcggaccatccaggccaagaaggaggtggagcagcggagagccggcggctacagccggaagtacgccagcaaagccaagaatctggcagacgatatggtgagaaacaccgctagagatctgctgtactacgccgtgacccaggatgccatgctgatcttcgccaacctgagccggggcttcggccggcagggcaagcggaccttcatggccgagagacagtacacacggatggaggactggctgaccgccaagctggcctacgagggcctgagcaagacctacctgtccaagacactggcccagtacacctccaagacatgcagcaactgtgggtttaccatcaccagcgccgactacgacagggtgctggagaagctgaagaagacagcaacaggctggatgaccacaattaacggcaaggagctgaaggtggagggccagattacctactacaacagatacaagagacagaacgtagtcaaggacctgtccgtcgagctggatagactgagcgaagaatctgtgaacaacgacatctcctcctggacaaagggcagaagcggagaagctctgagcctcctgaagaaaagattctcccatagacccgtgcaggagaagttcgtgtgcctgaactgcggcttcgagacacacgcagccgagcaagccgccctgaacatcgccagatcctggctgttcctgcggagccaggagtacaagaaataccagacaaacaagacaaccggcaacaccgataagagagccttcgtcgagacctggcagtccttttaccggaagaagcttaaggaggtgtggaaacctgccgtgcggtctggcggatctggcggaggctccaccagccccaagaaaaagagaaaagtctaagctgccttctgcggggcttgccttctggccatgcccttcttctctcccttgcacctgtacctcttggtctttgaataaagcctgagtaggaaggctagcaaaaaaaaaaaaaaaaaaaaaaaaaaaaaaaaaaaaaaaaaaaaaaaaaaaaaaaaaaaaaaaaaaaaaaaaaaaaaaaa

SEQ ID NO: 12829 - RNA, 5785 nt, synthetic construct
  source 1..5785: mol_type = other RNA
aggaaataagagagaaaagaagagtaagaagaaatataagagccaccatggcccctaagaagaagcgtaaagtgagccggatggaacgcctcgtctacgaggtgcggcagaagtgcagaaacatcgaggacatctgcatctcctgcggatctctgaacgtgaccctggagcacccactgttcatcggcggcatgtgccagaactgtaaaaactgttttctggagtgtgcctatcaatacgacgatgacggctaccagagctactgcaccatctgttgcggcggaagagaggtgctgatgtgtggaaataacaactgctgccggtgcttctgcgtggaatgcgtggacctgctggtgggccccggcgccgcccaggccgctattaaggaagatccttggaactgctacatgtgcggccacaagggcacatacggcctgctgagacggagagaggactggcctagcagactgcagatgttcttcgccaataaccacgaccaggagttcgacccccctaaggtgtaccctcccgtccccgccgagaagagaaagcccatccgggtcctgagcctgttcgatggcatcgccaccggtctgctggtgctgaaggacctgggcatccaggtggataggtacattgcctccgaggtgtgcgaggactccatcaccgtgggaatggtgcgtcatcagggcaagatcatgtacgtgggcgacgtgcggagcgtgacacagaagcatatccaggagtggggccctttcgacctggtgatcggcggcagcccttgcaatgacctgagcatcgtgaacccagcccggaagggcctgtacgagggaaccggcagactgttcttcgagttttacagactgctgcacgacgcccggcctaaggaaggcgacgaccggcccttcttttggctgttcgagaatgtggtggccatgggagtcagcgacaagcgggatattagccggttcctggagagcaaccccgtgatgatcgatgccaaggaagtgagcgccgcccaccgggccagatacttctggggcaatctgcctggcatgaacagacccctggccagcaccgtgaacgacaagctggagctgcaggagtgcctggagcacggccggatcgccaagttcagcaaggtgagaaccatcaccacccgaagcaacagcatcaaacaaggcaaggaccagcactttcctgtgttcatgaacgagaaggaggacatcctgtggtgtaccgagatggagagagtgttcgggttcccagtccactacacagatgtcagcaacatgtctagactggccagacagagactgctgggaagaagctggtccgtccctgtgatcagacacctgttcgcccctctgaaggagtacttcgcctgcgtgagcagcggcaacagcaacgccaacagccggggccccagcttctctagcggcctggtgccactgtccctgagagggagccacatgggccccatggagatctacaaaaccgtgagcgcctggaagcggcagcctgtgcgcgtgctgagcctgtttcggaatatcgataaagtcctgaaaagcctgggattcctggagagcggctctggctccggcggtggcaccctgaagtacgtggaggatgtgacaaacgtggtcagacgggatgtggagaagtggggccccttcgatctggtgtacggcagcacccaacccctgggcagctcttgtgaccggtgccctggctggtacatgtttcagttccaccggatcctgcagtacgccctgccgagacaggagtcccagcggccattcttttggattttcatggacaacttgctgctgaccgaggatgaccaggaaactaccactcggttcctgcagaccgaagccgtgaccctgcaggacgtgagaggccgggactaccagaacgccatgcgggtgtggtccaacatccctggactgaaaagcaagcacgcacctctgacccctaaagaagaggagtacctgcaggcccaggtgcggagcagaagcaagctggacgcccctaaggtggatctgctggtgaagaattgcctcctgcccctgagagagtacttcaagtatttcagccagaatagtctgcccctgggaggcagcggcggcggcgcccaggagaccgtgaccttcaaggacgtggccgtggacttcacccaggaggagtggggccagctggaccccgtgcagaggaccctgtacagggacgtgatgctggagacctacggccacctgctgagcgtgggcaaccagatcgccaagcccgaggtgatcagcctgctggagcagggcgaggagccctggagcatggagagggtgtaccccccccagaggacctgccccgagtggatgaggggcggcccaagcagcggcgcccctcctcccagcggcggcagcccagccggctccccaacctctaccgaggagggcacctctgagtccgccacccccgagagcggccctggcacctccaccgagcccagcgagggcagcgcacccggcagccctgccggcagccccacctccacagaggagggaaccagcaccgagcccagcgaaggcagcgccccaggcaccagcaccgagcctagtgagcaggagattaaacggatcaacaagatcagaagaagacttgtgaaagacagcaacaccaagaaggccggcaagacaggccccatgaaaaccctgctggttagagtgatgacacccgatctgagagagcggctggaaaacctgagaaagaagcctgaaaatatcccccagcccatcagcaatacatctagagccaacctgaataagctgctgaccgattacaccgaaatgaagaaggcgatcctgcatgtgtactgggaagagttccagaaggaccctgtgggcctgatgagccgggtggcccagcctgccagcaagaagatcgatcagaacaagctgaaacctgagatggacgagaagggcaacctgaccaccgccggctttgcctgctctcagtgtggccagcccctgttcgtgtacaagctggagcaggtgtctgagaagggcaaggcttacaccaactacttcggacggtgcaatgtggccgagcacgaaaagctgatcctgctggcccagctgaagcccgagaaggatagcgacgaagccgtgacatatagcctgggaaagtttgggcagagggccctggatttctacagcattcatgtgaccaaggagtccacccaccccgtgaagcccctggcccagatcgccggaaacagatacgcctccggacctgtgggaaaggccctgagcgacgcatgtatgggcacaatcgcctccttcctgtctaagtaccaggacatcatcatcgaacaccagaaggtggtgaagggcaaccagaagagactggagagcctgcgggagctggccggcaaggaaaacctggaataccctagcgtgaccctgccacctcagcctcacaccaaggagggcgttgatgcctacaacgaagtgatcgcccgggtgcgaatgtgggtgaacctgaacctgtggcagaagctgaagctaagcagagatgatgccaagcctctgctgagactgaagggattcccttcctttcctctggtcgagagacaggccaacgaagtggactggtgggacatggtgtgtaacgtgaagaagctgatcaacgagaaaaaggaggatggcaaggtgttttggcagaatctggctggctacaagagacaggaagccctgagaccatacctgagcagcgaggaagatcggaagaagggaaagaaattcgctcggtaccagctgggcgacctgctgctgcacctggaaaagaagcacggcgaggactggggaaaggtgtacgacgaggcctgggagcggattgacaagaaagtggaaggcctgagcaagcacatcaagctggaagaggaacggagaagcgaggacgcccagagcaaggccgccctgaccgactggctgcgggctaaggccagcttcgtgatcgagggcctgaaggaggccgacaaggacgagttctgcagatgcgagctgaagctgcagaagtggtacggggacctgcggggaaagcccttcgccatcgaagccgagaacagcatcctggacatcagcggcttcagcaagcagtacaactgtgccttcatctggcagaaggacggcgtgaagaagctgaacctgtacctgatcatcaactacttcaagggcggcaagctgcggttcaagaagatcaaacctgaagccttcgaagccaacagattctacaccgtgatcaacaaaaagagcggcgagatcgtgcccatggaggtgaacttcaacttcgacgaccccaacctgatcatcctgcctctggcctttggcaagagacagggcagagaattcatctggaacgacctgctgtccctggaaaccggcagcctgaagctggccaacggaagagtgatcgagaagacactgtacaacagaagaacccggcaggatgagcctgccctgttcgtggccctgaccttcgagcggcgggaggtcctggactcctccaatatcaaaccaatgaacctgatcggcgtggcaagaggcgaaaacatccccgccgtgatcgccctgaccgaccccgagggctgcccactgagccggtttaaggatagcctgggaaacccaacccacatcctgagaatcggcgagagctataaggagaagcagcggaccatccaggccaagaaggaggtggagcagcggagagccggcggctacagccggaagtacgccagcaaagccaagaatctggcagacgatatggtgagaaacaccgctagagatctgctgtactacgccgtgacccaggatgccatgctgatcttcgccaacctgagccggggcttcggccggcagggcaagcggaccttcatggccgagagacagtacacacggatggaggactggctgaccgccaagctggcctacgagggcctgagcaagacctacctgtccaagacactggcccagtacacctccaagacatgcagcaactgtgggtttaccatcaccagcgccgactacgacagggtgctggagaagctgaagaagacagcaacaggctggatgaccacaattaacggcaaggagctgaaggtggagggccagattacctactacaacagatacaagagacagaacgtagtcaaggacctgtccgtcgagctggatagactgagcgaagaatctgtgaacaacgacatctcctcctggacaaagggcagaagcggagaagctctgagcctcctgaagaaaagattctcccatagacccgtgcaggagaagttcgtgtgcctgaactgcggcttcgagacacacgcagccgagcaagccgccctgaacatcgccagatcctggctgttcctgcggagccaggagtacaagaaataccagacaaacaagacaaccggcaacaccgataagagagccttcgtcgagacctggcagtccttttaccggaagaagcttaaggaggtgtggaaacctgccgtgcggtctggcggatctggcggaggctccaccagccccaagaaaaagagaaaagtctaagctgccttctgcggggcttgccttctggccatgcccttcttctctcccttgcacctgtacctcttggtctttgaataaagcctgagtaggaaggctagcaaaaaaaaaaaaaaaaaaaaaaaaaaaaaaaaaaaaaaaaaaaaaaaaaaaaaaaaaaaaaaaaaaaaaaaaaaaaaaaa

SEQ ID NO: 12830 - RNA, 5785 nt, synthetic construct
  source 1..5785: mol_type = other RNA
aggaaataagagagaaaagaagagtaagaagaaatataagagccaccatggcccctaagaagaagcgtaaagtgagccggatggaacgcctcgtctacgaggtgcggcagaagtgcagaaacatcgaggacatctgcatctcctgcggatctctgaacgtgaccctggagcacccactgttcatcggcggcatgtgccagaactgtaaaaactgttttctggagtgtgcctatcaatacgacgatgacggctaccagagctactgcaccatctgttgcggcggaagagaggtgctgatgtgtggaaataacaactgctgccggtgcttctgcgtggaatgcgtggacctgctggtgggccccggcgccgcccaggccgctattaaggaagatccttggaactgctacatgtgcggccacaagggcacatacggcctgctgagacggagagaggactggcctagcagactgcagatgttcttcgccaataaccacgaccaggagttcgacccccctaaggtgtaccctcccgtccccgccgagaagagaaagcccatccgggtcctgagcctgttcgatggcatcgccaccggtctgctggtgctgaaggacctgggcatccaggtggataggtacattgcctccgaggtgtgcgaggactccatcaccgtgggaatggtgcgtcatcagggcaagatcatgtacgtgggcgacgtgcggagcgtgacacagaagcatatccaggagtggggccctttcgacctggtgatcggcggcagcccttgcaatgacctgagcatcgtgaacccagcccggaagggcctgtacgagggaaccggcagactgttcttcgagttttacagactgctgcacgacgcccggcctaaggaaggcgacgaccggcccttcttttggctgttcgagaatgtggtggccatgggagtcagcgacaagcgggatattagccggttcctggagagcaaccccgtgatgatcgatgccaaggaagtgagcgccgcccaccgggccagatacttctggggcaatctgcctggcatgaacagacccctggccagcaccgtgaacgacaagctggagctgcaggagtgcctggagcacggccggatcgccaagttcagcaaggtgagaaccatcaccacccgaagcaacagcatcaaacaaggcaaggaccagcactttcctgtgttcatgaacgagaaggaggacatcctgtggtgtaccgagatggagagagtgttcgggttcccagtccactacacagatgtcagcaacatgtctagactggccagacagagactgctgggaagaagctggtccgtccctgtgatcagacacctgttcgcccctctgaaggagtacttcgcctgcgtgagcagcggcaacagcaacgccaacagccggggccccagcttctctagcggcctggtgccactgtccctgagagggagccacatgggccccatggagatctacaaaaccgtgagcgcctggaagcggcagcctgtgcgcgtgctgagcctgtttcggaatatcgataaagtcctgaaaagcctgggattcctggagagcggctctggctccggcggtggcaccctgaagtacgtggaggatgtgacaaacgtggtcagacgggatgtggagaagtggggccccttcgatctggtgtacggcagcacccaacccctgggcagctcttgtgaccggtgccctggctggtacatgtttcagttccaccggatcctgcagtacgccctgccgagacaggagtcccagcggccattcttttggattttcatggacaacttgctgctgaccgaggatgaccaggaaactaccactcggttcctgcagaccgaagccgtgaccctgcaggacgtgagaggccgggactaccagaacgccatgcgggtgtggtccaacatccctggactgaaaagcaagcacgcacctctgacccctaaagaagaggagtacctgcaggcccaggtgcggagcagaagcaagctggacgcccctaaggtggatctgctggtgaagaattgcctcctgcccctgagagagtacttcaagtatttcagccagaatagtctgcccctgggaggcagcggcggcggcgccagggccagcctgagcttcgaggacgtggccgtgggcttcagctgggaggagtggcagctgctggcccccagccagaaggacctgtacagggacgtgatgctggagaactacaggaacctggtgagcgtgggctaccaggccagcaagcccgacagcgtgttccagctggagcagggcgagcccccctggatggtggagggcgccgcccagagccagacctgccagggctaccccgccaccggcggcccaagcagcggcgcccctcctcccagcggcggcagcccagccggctccccaacctctaccgaggagggcacctctgagtccgccacccccgagagcggccctggcacctccaccgagcccagcgagggcagcgcacccggcagccctgccggcagccccacctccacagaggagggaaccagcaccgagcccagcgaaggcagcgccccaggcaccagcaccgagcctagtgagcaggagattaaacggatcaacaagatcagaagaagacttgtgaaagacagcaacaccaagaaggccggcaagacaggccccatgaaaaccctgctggttagagtgatgacacccgatctgagagagcggctggaaaacctgagaaagaagcctgaaaatatcccccagcccatcagcaatacatctagagccaacctgaataagctgctgaccgattacaccgaaatgaagaaggcgatcctgcatgtgtactgggaagagttccagaaggaccctgtgggcctgatgagccgggtggcccagcctgccagcaagaagatcgatcagaacaagctgaaacctgagatggacgagaagggcaacctgaccaccgccggctttgcctgctctcagtgtggccagcccctgttcgtgtacaagctggagcaggtgtctgagaagggcaaggcttacaccaactacttcggacggtgcaatgtggccgagcacgaaaagctgatcctgctggcccagctgaagcccgagaaggatagcgacgaagccgtgacatatagcctgggaaagtttgggcagagggccctggatttctacagcattcatgtgaccaaggagtccacccaccccgtgaagcccctggcccagatcgccggaaacagatacgcctccggacctgtgggaaaggccctgagcgacgcatgtatgggcacaatcgcctccttcctgtctaagtaccaggacatcatcatcgaacaccagaaggtggtgaagggcaaccagaagagactggagagcctgcgggagctggccggcaaggaaaacctggaataccctagcgtgaccctgccacctcagcctcacaccaaggagggcgttgatgcctacaacgaagtgatcgcccgggtgcgaatgtgggtgaacctgaacctgtggcagaagctgaagctaagcagagatgatgccaagcctctgctgagactgaagggattcccttcctttcctctggtcgagagacaggccaacgaagtggactggtgggacatggtgtgtaacgtgaagaagctgatcaacgagaaaaaggaggatggcaaggtgttttggcagaatctggctggctacaagagacaggaagccctgagaccatacctgagcagcgaggaagatcggaagaagggaaagaaattcgctcggtaccagctgggcgacctgctgctgcacctggaaaagaagcacggcgaggactggggaaaggtgtacgacgaggcctgggagcggattgacaagaaagtggaaggcctgagcaagcacatcaagctggaagaggaacggagaagcgaggacgcccagagcaaggccgccctgaccgactggctgcgggctaaggccagcttcgtgatcgagggcctgaaggaggccgacaaggacgagttctgcagatgcgagctgaagctgcagaagtggtacggggacctgcggggaaagcccttcgccatcgaagccgagaacagcatcctggacatcagcggcttcagcaagcagtacaactgtgccttcatctggcagaaggacggcgtgaagaagctgaacctgtacctgatcatcaactacttcaagggcggcaagctgcggttcaagaagatcaaacctgaagccttcgaagccaacagattctacaccgtgatcaacaaaaagagcggcgagatcgtgcccatggaggtgaacttcaacttcgacgaccccaacctgatcatcctgcctctggcctttggcaagagacagggcagagaattcatctggaacgacctgctgtccctggaaaccggcagcctgaagctggccaacggaagagtgatcgagaagacactgtacaacagaagaacccggcaggatgagcctgccctgttcgtggccctgaccttcgagcggcgggaggtcctggactcctccaatatcaaaccaatgaacctgatcggcgtggcaagaggcgaaaacatccccgccgtgatcgccctgaccgaccccgagggctgcccactgagccggtttaaggatagcctgggaaacccaacccacatcctgagaatcggcgagagctataaggagaagcagcggaccatccaggccaagaaggaggtggagcagcggagagccggcggctacagccggaagtacgccagcaaagccaagaatctggcagacgatatggtgagaaacaccgctagagatctgctgtactacgccgtgacccaggatgccatgctgatcttcgccaacctgagccggggcttcggccggcagggcaagcggaccttcatggccgagagacagtacacacggatggaggactggctgaccgccaagctggcctacgagggcctgagcaagacctacctgtccaagacactggcccagtacacctccaagacatgcagcaactgtgggtttaccatcaccagcgccgactacgacagggtgctggagaagctgaagaagacagcaacaggctggatgaccacaattaacggcaaggagctgaaggtggagggccagattacctactacaacagatacaagagacagaacgtagtcaaggacctgtccgtcgagctggatagactgagcgaagaatctgtgaacaacgacatctcctcctggacaaagggcagaagcggagaagctctgagcctcctgaagaaaagattctcccatagacccgtgcaggagaagttcgtgtgcctgaactgcggcttcgagacacacgcagccgagcaagccgccctgaacatcgccagatcctggctgttcctgcggagccaggagtacaagaaataccagacaaacaagacaaccggcaacaccgataagagagccttcgtcgagacctggcagtccttttaccggaagaagcttaaggaggtgtggaaacctgccgtgcggtctggcggatctggcggaggctccaccagccccaagaaaaagagaaaagtctaagctgccttctgcggggcttgccttctggccatgcccttcttctctcccttgcacctgtacctcttggtctttgaataaagcctgagtaggaaggctagcaaaaaaaaaaaaaaaaaaaaaaaaaaaaaaaaaaaaaaaaaaaaaaaaaaaaaaaaaaaaaaaaaaaaaaaaaaaaaaaa

SEQ ID NO: 12831 - RNA, 5785 nt, synthetic construct
  source 1..5785: mol_type = other RNA
aggaaataagagagaaaagaagagtaagaagaaatataagagccaccatggcccctaagaagaagcgtaaagtgagccggatggaacgcctcgtctacgaggtgcggcagaagtgcagaaacatcgaggacatctgcatctcctgcggatctctgaacgtgaccctggagcacccactgttcatcggcggcatgtgccagaactgtaaaaactgttttctggagtgtgcctatcaatacgacgatgacggctaccagagctactgcaccatctgttgcggcggaagagaggtgctgatgtgtggaaataacaactgctgccggtgcttctgcgtggaatgcgtggacctgctggtgggccccggcgccgcccaggccgctattaaggaagatccttggaactgctacatgtgcggccacaagggcacatacggcctgctgagacggagagaggactggcctagcagactgcagatgttcttcgccaataaccacgaccaggagttcgacccccctaaggtgtaccctcccgtccccgccgagaagagaaagcccatccgggtcctgagcctgttcgatggcatcgccaccggtctgctggtgctgaaggacctgggcatccaggtggataggtacattgcctccgaggtgtgcgaggactccatcaccgtgggaatggtgcgtcatcagggcaagatcatgtacgtgggcgacgtgcggagcgtgacacagaagcatatccaggagtggggccctttcgacctggtgatcggcggcagcccttgcaatgacctgagcatcgtgaacccagcccggaagggcctgtacgagggaaccggcagactgttcttcgagttttacagactgctgcacgacgcccggcctaaggaaggcgacgaccggcccttcttttggctgttcgagaatgtggtggccatgggagtcagcgacaagcgggatattagccggttcctggagagcaaccccgtgatgatcgatgccaaggaagtgagcgccgcccaccgggccagatacttctggggcaatctgcctggcatgaacagacccctggccagcaccgtgaacgacaagctggagctgcaggagtgcctggagcacggccggatcgccaagttcagcaaggtgagaaccatcaccacccgaagcaacagcatcaaacaaggcaaggaccagcactttcctgtgttcatgaacgagaaggaggacatcctgtggtgtaccgagatggagagagtgttcgggttcccagtccactacacagatgtcagcaacatgtctagactggccagacagagactgctgggaagaagctggtccgtccctgtgatcagacacctgttcgcccctctgaaggagtacttcgcctgcgtgagcagcggcaacagcaacgccaacagccggggccccagcttctctagcggcctggtgccactgtccctgagagggagccacatgggccccatggagatctacaaaaccgtgagcgcctggaagcggcagcctgtgcgcgtgctgagcctgtttcggaatatcgataaagtcctgaaaagcctgggattcctggagagcggctctggctccggcggtggcaccctgaagtacgtggaggatgtgacaaacgtggtcagacgggatgtggagaagtggggccccttcgatctggtgtacggcagcacccaacccctgggcagctcttgtgaccggtgccctggctggtacatgtttcagttccaccggatcctgcagtacgccctgccgagacaggagtcccagcggccattcttttggattttcatggacaacttgctgctgaccgaggatgaccaggaaactaccactcggttcctgcagaccgaagccgtgaccctgcaggacgtgagaggccgggactaccagaacgccatgcgggtgtggtccaacatccctggactgaaaagcaagcacgcacctctgacccctaaagaagaggagtacctgcaggcccaggtgcggagcagaagcaagctggacgcccctaaggtggatctgctggtgaagaattgcctcctgcccctgagagagtacttcaagtatttcagccagaatagtctgcccctgggaggcagcggcggcggcctgcaggtgagcgtgagcttcgaggacgtgaccgtggacttcagcagggaggagtggcagcacctggaccccgcccagaggaggctgtactgggacgtgaccctggagaactacagccacctgctgagcgtgggctaccaggtgcccaagcccgaggtgatcctgaagctggagcagggcgagggcccctggaccctggagggcgagaccccccaccagagctgcagcgacgaggacatcggcggcggcccaagcagcggcgcccctcctcccagcggcggcagcccagccggctccccaacctctaccgaggagggcacctctgagtccgccacccccgagagcggccctggcacctccaccgagcccagcgagggcagcgcacccggcagccctgccggcagccccacctccacagaggagggaaccagcaccgagcccagcgaaggcagcgccccaggcaccagcaccgagcctagtgagcaggagattaaacggatcaacaagatcagaagaagacttgtgaaagacagcaacaccaagaaggccggcaagacaggccccatgaaaaccctgctggttagagtgatgacacccgatctgagagagcggctggaaaacctgagaaagaagcctgaaaatatcccccagcccatcagcaatacatctagagccaacctgaataagctgctgaccgattacaccgaaatgaagaaggcgatcctgcatgtgtactgggaagagttccagaaggaccctgtgggcctgatgagccgggtggcccagcctgccagcaagaagatcgatcagaacaagctgaaacctgagatggacgagaagggcaacctgaccaccgccggctttgcctgctctcagtgtggccagcccctgttcgtgtacaagctggagcaggtgtctgagaagggcaaggcttacaccaactacttcggacggtgcaatgtggccgagcacgaaaagctgatcctgctggcccagctgaagcccgagaaggatagcgacgaagccgtgacatatagcctgggaaagtttgggcagagggccctggatttctacagcattcatgtgaccaaggagtccacccaccccgtgaagcccctggcccagatcgccggaaacagatacgcctccggacctgtgggaaaggccctgagcgacgcatgtatgggcacaatcgcctccttcctgtctaagtaccaggacatcatcatcgaacaccagaaggtggtgaagggcaaccagaagagactggagagcctgcgggagctggccggcaaggaaaacctggaataccctagcgtgaccctgccacctcagcctcacaccaaggagggcgttgatgcctacaacgaagtgatcgcccgggtgcgaatgtgggtgaacctgaacctgtggcagaagctgaagctaagcagagatgatgccaagcctctgctgagactgaagggattcccttcctttcctctggtcgagagacaggccaacgaagtggactggtgggacatggtgtgtaacgtgaagaagctgatcaacgagaaaaaggaggatggcaaggtgttttggcagaatctggctggctacaagagacaggaagccctgagaccatacctgagcagcgaggaagatcggaagaagggaaagaaattcgctcggtaccagctgggcgacctgctgctgcacctggaaaagaagcacggcgaggactggggaaaggtgtacgacgaggcctgggagcggattgacaagaaagtggaaggcctgagcaagcacatcaagctggaagaggaacggagaagcgaggacgcccagagcaaggccgccctgaccgactggctgcgggctaaggccagcttcgtgatcgagggcctgaaggaggccgacaaggacgagttctgcagatgcgagctgaagctgcagaagtggtacggggacctgcggggaaagcccttcgccatcgaagccgagaacagcatcctggacatcagcggcttcagcaagcagtacaactgtgccttcatctggcagaaggacggcgtgaagaagctgaacctgtacctgatcatcaactacttcaagggcggcaagctgcggttcaagaagatcaaacctgaagccttcgaagccaacagattctacaccgtgatcaacaaaaagagcggcgagatcgtgcccatggaggtgaacttcaacttcgacgaccccaacctgatcatcctgcctctggcctttggcaagagacagggcagagaattcatctggaacgacctgctgtccctggaaaccggcagcctgaagctggccaacggaagagtgatcgagaagacactgtacaacagaagaacccggcaggatgagcctgccctgttcgtggccctgaccttcgagcggcgggaggtcctggactcctccaatatcaaaccaatgaacctgatcggcgtggcaagaggcgaaaacatccccgccgtgatcgccctgaccgaccccgagggctgcccactgagccggtttaaggatagcctgggaaacccaacccacatcctgagaatcggcgagagctataaggagaagcagcggaccatccaggccaagaaggaggtggagcagcggagagccggcggctacagccggaagtacgccagcaaagccaagaatctggcagacgatatggtgagaaacaccgctagagatctgctgtactacgccgtgacccaggatgccatgctgatcttcgccaacctgagccggggcttcggccggcagggcaagcggaccttcatggccgagagacagtacacacggatggaggactggctgaccgccaagctggcctacgagggcctgagcaagacctacctgtccaagacactggcccagtacacctccaagacatgcagcaactgtgggtttaccatcaccagcgccgactacgacagggtgctggagaagctgaagaagacagcaacaggctggatgaccacaattaacggcaaggagctgaaggtggagggccagattacctactacaacagatacaagagacagaacgtagtcaaggacctgtccgtcgagctggatagactgagcgaagaatctgtgaacaacgacatctcctcctggacaaagggcagaagcggagaagctctgagcctcctgaagaaaagattctcccatagacccgtgcaggagaagttcgtgtgcctgaactgcggcttcgagacacacgcagccgagcaagccgccctgaacatcgccagatcctggctgttcctgcggagccaggagtacaagaaataccagacaaacaagacaaccggcaacaccgataagagagccttcgtcgagacctggcagtccttttaccggaagaagcttaaggaggtgtggaaacctgccgtgcggtctggcggatctggcggaggctccaccagccccaagaaaaagagaaaagtctaagctgccttctgcggggcttgccttctggccatgcccttcttctctcccttgcacctgtacctcttggtctttgaataaagcctgagtaggaaggctagcaaaaaaaaaaaaaaaaaaaaaaaaaaaaaaaaaaaaaaaaaaaaaaaaaaaaaaaaaaaaaaaaaaaaaaaaaaaaaaaa

SEQ ID NO: 12832 - RNA, 5785 nt, synthetic construct
  source 1..5785: mol_type = other RNA
aggaaataagagagaaaagaagagtaagaagaaatataagagccaccatggcccctaagaagaagcgtaaagtgagccggatggaacgcctcgtctacgaggtgcggcagaagtgcagaaacatcgaggacatctgcatctcctgcggatctctgaacgtgaccctggagcacccactgttcatcggcggcatgtgccagaactgtaaaaactgttttctggagtgtgcctatcaatacgacgatgacggctaccagagctactgcaccatctgttgcggcggaagagaggtgctgatgtgtggaaataacaactgctgccggtgcttctgcgtggaatgcgtggacctgctggtgggccccggcgccgcccaggccgctattaaggaagatccttggaactgctacatgtgcggccacaagggcacatacggcctgctgagacggagagaggactggcctagcagactgcagatgttcttcgccaataaccacgaccaggagttcgacccccctaaggtgtaccctcccgtccccgccgagaagagaaagcccatccgggtcctgagcctgttcgatggcatcgccaccggtctgctggtgctgaaggacctgggcatccaggtggataggtacattgcctccgaggtgtgcgaggactccatcaccgtgggaatggtgcgtcatcagggcaagatcatgtacgtgggcgacgtgcggagcgtgacacagaagcatatccaggagtggggccctttcgacctggtgatcggcggcagcccttgcaatgacctgagcatcgtgaacccagcccggaagggcctgtacgagggaaccggcagactgttcttcgagttttacagactgctgcacgacgcccggcctaaggaaggcgacgaccggcccttcttttggctgttcgagaatgtggtggccatgggagtcagcgacaagcgggatattagccggttcctggagagcaaccccgtgatgatcgatgccaaggaagtgagcgccgcccaccgggccagatacttctggggcaatctgcctggcatgaacagacccctggccagcaccgtgaacgacaagctggagctgcaggagtgcctggagcacggccggatcgccaagttcagcaaggtgagaaccatcaccacccgaagcaacagcatcaaacaaggcaaggaccagcactttcctgtgttcatgaacgagaaggaggacatcctgtggtgtaccgagatggagagagtgttcgggttcccagtccactacacagatgtcagcaacatgtctagactggccagacagagactgctgggaagaagctggtccgtccctgtgatcagacacctgttcgcccctctgaaggagtacttcgcctgcgtgagcagcggcaacagcaacgccaacagccggggccccagcttctctagcggcctggtgccactgtccctgagagggagccacatgggccccatggagatctacaaaaccgtgagcgcctggaagcggcagcctgtgcgcgtgctgagcctgtttcggaatatcgataaagtcctgaaaagcctgggattcctggagagcggctctggctccggcggtggcaccctgaagtacgtggaggatgtgacaaacgtggtcagacgggatgtggagaagtggggccccttcgatctggtgtacggcagcacccaacccctgggcagctcttgtgaccggtgccctggctggtacatgtttcagttccaccggatcctgcagtacgccctgccgagacaggagtcccagcggccattcttttggattttcatggacaacttgctgctgaccgaggatgaccaggaaactaccactcggttcctgcagaccgaagccgtgaccctgcaggacgtgagaggccgggactaccagaacgccatgcgggtgtggtccaacatccctggactgaaaagcaagcacgcacctctgacccctaaagaagaggagtacctgcaggcccaggtgcggagcagaagcaagctggacgcccctaaggtggatctgctggtgaagaattgcctcctgcccctgagagagtacttcaagtatttcagccagaatagtctgcccctgggaggcagcggcggcggcagctggggccccctgagcttcatggacgtgttcgtggacttcacctgggaggagtggcagctgctggaccccgcccagaagtgcctgtacaggagcgtgatgctggagaactacagcaacctggtgagcctgggctaccagcacaccaagcccgacatcatcttcaagctggagcagggcgaggagctgtgcatggtgcaggcccaggtgcccaaccagacctgccccaacaccgtgtggaagggcggcccaagcagcggcgcccctcctcccagcggcggcagcccagccggctccccaacctctaccgaggagggcacctctgagtccgccacccccgagagcggccctggcacctccaccgagcccagcgagggcagcgcacccggcagccctgccggcagccccacctccacagaggagggaaccagcaccgagcccagcgaaggcagcgccccaggcaccagcaccgagcctagtgagcaggagattaaacggatcaacaagatcagaagaagacttgtgaaagacagcaacaccaagaaggccggcaagacaggccccatgaaaaccctgctggttagagtgatgacacccgatctgagagagcggctggaaaacctgagaaagaagcctgaaaatatcccccagcccatcagcaatacatctagagccaacctgaataagctgctgaccgattacaccgaaatgaagaaggcgatcctgcatgtgtactgggaagagttccagaaggaccctgtgggcctgatgagccgggtggcccagcctgccagcaagaagatcgatcagaacaagctgaaacctgagatggacgagaagggcaacctgaccaccgccggctttgcctgctctcagtgtggccagcccctgttcgtgtacaagctggagcaggtgtctgagaagggcaaggcttacaccaactacttcggacggtgcaatgtggccgagcacgaaaagctgatcctgctggcccagctgaagcccgagaaggatagcgacgaagccgtgacatatagcctgggaaagtttgggcagagggccctggatttctacagcattcatgtgaccaaggagtccacccaccccgtgaagcccctggcccagatcgccggaaacagatacgcctccggacctgtgggaaaggccctgagcgacgcatgtatgggcacaatcgcctccttcctgtctaagtaccaggacatcatcatcgaacaccagaaggtggtgaagggcaaccagaagagactggagagcctgcgggagctggccggcaaggaaaacctggaataccctagcgtgaccctgccacctcagcctcacaccaaggagggcgttgatgcctacaacgaagtgatcgcccgggtgcgaatgtgggtgaacctgaacctgtggcagaagctgaagctaagcagagatgatgccaagcctctgctgagactgaagggattcccttcctttcctctggtcgagagacaggccaacgaagtggactggtgggacatggtgtgtaacgtgaagaagctgatcaacgagaaaaaggaggatggcaaggtgttttggcagaatctggctggctacaagagacaggaagccctgagaccatacctgagcagcgaggaagatcggaagaagggaaagaaattcgctcggtaccagctgggcgacctgctgctgcacctggaaaagaagcacggcgaggactggggaaaggtgtacgacgaggcctgggagcggattgacaagaaagtggaaggcctgagcaagcacatcaagctggaagaggaacggagaagcgaggacgcccagagcaaggccgccctgaccgactggctgcgggctaaggccagcttcgtgatcgagggcctgaaggaggccgacaaggacgagttctgcagatgcgagctgaagctgcagaagtggtacggggacctgcggggaaagcccttcgccatcgaagccgagaacagcatcctggacatcagcggcttcagcaagcagtacaactgtgccttcatctggcagaaggacggcgtgaagaagctgaacctgtacctgatcatcaactacttcaagggcggcaagctgcggttcaagaagatcaaacctgaagccttcgaagccaacagattctacaccgtgatcaacaaaaagagcggcgagatcgtgcccatggaggtgaacttcaacttcgacgaccccaacctgatcatcctgcctctggcctttggcaagagacagggcagagaattcatctggaacgacctgctgtccctggaaaccggcagcctgaagctggccaacggaagagtgatcgagaagacactgtacaacagaagaacccggcaggatgagcctgccctgttcgtggccctgaccttcgagcggcgggaggtcctggactcctccaatatcaaaccaatgaacctgatcggcgtggcaagaggcgaaaacatccccgccgtgatcgccctgaccgaccccgagggctgcccactgagccggtttaaggatagcctgggaaacccaacccacatcctgagaatcggcgagagctataaggagaagcagcggaccatccaggccaagaaggaggtggagcagcggagagccggcggctacagccggaagtacgccagcaaagccaagaatctggcagacgatatggtgagaaacaccgctagagatctgctgtactacgccgtgacccaggatgccatgctgatcttcgccaacctgagccggggcttcggccggcagggcaagcggaccttcatggccgagagacagtacacacggatggaggactggctgaccgccaagctggcctacgagggcctgagcaagacctacctgtccaagacactggcccagtacacctccaagacatgcagcaactgtgggtttaccatcaccagcgccgactacgacagggtgctggagaagctgaagaagacagcaacaggctggatgaccacaattaacggcaaggagctgaaggtggagggccagattacctactacaacagatacaagagacagaacgtagtcaaggacctgtccgtcgagctggatagactgagcgaagaatctgtgaacaacgacatctcctcctggacaaagggcagaagcggagaagctctgagcctcctgaagaaaagattctcccatagacccgtgcaggagaagttcgtgtgcctgaactgcggcttcgagacacacgcagccgagcaagccgccctgaacatcgccagatcctggctgttcctgcggagccaggagtacaagaaataccagacaaacaagacaaccggcaacaccgataagagagccttcgtcgagacctggcagtccttttaccggaagaagcttaaggaggtgtggaaacctgccgtgcggtctggcggatctggcggaggctccaccagccccaagaaaaagagaaaagtctaagctgccttctgcggggcttgccttctggccatgcccttcttctctcccttgcacctgtacctcttggtctttgaataaagcctgagtaggaaggctagcaaaaaaaaaaaaaaaaaaaaaaaaaaaaaaaaaaaaaaaaaaaaaaaaaaaaaaaaaaaaaaaaaaaaaaaaaaaaaaaa

SEQ ID NO: 12833 - RNA, 5785 nt, synthetic construct
  source 1..5785: mol_type = other RNA
aggaaataagagagaaaagaagagtaagaagaaatataagagccaccatggcccctaagaagaagcgtaaagtgagccggatggaacgcctcgtctacgaggtgcggcagaagtgcagaaacatcgaggacatctgcatctcctgcggatctctgaacgtgaccctggagcacccactgttcatcggcggcatgtgccagaactgtaaaaactgttttctggagtgtgcctatcaatacgacgatgacggctaccagagctactgcaccatctgttgcggcggaagagaggtgctgatgtgtggaaataacaactgctgccggtgcttctgcgtggaatgcgtggacctgctggtgggccccggcgccgcccaggccgctattaaggaagatccttggaactgctacatgtgcggccacaagggcacatacggcctgctgagacggagagaggactggcctagcagactgcagatgttcttcgccaataaccacgaccaggagttcgacccccctaaggtgtaccctcccgtccccgccgagaagagaaagcccatccgggtcctgagcctgttcgatggcatcgccaccggtctgctggtgctgaaggacctgggcatccaggtggataggtacattgcctccgaggtgtgcgaggactccatcaccgtgggaatggtgcgtcatcagggcaagatcatgtacgtgggcgacgtgcggagcgtgacacagaagcatatccaggagtggggccctttcgacctggtgatcggcggcagcccttgcaatgacctgagcatcgtgaacccagcccggaagggcctgtacgagggaaccggcagactgttcttcgagttttacagactgctgcacgacgcccggcctaaggaaggcgacgaccggcccttcttttggctgttcgagaatgtggtggccatgggagtcagcgacaagcgggatattagccggttcctggagagcaaccccgtgatgatcgatgccaaggaagtgagcgccgcccaccgggccagatacttctggggcaatctgcctggcatgaacagacccctggccagcaccgtgaacgacaagctggagctgcaggagtgcctggagcacggccggatcgccaagttcagcaaggtgagaaccatcaccacccgaagcaacagcatcaaacaaggcaaggaccagcactttcctgtgttcatgaacgagaaggaggacatcctgtggtgtaccgagatggagagagtgttcgggttcccagtccactacacagatgtcagcaacatgtctagactggccagacagagactgctgggaagaagctggtccgtccctgtgatcagacacctgttcgcccctctgaaggagtacttcgcctgcgtgagcagcggcaacagcaacgccaacagccggggccccagcttctctagcggcctggtgccactgtccctgagagggagccacatgggccccatggagatctacaaaaccgtgagcgcctggaagcggcagcctgtgcgcgtgctgagcctgtttcggaatatcgataaagtcctgaaaagcctgggattcctggagagcggctctggctccggcggtggcaccctgaagtacgtggaggatgtgacaaacgtggtcagacgggatgtggagaagtggggccccttcgatctggtgtacggcagcacccaacccctgggcagctcttgtgaccggtgccctggctggtacatgtttcagttccaccggatcctgcagtacgccctgccgagacaggagtcccagcggccattcttttggattttcatggacaacttgctgctgaccgaggatgaccaggaaactaccactcggttcctgcagaccgaagccgtgaccctgcaggacgtgagaggccgggactaccagaacgccatgcgggtgtggtccaacatccctggactgaaaagcaagcacgcacctctgacccctaaagaagaggagtacctgcaggcccaggtgcggagcagaagcaagctggacgcccctaaggtggatctgctggtgaagaattgcctcctgcccctgagagagtacttcaagtatttcagccagaatagtctgcccctgggaggcagcggcggcggcgcccaggtggccttcgaggacgtggccgtgtacttcaccgaggagcagtgggccctgctggaccacagccagagggccctgtacagggacgtgatgcaggagaactacgagaccgtggccagcctgggcctgcccatccccggccccgacagcatcagcaggctgcagcagagggaggagagcaggatcgaggcccagcccgtgctggagggcaacgacgtgagcagcgacgacgacctgggcggcggcccaagcagcggcgcccctcctcccagcggcggcagcccagccggctccccaacctctaccgaggagggcacctctgagtccgccacccccgagagcggccctggcacctccaccgagcccagcgagggcagcgcacccggcagccctgccggcagccccacctccacagaggagggaaccagcaccgagcccagcgaaggcagcgccccaggcaccagcaccgagcctagtgagcaggagattaaacggatcaacaagatcagaagaagacttgtgaaagacagcaacaccaagaaggccggcaagacaggccccatgaaaaccctgctggttagagtgatgacacccgatctgagagagcggctggaaaacctgagaaagaagcctgaaaatatcccccagcccatcagcaatacatctagagccaacctgaataagctgctgaccgattacaccgaaatgaagaaggcgatcctgcatgtgtactgggaagagttccagaaggaccctgtgggcctgatgagccgggtggcccagcctgccagcaagaagatcgatcagaacaagctgaaacctgagatggacgagaagggcaacctgaccaccgccggctttgcctgctctcagtgtggccagcccctgttcgtgtacaagctggagcaggtgtctgagaagggcaaggcttacaccaactacttcggacggtgcaatgtggccgagcacgaaaagctgatcctgctggcccagctgaagcccgagaaggatagcgacgaagccgtgacatatagcctgggaaagtttgggcagagggccctggatttctacagcattcatgtgaccaaggagtccacccaccccgtgaagcccctggcccagatcgccggaaacagatacgcctccggacctgtgggaaaggccctgagcgacgcatgtatgggcacaatcgcctccttcctgtctaagtaccaggacatcatcatcgaacaccagaaggtggtgaagggcaaccagaagagactggagagcctgcgggagctggccggcaaggaaaacctggaataccctagcgtgaccctgccacctcagcctcacaccaaggagggcgttgatgcctacaacgaagtgatcgcccgggtgcgaatgtgggtgaacctgaacctgtggcagaagctgaagctaagcagagatgatgccaagcctctgctgagactgaagggattcccttcctttcctctggtcgagagacaggccaacgaagtggactggtgggacatggtgtgtaacgtgaagaagctgatcaacgagaaaaaggaggatggcaaggtgttttggcagaatctggctggctacaagagacaggaagccctgagaccatacctgagcagcgaggaagatcggaagaagggaaagaaattcgctcggtaccagctgggcgacctgctgctgcacctggaaaagaagcacggcgaggactggggaaaggtgtacgacgaggcctgggagcggattgacaagaaagtggaaggcctgagcaagcacatcaagctggaagaggaacggagaagcgaggacgcccagagcaaggccgccctgaccgactggctgcgggctaaggccagcttcgtgatcgagggcctgaaggaggccgacaaggacgagttctgcagatgcgagctgaagctgcagaagtggtacggggacctgcggggaaagcccttcgccatcgaagccgagaacagcatcctggacatcagcggcttcagcaagcagtacaactgtgccttcatctggcagaaggacggcgtgaagaagctgaacctgtacctgatcatcaactacttcaagggcggcaagctgcggttcaagaagatcaaacctgaagccttcgaagccaacagattctacaccgtgatcaacaaaaagagcggcgagatcgtgcccatggaggtgaacttcaacttcgacgaccccaacctgatcatcctgcctctggcctttggcaagagacagggcagagaattcatctggaacgacctgctgtccctggaaaccggcagcctgaagctggccaacggaagagtgatcgagaagacactgtacaacagaagaacccggcaggatgagcctgccctgttcgtggccctgaccttcgagcggcgggaggtcctggactcctccaatatcaaaccaatgaacctgatcggcgtggcaagaggcgaaaacatccccgccgtgatcgccctgaccgaccccgagggctgcccactgagccggtttaaggatagcctgggaaacccaacccacatcctgagaatcggcgagagctataaggagaagcagcggaccatccaggccaagaaggaggtggagcagcggagagccggcggctacagccggaagtacgccagcaaagccaagaatctggcagacgatatggtgagaaacaccgctagagatctgctgtactacgccgtgacccaggatgccatgctgatcttcgccaacctgagccggggcttcggccggcagggcaagcggaccttcatggccgagagacagtacacacggatggaggactggctgaccgccaagctggcctacgagggcctgagcaagacctacctgtccaagacactggcccagtacacctccaagacatgcagcaactgtgggtttaccatcaccagcgccgactacgacagggtgctggagaagctgaagaagacagcaacaggctggatgaccacaattaacggcaaggagctgaaggtggagggccagattacctactacaacagatacaagagacagaacgtagtcaaggacctgtccgtcgagctggatagactgagcgaagaatctgtgaacaacgacatctcctcctggacaaagggcagaagcggagaagctctgagcctcctgaagaaaagattctcccatagacccgtgcaggagaagttcgtgtgcctgaactgcggcttcgagacacacgcagccgagcaagccgccctgaacatcgccagatcctggctgttcctgcggagccaggagtacaagaaataccagacaaacaagacaaccggcaacaccgataagagagccttcgtcgagacctggcagtccttttaccggaagaagcttaaggaggtgtggaaacctgccgtgcggtctggcggatctggcggaggctccaccagccccaagaaaaagagaaaagtctaagctgccttctgcggggcttgccttctggccatgcccttcttctctcccttgcacctgtacctcttggtctttgaataaagcctgagtaggaaggctagcaaaaaaaaaaaaaaaaaaaaaaaaaaaaaaaaaaaaaaaaaaaaaaaaaaaaaaaaaaaaaaaaaaaaaaaaaaaaaaaa

SEQ ID NO: 12834 - RNA, 5785 nt, synthetic construct
  source 1..5785: mol_type = other RNA
aggaaataagagagaaaagaagagtaagaagaaatataagagccaccatggcccctaagaagaagcgtaaagtgagccggatggaacgcctcgtctacgaggtgcggcagaagtgcagaaacatcgaggacatctgcatctcctgcggatctctgaacgtgaccctggagcacccactgttcatcggcggcatgtgccagaactgtaaaaactgttttctggagtgtgcctatcaatacgacgatgacggctaccagagctactgcaccatctgttgcggcggaagagaggtgctgatgtgtggaaataacaactgctgccggtgcttctgcgtggaatgcgtggacctgctggtgggccccggcgccgcccaggccgctattaaggaagatccttggaactgctacatgtgcggccacaagggcacatacggcctgctgagacggagagaggactggcctagcagactgcagatgttcttcgccaataaccacgaccaggagttcgacccccctaaggtgtaccctcccgtccccgccgagaagagaaagcccatccgggtcctgagcctgttcgatggcatcgccaccggtctgctggtgctgaaggacctgggcatccaggtggataggtacattgcctccgaggtgtgcgaggactccatcaccgtgggaatggtgcgtcatcagggcaagatcatgtacgtgggcgacgtgcggagcgtgacacagaagcatatccaggagtggggccctttcgacctggtgatcggcggcagcccttgcaatgacctgagcatcgtgaacccagcccggaagggcctgtacgagggaaccggcagactgttcttcgagttttacagactgctgcacgacgcccggcctaaggaaggcgacgaccggcccttcttttggctgttcgagaatgtggtggccatgggagtcagcgacaagcgggatattagccggttcctggagagcaaccccgtgatgatcgatgccaaggaagtgagcgccgcccaccgggccagatacttctggggcaatctgcctggcatgaacagacccctggccagcaccgtgaacgacaagctggagctgcaggagtgcctggagcacggccggatcgccaagttcagcaaggtgagaaccatcaccacccgaagcaacagcatcaaacaaggcaaggaccagcactttcctgtgttcatgaacgagaaggaggacatcctgtggtgtaccgagatggagagagtgttcgggttcccagtccactacacagatgtcagcaacatgtctagactggccagacagagactgctgggaagaagctggtccgtccctgtgatcagacacctgttcgcccctctgaaggagtacttcgcctgcgtgagcagcggcaacagcaacgccaacagccggggccccagcttctctagcggcctggtgccactgtccctgagagggagccacatgggccccatggagatctacaaaaccgtgagcgcctggaagcggcagcctgtgcgcgtgctgagcctgtttcggaatatcgataaagtcctgaaaagcctgggattcctggagagcggctctggctccggcggtggcaccctgaagtacgtggaggatgtgacaaacgtggtcagacgggatgtggagaagtggggccccttcgatctggtgtacggcagcacccaacccctgggcagctcttgtgaccggtgccctggctggtacatgtttcagttccaccggatcctgcagtacgccctgccgagacaggagtcccagcggccattcttttggattttcatggacaacttgctgctgaccgaggatgaccaggaaactaccactcggttcctgcagaccgaagccgtgaccctgcaggacgtgagaggccgggactaccagaacgccatgcgggtgtggtccaacatccctggactgaaaagcaagcacgcacctctgacccctaaagaagaggagtacctgcaggcccaggtgcggagcagaagcaagctggacgcccctaaggtggatctgctggtgaagaattgcctcctgcccctgagagagtacttcaagtatttcagccagaatagtctgcccctgggaggcagcggcggcggcttcaggggccccgtgaccttcaaggacatcaccgtggagttcacccaggaggagtggcagctgctggacaacgcccagaggaccctgtacagggaggtgatgcaggagaactaccaccacctgatcagcgtgggctactgcgtgaacaagcccaacgccgtgttcaagctgaagcagggcaaggagccctggatcctggaggtggagttccccaggaggaacaaccccgaggacctgtggaacggcggcccaagcagcggcgcccctcctcccagcggcggcagcccagccggctccccaacctctaccgaggagggcacctctgagtccgccacccccgagagcggccctggcacctccaccgagcccagcgagggcagcgcacccggcagccctgccggcagccccacctccacagaggagggaaccagcaccgagcccagcgaaggcagcgccccaggcaccagcaccgagcctagtgagcaggagattaaacggatcaacaagatcagaagaagacttgtgaaagacagcaacaccaagaaggccggcaagacaggccccatgaaaaccctgctggttagagtgatgacacccgatctgagagagcggctggaaaacctgagaaagaagcctgaaaatatcccccagcccatcagcaatacatctagagccaacctgaataagctgctgaccgattacaccgaaatgaagaaggcgatcctgcatgtgtactgggaagagttccagaaggaccctgtgggcctgatgagccgggtggcccagcctgccagcaagaagatcgatcagaacaagctgaaacctgagatggacgagaagggcaacctgaccaccgccggctttgcctgctctcagtgtggccagcccctgttcgtgtacaagctggagcaggtgtctgagaagggcaaggcttacaccaactacttcggacggtgcaatgtggccgagcacgaaaagctgatcctgctggcccagctgaagcccgagaaggatagcgacgaagccgtgacatatagcctgggaaagtttgggcagagggccctggatttctacagcattcatgtgaccaaggagtccacccaccccgtgaagcccctggcccagatcgccggaaacagatacgcctccggacctgtgggaaaggccctgagcgacgcatgtatgggcacaatcgcctccttcctgtctaagtaccaggacatcatcatcgaacaccagaaggtggtgaagggcaaccagaagagactggagagcctgcgggagctggccggcaaggaaaacctggaataccctagcgtgaccctgccacctcagcctcacaccaaggagggcgttgatgcctacaacgaagtgatcgcccgggtgcgaatgtgggtgaacctgaacctgtggcagaagctgaagctaagcagagatgatgccaagcctctgctgagactgaagggattcccttcctttcctctggtcgagagacaggccaacgaagtggactggtgggacatggtgtgtaacgtgaagaagctgatcaacgagaaaaaggaggatggcaaggtgttttggcagaatctggctggctacaagagacaggaagccctgagaccatacctgagcagcgaggaagatcggaagaagggaaagaaattcgctcggtaccagctgggcgacctgctgctgcacctggaaaagaagcacggcgaggactggggaaaggtgtacgacgaggcctgggagcggattgacaagaaagtggaaggcctgagcaagcacatcaagctggaagaggaacggagaagcgaggacgcccagagcaaggccgccctgaccgactggctgcgggctaaggccagcttcgtgatcgagggcctgaaggaggccgacaaggacgagttctgcagatgcgagctgaagctgcagaagtggtacggggacctgcggggaaagcccttcgccatcgaagccgagaacagcatcctggacatcagcggcttcagcaagcagtacaactgtgccttcatctggcagaaggacggcgtgaagaagctgaacctgtacctgatcatcaactacttcaagggcggcaagctgcggttcaagaagatcaaacctgaagccttcgaagccaacagattctacaccgtgatcaacaaaaagagcggcgagatcgtgcccatggaggtgaacttcaacttcgacgaccccaacctgatcatcctgcctctggcctttggcaagagacagggcagagaattcatctggaacgacctgctgtccctggaaaccggcagcctgaagctggccaacggaagagtgatcgagaagacactgtacaacagaagaacccggcaggatgagcctgccctgttcgtggccctgaccttcgagcggcgggaggtcctggactcctccaatatcaaaccaatgaacctgatcggcgtggcaagaggcgaaaacatccccgccgtgatcgccctgaccgaccccgagggctgcccactgagccggtttaaggatagcctgggaaacccaacccacatcctgagaatcggcgagagctataaggagaagcagcggaccatccaggccaagaaggaggtggagcagcggagagccggcggctacagccggaagtacgccagcaaagccaagaatctggcagacgatatggtgagaaacaccgctagagatctgctgtactacgccgtgacccaggatgccatgctgatcttcgccaacctgagccggggcttcggccggcagggcaagcggaccttcatggccgagagacagtacacacggatggaggactggctgaccgccaagctggcctacgagggcctgagcaagacctacctgtccaagacactggcccagtacacctccaagacatgcagcaactgtgggtttaccatcaccagcgccgactacgacagggtgctggagaagctgaagaagacagcaacaggctggatgaccacaattaacggcaaggagctgaaggtggagggccagattacctactacaacagatacaagagacagaacgtagtcaaggacctgtccgtcgagctggatagactgagcgaagaatctgtgaacaacgacatctcctcctggacaaagggcagaagcggagaagctctgagcctcctgaagaaaagattctcccatagacccgtgcaggagaagttcgtgtgcctgaactgcggcttcgagacacacgcagccgagcaagccgccctgaacatcgccagatcctggctgttcctgcggagccaggagtacaagaaataccagacaaacaagacaaccggcaacaccgataagagagccttcgtcgagacctggcagtccttttaccggaagaagcttaaggaggtgtggaaacctgccgtgcggtctggcggatctggcggaggctccaccagccccaagaaaaagagaaaagtctaagctgccttctgcggggcttgccttctggccatgcccttcttctctcccttgcacctgtacctcttggtctttgaataaagcctgagtaggaaggctagcaaaaaaaaaaaaaaaaaaaaaaaaaaaaaaaaaaaaaaaaaaaaaaaaaaaaaaaaaaaaaaaaaaaaaaaaaaaaaaaa

SEQ ID NO: 12835 - RNA, 5821 nt, synthetic construct
  source 1..5821: mol_type = other RNA
aggaaataagagagaaaagaagagtaagaagaaatataagagccaccatggcccctaagaagaagcgtaaagtgagccggatggaacgcctcgtctacgaggtgcggcagaagtgcagaaacatcgaggacatctgcatctcctgcggatctctgaacgtgaccctggagcacccactgttcatcggcggcatgtgccagaactgtaaaaactgttttctggagtgtgcctatcaatacgacgatgacggctaccagagctactgcaccatctgttgcggcggaagagaggtgctgatgtgtggaaataacaactgctgccggtgcttctgcgtggaatgcgtggacctgctggtgggccccggcgccgcccaggccgctattaaggaagatccttggaactgctacatgtgcggccacaagggcacatacggcctgctgagacggagagaggactggcctagcagactgcagatgttcttcgccaataaccacgaccaggagttcgacccccctaaggtgtaccctcccgtccccgccgagaagagaaagcccatccgggtcctgagcctgttcgatggcatcgccaccggtctgctggtgctgaaggacctgggcatccaggtggataggtacattgcctccgaggtgtgcgaggactccatcaccgtgggaatggtgcgtcatcagggcaagatcatgtacgtgggcgacgtgcggagcgtgacacagaagcatatccaggagtggggccctttcgacctggtgatcggcggcagcccttgcaatgacctgagcatcgtgaacccagcccggaagggcctgtacgagggaaccggcagactgttcttcgagttttacagactgctgcacgacgcccggcctaaggaaggcgacgaccggcccttcttttggctgttcgagaatgtggtggccatgggagtcagcgacaagcgggatattagccggttcctggagagcaaccccgtgatgatcgatgccaaggaagtgagcgccgcccaccgggccagatacttctggggcaatctgcctggcatgaacagacccctggccagcaccgtgaacgacaagctggagctgcaggagtgcctggagcacggccggatcgccaagttcagcaaggtgagaaccatcaccacccgaagcaacagcatcaaacaaggcaaggaccagcactttcctgtgttcatgaacgagaaggaggacatcctgtggtgtaccgagatggagagagtgttcgggttcccagtccactacacagatgtcagcaacatgtctagactggccagacagagactgctgggaagaagctggtccgtccctgtgatcagacacctgttcgcccctctgaaggagtacttcgcctgcgtgagcagcggcaacagcaacgccaacagccggggccccagcttctctagcggcctggtgccactgtccctgagagggagccacatgggccccatggagatctacaaaaccgtgagcgcctggaagcggcagcctgtgcgcgtgctgagcctgtttcggaatatcgataaagtcctgaaaagcctgggattcctggagagcggctctggctccggcggtggcaccctgaagtacgtggaggatgtgacaaacgtggtcagacgggatgtggagaagtggggccccttcgatctggtgtacggcagcacccaacccctgggcagctcttgtgaccggtgccctggctggtacatgtttcagttccaccggatcctgcagtacgccctgccgagacaggagtcccagcggccattcttttggattttcatggacaacttgctgctgaccgaggatgaccaggaaactaccactcggttcctgcagaccgaagccgtgaccctgcaggacgtgagaggccgggactaccagaacgccatgcgggtgtggtccaacatccctggactgaaaagcaagcacgcacctctgacccctaaagaagaggagtacctgcaggcccaggtgcggagcagaagcaagctggacgcccctaaggtggatctgctggtgaagaattgcctcctgcccctgagagagtacttcaagtatttcagccagaatagtctgcccctgggaggcagcggcggcggcttcagggaggtgagcgtgtacttcagcgaggaggagtggagctggctggaccccgaccagaaggccctgtactgggaggtgatgctggagaaccacaggaacatggccagcctgggcgacgacggccaggagaacaaggacagctacgagctgctgcagggcatcaccgccagggacaccatggagaccagcgccatcgagatggaggtggagaggtacaaggagaagcagagcgacgactggaaccaggagagcagcagctgcaccgacgacagcgtgggcggcccaagcagcggcgcccctcctcccagcggcggcagcccagccggctccccaacctctaccgaggagggcacctctgagtccgccacccccgagagcggccctggcacctccaccgagcccagcgagggcagcgcacccggcagccctgccggcagccccacctccacagaggagggaaccagcaccgagcccagcgaaggcagcgccccaggcaccagcaccgagcctagtgagcaggagattaaacggatcaacaagatcagaagaagacttgtgaaagacagcaacaccaagaaggccggcaagacaggccccatgaaaaccctgctggttagagtgatgacacccgatctgagagagcggctggaaaacctgagaaagaagcctgaaaatatcccccagcccatcagcaatacatctagagccaacctgaataagctgctgaccgattacaccgaaatgaagaaggcgatcctgcatgtgtactgggaagagttccagaaggaccctgtgggcctgatgagccgggtggcccagcctgccagcaagaagatcgatcagaacaagctgaaacctgagatggacgagaagggcaacctgaccaccgccggctttgcctgctctcagtgtggccagcccctgttcgtgtacaagctggagcaggtgtctgagaagggcaaggcttacaccaactacttcggacggtgcaatgtggccgagcacgaaaagctgatcctgctggcccagctgaagcccgagaaggatagcgacgaagccgtgacatatagcctgggaaagtttgggcagagggccctggatttctacagcattcatgtgaccaaggagtccacccaccccgtgaagcccctggcccagatcgccggaaacagatacgcctccggacctgtgggaaaggccctgagcgacgcatgtatgggcacaatcgcctccttcctgtctaagtaccaggacatcatcatcgaacaccagaaggtggtgaagggcaaccagaagagactggagagcctgcgggagctggccggcaaggaaaacctggaataccctagcgtgaccctgccacctcagcctcacaccaaggagggcgttgatgcctacaacgaagtgatcgcccgggtgcgaatgtgggtgaacctgaacctgtggcagaagctgaagctaagcagagatgatgccaagcctctgctgagactgaagggattcccttcctttcctctggtcgagagacaggccaacgaagtggactggtgggacatggtgtgtaacgtgaagaagctgatcaacgagaaaaaggaggatggcaaggtgttttggcagaatctggctggctacaagagacaggaagccctgagaccatacctgagcagcgaggaagatcggaagaagggaaagaaattcgctcggtaccagctgggcgacctgctgctgcacctggaaaagaagcacggcgaggactggggaaaggtgtacgacgaggcctgggagcggattgacaagaaagtggaaggcctgagcaagcacatcaagctggaagaggaacggagaagcgaggacgcccagagcaaggccgccctgaccgactggctgcgggctaaggccagcttcgtgatcgagggcctgaaggaggccgacaaggacgagttctgcagatgcgagctgaagctgcagaagtggtacggggacctgcggggaaagcccttcgccatcgaagccgagaacagcatcctggacatcagcggcttcagcaagcagtacaactgtgccttcatctggcagaaggacggcgtgaagaagctgaacctgtacctgatcatcaactacttcaagggcggcaagctgcggttcaagaagatcaaacctgaagccttcgaagccaacagattctacaccgtgatcaacaaaaagagcggcgagatcgtgcccatggaggtgaacttcaacttcgacgaccccaacctgatcatcctgcctctggcctttggcaagagacagggcagagaattcatctggaacgacctgctgtccctggaaaccggcagcctgaagctggccaacggaagagtgatcgagaagacactgtacaacagaagaacccggcaggatgagcctgccctgttcgtggccctgaccttcgagcggcgggaggtcctggactcctccaatatcaaaccaatgaacctgatcggcgtggcaagaggcgaaaacatccccgccgtgatcgccctgaccgaccccgagggctgcccactgagccggtttaaggatagcctgggaaacccaacccacatcctgagaatcggcgagagctataaggagaagcagcggaccatccaggccaagaaggaggtggagcagcggagagccggcggctacagccggaagtacgccagcaaagccaagaatctggcagacgatatggtgagaaacaccgctagagatctgctgtactacgccgtgacccaggatgccatgctgatcttcgccaacctgagccggggcttcggccggcagggcaagcggaccttcatggccgagagacagtacacacggatggaggactggctgaccgccaagctggcctacgagggcctgagcaagacctacctgtccaagacactggcccagtacacctccaagacatgcagcaactgtgggtttaccatcaccagcgccgactacgacagggtgctggagaagctgaagaagacagcaacaggctggatgaccacaattaacggcaaggagctgaaggtggagggccagattacctactacaacagatacaagagacagaacgtagtcaaggacctgtccgtcgagctggatagactgagcgaagaatctgtgaacaacgacatctcctcctggacaaagggcagaagcggagaagctctgagcctcctgaagaaaagattctcccatagacccgtgcaggagaagttcgtgtgcctgaactgcggcttcgagacacacgcagccgagcaagccgccctgaacatcgccagatcctggctgttcctgcggagccaggagtacaagaaataccagacaaacaagacaaccggcaacaccgataagagagccttcgtcgagacctggcagtccttttaccggaagaagcttaaggaggtgtggaaacctgccgtgcggtctggcggatctggcggaggctccaccagccccaagaaaaagagaaaagtctaagctgccttctgcggggcttgccttctggccatgcccttcttctctcccttgcacctgtacctcttggtctttgaataaagcctgagtaggaaggctagcaaaaaaaaaaaaaaaaaaaaaaaaaaaaaaaaaaaaaaaaaaaaaaaaaaaaaaaaaaaaaaaaaaaaaaaaaaaaaaaa

SEQ ID NO: 12836 - RNA, 5785 nt, synthetic construct
  source 1..5785: mol_type = other RNA
aggaaataagagagaaaagaagagtaagaagaaatataagagccaccatggcccctaagaagaagcgtaaagtgagccggatggaacgcctcgtctacgaggtgcggcagaagtgcagaaacatcgaggacatctgcatctcctgcggatctctgaacgtgaccctggagcacccactgttcatcggcggcatgtgccagaactgtaaaaactgttttctggagtgtgcctatcaatacgacgatgacggctaccagagctactgcaccatctgttgcggcggaagagaggtgctgatgtgtggaaataacaactgctgccggtgcttctgcgtggaatgcgtggacctgctggtgggccccggcgccgcccaggccgctattaaggaagatccttggaactgctacatgtgcggccacaagggcacatacggcctgctgagacggagagaggactggcctagcagactgcagatgttcttcgccaataaccacgaccaggagttcgacccccctaaggtgtaccctcccgtccccgccgagaagagaaagcccatccgggtcctgagcctgttcgatggcatcgccaccggtctgctggtgctgaaggacctgggcatccaggtggataggtacattgcctccgaggtgtgcgaggactccatcaccgtgggaatggtgcgtcatcagggcaagatcatgtacgtgggcgacgtgcggagcgtgacacagaagcatatccaggagtggggccctttcgacctggtgatcggcggcagcccttgcaatgacctgagcatcgtgaacccagcccggaagggcctgtacgagggaaccggcagactgttcttcgagttttacagactgctgcacgacgcccggcctaaggaaggcgacgaccggcccttcttttggctgttcgagaatgtggtggccatgggagtcagcgacaagcgggatattagccggttcctggagagcaaccccgtgatgatcgatgccaaggaagtgagcgccgcccaccgggccagatacttctggggcaatctgcctggcatgaacagacccctggccagcaccgtgaacgacaagctggagctgcaggagtgcctggagcacggccggatcgccaagttcagcaaggtgagaaccatcaccacccgaagcaacagcatcaaacaaggcaaggaccagcactttcctgtgttcatgaacgagaaggaggacatcctgtggtgtaccgagatggagagagtgttcgggttcccagtccactacacagatgtcagcaacatgtctagactggccagacagagactgctgggaagaagctggtccgtccctgtgatcagacacctgttcgcccctctgaaggagtacttcgcctgcgtgagcagcggcaacagcaacgccaacagccggggccccagcttctctagcggcctggtgccactgtccctgagagggagccacatgggccccatggagatctacaaaaccgtgagcgcctggaagcggcagcctgtgcgcgtgctgagcctgtttcggaatatcgataaagtcctgaaaagcctgggattcctggagagcggctctggctccggcggtggcaccctgaagtacgtggaggatgtgacaaacgtggtcagacgggatgtggagaagtggggccccttcgatctggtgtacggcagcacccaacccctgggcagctcttgtgaccggtgccctggctggtacatgtttcagttccaccggatcctgcagtacgccctgccgagacaggagtcccagcggccattcttttggattttcatggacaacttgctgctgaccgaggatgaccaggaaactaccactcggttcctgcagaccgaagccgtgaccctgcaggacgtgagaggccgggactaccagaacgccatgcgggtgtggtccaacatccctggactgaaaagcaagcacgcacctctgacccctaaagaagaggagtacctgcaggcccaggtgcggagcagaagcaagctggacgcccctaaggtggatctgctggtgaagaattgcctcctgcccctgagagagtacttcaagtatttcagccagaatagtctgcccctgggaggcagcggcggcggcgacaccgtggtgttcgaggacgtggtggtgggcttcaccctggaggagtgggccctgctgaaccccgcccagaggaacctgtacagggaggtgatgctggagaccttcaagcacctggccagcgtggacaacgaggcccagcccaagaccaacggcagcatcagccagcaggacaccagcggcgagaagctgagcctgaagcagaagatcgagaagttcaccaggaagcacacctgggccagcggcggcccaagcagcggcgcccctcctcccagcggcggcagcccagccggctccccaacctctaccgaggagggcacctctgagtccgccacccccgagagcggccctggcacctccaccgagcccagcgagggcagcgcacccggcagccctgccggcagccccacctccacagaggagggaaccagcaccgagcccagcgaaggcagcgccccaggcaccagcaccgagcctagtgagcaggagattaaacggatcaacaagatcagaagaagacttgtgaaagacagcaacaccaagaaggccggcaagacaggccccatgaaaaccctgctggttagagtgatgacacccgatctgagagagcggctggaaaacctgagaaagaagcctgaaaatatcccccagcccatcagcaatacatctagagccaacctgaataagctgctgaccgattacaccgaaatgaagaaggcgatcctgcatgtgtactgggaagagttccagaaggaccctgtgggcctgatgagccgggtggcccagcctgccagcaagaagatcgatcagaacaagctgaaacctgagatggacgagaagggcaacctgaccaccgccggctttgcctgctctcagtgtggccagcccctgttcgtgtacaagctggagcaggtgtctgagaagggcaaggcttacaccaactacttcggacggtgcaatgtggccgagcacgaaaagctgatcctgctggcccagctgaagcccgagaaggatagcgacgaagccgtgacatatagcctgggaaagtttgggcagagggccctggatttctacagcattcatgtgaccaaggagtccacccaccccgtgaagcccctggcccagatcgccggaaacagatacgcctccggacctgtgggaaaggccctgagcgacgcatgtatgggcacaatcgcctccttcctgtctaagtaccaggacatcatcatcgaacaccagaaggtggtgaagggcaaccagaagagactggagagcctgcgggagctggccggcaaggaaaacctggaataccctagcgtgaccctgccacctcagcctcacaccaaggagggcgttgatgcctacaacgaagtgatcgcccgggtgcgaatgtgggtgaacctgaacctgtggcagaagctgaagctaagcagagatgatgccaagcctctgctgagactgaagggattcccttcctttcctctggtcgagagacaggccaacgaagtggactggtgggacatggtgtgtaacgtgaagaagctgatcaacgagaaaaaggaggatggcaaggtgttttggcagaatctggctggctacaagagacaggaagccctgagaccatacctgagcagcgaggaagatcggaagaagggaaagaaattcgctcggtaccagctgggcgacctgctgctgcacctggaaaagaagcacggcgaggactggggaaaggtgtacgacgaggcctgggagcggattgacaagaaagtggaaggcctgagcaagcacatcaagctggaagaggaacggagaagcgaggacgcccagagcaaggccgccctgaccgactggctgcgggctaaggccagcttcgtgatcgagggcctgaaggaggccgacaaggacgagttctgcagatgcgagctgaagctgcagaagtggtacggggacctgcggggaaagcccttcgccatcgaagccgagaacagcatcctggacatcagcggcttcagcaagcagtacaactgtgccttcatctggcagaaggacggcgtgaagaagctgaacctgtacctgatcatcaactacttcaagggcggcaagctgcggttcaagaagatcaaacctgaagccttcgaagccaacagattctacaccgtgatcaacaaaaagagcggcgagatcgtgcccatggaggtgaacttcaacttcgacgaccccaacctgatcatcctgcctctggcctttggcaagagacagggcagagaattcatctggaacgacctgctgtccctggaaaccggcagcctgaagctggccaacggaagagtgatcgagaagacactgtacaacagaagaacccggcaggatgagcctgccctgttcgtggccctgaccttcgagcggcgggaggtcctggactcctccaatatcaaaccaatgaacctgatcggcgtggcaagaggcgaaaacatccccgccgtgatcgccctgaccgaccccgagggctgcccactgagccggtttaaggatagcctgggaaacccaacccacatcctgagaatcggcgagagctataaggagaagcagcggaccatccaggccaagaaggaggtggagcagcggagagccggcggctacagccggaagtacgccagcaaagccaagaatctggcagacgatatggtgagaaacaccgctagagatctgctgtactacgccgtgacccaggatgccatgctgatcttcgccaacctgagccggggcttcggccggcagggcaagcggaccttcatggccgagagacagtacacacggatggaggactggctgaccgccaagctggcctacgagggcctgagcaagacctacctgtccaagacactggcccagtacacctccaagacatgcagcaactgtgggtttaccatcaccagcgccgactacgacagggtgctggagaagctgaagaagacagcaacaggctggatgaccacaattaacggcaaggagctgaaggtggagggccagattacctactacaacagatacaagagacagaacgtagtcaaggacctgtccgtcgagctggatagactgagcgaagaatctgtgaacaacgacatctcctcctggacaaagggcagaagcggagaagctctgagcctcctgaagaaaagattctcccatagacccgtgcaggagaagttcgtgtgcctgaactgcggcttcgagacacacgcagccgagcaagccgccctgaacatcgccagatcctggctgttcctgcggagccaggagtacaagaaataccagacaaacaagacaaccggcaacaccgataagagagccttcgtcgagacctggcagtccttttaccggaagaagcttaaggaggtgtggaaacctgccgtgcggtctggcggatctggcggaggctccaccagccccaagaaaaagagaaaagtctaagctgccttctgcggggcttgccttctggccatgcccttcttctctcccttgcacctgtacctcttggtctttgaataaagcctgagtaggaaggctagcaaaaaaaaaaaaaaaaaaaaaaaaaaaaaaaaaaaaaaaaaaaaaaaaaaaaaaaaaaaaaaaaaaaaaaaaaaaaaaaa

SEQ ID NO: 12837 - RNA, 5785 nt, synthetic construct
  source 1..5785: mol_type = other RNA
aggaaataagagagaaaagaagagtaagaagaaatataagagccaccatggcccctaagaagaagcgtaaagtgagccggatggaacgcctcgtctacgaggtgcggcagaagtgcagaaacatcgaggacatctgcatctcctgcggatctctgaacgtgaccctggagcacccactgttcatcggcggcatgtgccagaactgtaaaaactgttttctggagtgtgcctatcaatacgacgatgacggctaccagagctactgcaccatctgttgcggcggaagagaggtgctgatgtgtggaaataacaactgctgccggtgcttctgcgtggaatgcgtggacctgctggtgggccccggcgccgcccaggccgctattaaggaagatccttggaactgctacatgtgcggccacaagggcacatacggcctgctgagacggagagaggactggcctagcagactgcagatgttcttcgccaataaccacgaccaggagttcgacccccctaaggtgtaccctcccgtccccgccgagaagagaaagcccatccgggtcctgagcctgttcgatggcatcgccaccggtctgctggtgctgaaggacctgggcatccaggtggataggtacattgcctccgaggtgtgcgaggactccatcaccgtgggaatggtgcgtcatcagggcaagatcatgtacgtgggcgacgtgcggagcgtgacacagaagcatatccaggagtggggccctttcgacctggtgatcggcggcagcccttgcaatgacctgagcatcgtgaacccagcccggaagggcctgtacgagggaaccggcagactgttcttcgagttttacagactgctgcacgacgcccggcctaaggaaggcgacgaccggcccttcttttggctgttcgagaatgtggtggccatgggagtcagcgacaagcgggatattagccggttcctggagagcaaccccgtgatgatcgatgccaaggaagtgagcgccgcccaccgggccagatacttctggggcaatctgcctggcatgaacagacccctggccagcaccgtgaacgacaagctggagctgcaggagtgcctggagcacggccggatcgccaagttcagcaaggtgagaaccatcaccacccgaagcaacagcatcaaacaaggcaaggaccagcactttcctgtgttcatgaacgagaaggaggacatcctgtggtgtaccgagatggagagagtgttcgggttcccagtccactacacagatgtcagcaacatgtctagactggccagacagagactgctgggaagaagctggtccgtccctgtgatcagacacctgttcgcccctctgaaggagtacttcgcctgcgtgagcagcggcaacagcaacgccaacagccggggccccagcttctctagcggcctggtgccactgtccctgagagggagccacatgggccccatggagatctacaaaaccgtgagcgcctggaagcggcagcctgtgcgcgtgctgagcctgtttcggaatatcgataaagtcctgaaaagcctgggattcctggagagcggctctggctccggcggtggcaccctgaagtacgtggaggatgtgacaaacgtggtcagacgggatgtggagaagtggggccccttcgatctggtgtacggcagcacccaacccctgggcagctcttgtgaccggtgccctggctggtacatgtttcagttccaccggatcctgcagtacgccctgccgagacaggagtcccagcggccattcttttggattttcatggacaacttgctgctgaccgaggatgaccaggaaactaccactcggttcctgcagaccgaagccgtgaccctgcaggacgtgagaggccgggactaccagaacgccatgcgggtgtggtccaacatccctggactgaaaagcaagcacgcacctctgacccctaaagaagaggagtacctgcaggcccaggtgcggagcagaagcaagctggacgcccctaaggtggatctgctggtgaagaattgcctcctgcccctgagagagtacttcaagtatttcagccagaatagtctgcccctgggaggcagcggcggcggcgcccacgccctggtgaccttcagggacgtggccatcgacttcagccagaaggagtgggagtgcctggacaccacccagaggaagctgtacagggacgtgatgctggagaactacaacaacctggtgagcctggccggctacagcggcagcaagcccgacgtgatcaccctgctggagcagggcaaggagccctgcgtggtggccagggacgtgaccggcaggcagtgccccggcctgctgagcggcggcccaagcagcggcgcccctcctcccagcggcggcagcccagccggctccccaacctctaccgaggagggcacctctgagtccgccacccccgagagcggccctggcacctccaccgagcccagcgagggcagcgcacccggcagccctgccggcagccccacctccacagaggagggaaccagcaccgagcccagcgaaggcagcgccccaggcaccagcaccgagcctagtgagcaggagattaaacggatcaacaagatcagaagaagacttgtgaaagacagcaacaccaagaaggccggcaagacaggccccatgaaaaccctgctggttagagtgatgacacccgatctgagagagcggctggaaaacctgagaaagaagcctgaaaatatcccccagcccatcagcaatacatctagagccaacctgaataagctgctgaccgattacaccgaaatgaagaaggcgatcctgcatgtgtactgggaagagttccagaaggaccctgtgggcctgatgagccgggtggcccagcctgccagcaagaagatcgatcagaacaagctgaaacctgagatggacgagaagggcaacctgaccaccgccggctttgcctgctctcagtgtggccagcccctgttcgtgtacaagctggagcaggtgtctgagaagggcaaggcttacaccaactacttcggacggtgcaatgtggccgagcacgaaaagctgatcctgctggcccagctgaagcccgagaaggatagcgacgaagccgtgacatatagcctgggaaagtttgggcagagggccctggatttctacagcattcatgtgaccaaggagtccacccaccccgtgaagcccctggcccagatcgccggaaacagatacgcctccggacctgtgggaaaggccctgagcgacgcatgtatgggcacaatcgcctccttcctgtctaagtaccaggacatcatcatcgaacaccagaaggtggtgaagggcaaccagaagagactggagagcctgcgggagctggccggcaaggaaaacctggaataccctagcgtgaccctgccacctcagcctcacaccaaggagggcgttgatgcctacaacgaagtgatcgcccgggtgcgaatgtgggtgaacctgaacctgtggcagaagctgaagctaagcagagatgatgccaagcctctgctgagactgaagggattcccttcctttcctctggtcgagagacaggccaacgaagtggactggtgggacatggtgtgtaacgtgaagaagctgatcaacgagaaaaaggaggatggcaaggtgttttggcagaatctggctggctacaagagacaggaagccctgagaccatacctgagcagcgaggaagatcggaagaagggaaagaaattcgctcggtaccagctgggcgacctgctgctgcacctggaaaagaagcacggcgaggactggggaaaggtgtacgacgaggcctgggagcggattgacaagaaagtggaaggcctgagcaagcacatcaagctggaagaggaacggagaagcgaggacgcccagagcaaggccgccctgaccgactggctgcgggctaaggccagcttcgtgatcgagggcctgaaggaggccgacaaggacgagttctgcagatgcgagctgaagctgcagaagtggtacggggacctgcggggaaagcccttcgccatcgaagccgagaacagcatcctggacatcagcggcttcagcaagcagtacaactgtgccttcatctggcagaaggacggcgtgaagaagctgaacctgtacctgatcatcaactacttcaagggcggcaagctgcggttcaagaagatcaaacctgaagccttcgaagccaacagattctacaccgtgatcaacaaaaagagcggcgagatcgtgcccatggaggtgaacttcaacttcgacgaccccaacctgatcatcctgcctctggcctttggcaagagacagggcagagaattcatctggaacgacctgctgtccctggaaaccggcagcctgaagctggccaacggaagagtgatcgagaagacactgtacaacagaagaacccggcaggatgagcctgccctgttcgtggccctgaccttcgagcggcgggaggtcctggactcctccaatatcaaaccaatgaacctgatcggcgtggcaagaggcgaaaacatccccgccgtgatcgccctgaccgaccccgagggctgcccactgagccggtttaaggatagcctgggaaacccaacccacatcctgagaatcggcgagagctataaggagaagcagcggaccatccaggccaagaaggaggtggagcagcggagagccggcggctacagccggaagtacgccagcaaagccaagaatctggcagacgatatggtgagaaacaccgctagagatctgctgtactacgccgtgacccaggatgccatgctgatcttcgccaacctgagccggggcttcggccggcagggcaagcggaccttcatggccgagagacagtacacacggatggaggactggctgaccgccaagctggcctacgagggcctgagcaagacctacctgtccaagacactggcccagtacacctccaagacatgcagcaactgtgggtttaccatcaccagcgccgactacgacagggtgctggagaagctgaagaagacagcaacaggctggatgaccacaattaacggcaaggagctgaaggtggagggccagattacctactacaacagatacaagagacagaacgtagtcaaggacctgtccgtcgagctggatagactgagcgaagaatctgtgaacaacgacatctcctcctggacaaagggcagaagcggagaagctctgagcctcctgaagaaaagattctcccatagacccgtgcaggagaagttcgtgtgcctgaactgcggcttcgagacacacgcagccgagcaagccgccctgaacatcgccagatcctggctgttcctgcggagccaggagtacaagaaataccagacaaacaagacaaccggcaacaccgataagagagccttcgtcgagacctggcagtccttttaccggaagaagcttaaggaggtgtggaaacctgccgtgcggtctggcggatctggcggaggctccaccagccccaagaaaaagagaaaagtctaagctgccttctgcggggcttgccttctggccatgcccttcttctctcccttgcacctgtacctcttggtctttgaataaagcctgagtaggaaggctagcaaaaaaaaaaaaaaaaaaaaaaaaaaaaaaaaaaaaaaaaaaaaaaaaaaaaaaaaaaaaaaaaaaaaaaaaaaaaaaaa
